United States Patent Application Publication US 2012/0070457 A1 - sequence listing, part 4

SEQ ID NO: 28285 - protein, 640 aa, Neisseria meningitidis
MIEIKNLTLQRGLKVLLDKANATVNPGQRVGLIGKNGTGKSSLFALIKGKITQDGGDVSIPKNWRLASVSQETPDLDISALDYVLQGDAELQAFQTALRQAEAQNDGMKQAEYHAKLEEIDAYTAPARAAKLLNGLGFSQEEHSRPVKSFSGGWRMRLNLAQALICRADLLLLDEPTNHLDLETVLWLENHLASLPCTQIIISHDRDFLNAATTQTIELSQQKLTQYGGNYDFYQNERAQRLAQQQAAYVKQQAQIKHLQSFIDRFKAKATKAVQAQSRMKALAKLERVAPAHLDSEFSFEFYHPDHLPNPLLKLEHADLGYEGKTVLHDITLSLESGARYGLLGVNGSGKSTFIKALAGKIDLLSGSIVRSEKLNIGYFAQHQLDTIRADQNPVWHIQQLSPKVREQEIRNFLGGFNFVGDMALQKTEPFSGGEKARLALAMIIWQKPNLLLLDEPTNHLDLDMRHALTLALQSFQGALIIVSHDRSLLEATTDSFLLIDKGRLKNFDGDLNDYRQWRLAQENAAAAPAASAQSQSRKDTKRIEAQIRQEKARRDKPIQQKIDRAEKEMAQLSEIQTACEAFLAQEDAYLEANKEKLQNTLSQLAKVKTQLAQIEEVWLACQEELERIETEIEKQFAER

SEQ ID NO: 28286 - protein, 238 aa, Neisseria meningitidis; identical to SEQ ID NO: 3469

SEQ ID NO: 28287 - protein, 305 aa, Neisseria meningitidis; identical to SEQ ID NO: 6805

SEQ ID NO: 28288 - protein, 256 aa, Neisseria meningitidis; identical to SEQ ID NO: 15220

SEQ ID NO: 28289 - protein, 247 aa, Neisseria meningitidis
MLSARYLHLHEALGLGPMWLKRGAVVLPSATLPESPTQIRPQKQTVLSIPQRPSEQHTGQARLKTMKVLETTAVHTRKPAPETETPLSGVSDGIAPVPAASGITKLAVVSLCPPTEDMVYGQLFHGKAGVLLDNILKAVGLDAAYVHKTCWVKTAAVGNPMPSEAAIANALEQTARELDGCRAPAVLFLGQAFVKPERQAMIETLCAGRPFFIIDHPARLLRQPELKARAWQTLKQLKRVLAQGGGS

SEQ ID NO: 28290 - protein, 237 aa, Neisseria meningitidis; identical to SEQ ID NO: 6270

SEQ ID NO: 28291 - protein, 168 aa, Neisseria meningitidis
MPLLDSFKVDHTRMHAPAVRVAKTMATPKGDTITVFDLRFCVPNKEILPEKGIHTLEHLFAGFMRDHLNGNGVEIIDISPMGCRTGFYMSLIGTPSEQQVADAWLASMQDVGNVKDQSKIPELNEYQCGTYQMHSLAEAQQIAQNVLARKVAVNKNEELTLDEGLLNA

SEQ ID NO: 28292 - protein, 371 aa, Neisseria meningitidis; identical to SEQ ID NO: 14955

SEQ ID NO: 28293 - protein, 192 aa, Neisseria meningitidis; identical to SEQ ID NO: 258

SEQ ID NO: 28294 - protein, 94 aa, Neisseria meningitidis; identical to SEQ ID NO: 944

SEQ ID NO: 28295 - protein, 76 aa, Neisseria meningitidis; identical to SEQ ID NO: 3081

SEQ ID NO: 28296 - protein, 105 aa, Neisseria meningitidis; identical to SEQ ID NO: 895

SEQ ID NO: 28297 - protein, 251 aa, Neisseria meningitidis; identical to SEQ ID NO: 15704

SEQ ID NO: 28298 - protein, 101 aa, Neisseria meningitidis; identical to SEQ ID NO: 6309

SEQ ID NO: 28299 - protein, 253 aa, Neisseria meningitidis; identical to SEQ ID NO: 5498

SEQ ID NO: 28300 - protein, 111 aa, Neisseria meningitidis; identical to SEQ ID NO: 233

SEQ ID NO: 28301 - protein, 786 aa, Neisseria meningitidis
MKPLQMLPIAALVGSIFGNPVLAADEAATETTPVKAEIKAVRVKGQRNAPAAVERVNLNRIKQEMIRDNKDLVRYSTDVGLSDSGRHQKGFAVRGVEGNRVGVSIDGVNLPDSEENSLYARYGNFNSSRLSIDPELVRNIEIVKGADSFNTGSGALGGGVNYQTLQGRDLLLDDRQFGVMMKNGYSTRNREWTNTLGFGVSNDRVDAALLYSQRRGHETESAGNRGYAVEGEGSGANIRGSARGIPDSSKHKYHSFLGKIAYQINDNHRIGASLNGQQGHNYTVEESYNLTASSREADDVNRRRNANLFYEWMPDSNWLSSLKADFDYQKTKVAAVNNKGSFPMDYSTWTRNYNQKDLDEIYNRSMDTRFKRFTLRLDSHPLQLGGGRHRLSFKTFVSRRDFENLNRDDYYFSGRVVRTTSSIQHPVKTTNYGFSLSDQIQWNDVFSSRAGIRYDHTKMTPQELNAECHACDKTPPAANTYKGWSGFVGLAAQLNQAWRVGYDITSGYRVPNASEVYFTYNHGSGNWLPNPNLKAERSTTHTLSLQGRSEKGTLDANLYQSNYRNFLSEEQKLTTSGDVSCTQMNYYYGMCSNPYSEKLDWQMKNIDKARIRGIELTGRLNVDKVASFVPEGWKLFGSLGYAKSKLSGDNSLLSTQPLKVIAGIDYESPSEKWGVFSRLTYLGAKKVKDAQYTEYEGYRFIKKVKDYPWLNKSAYVFDMYGFYKPVKNLTLRAGVYNLFNRKYTTWDSLRGLYSYSTTNAVDRDGKGLDRYRAPGRNYAVSLEWKF

SEQ ID NO: 28302 - protein, 540 aa, Neisseria meningitidis; identical to SEQ ID NO: 7154

SEQ ID NO: 28303 - protein, 324 aa, Neisseria meningitidis
MPSEKNIGFMAGSSRPLWVAFALLLVSCVLFMTLNVKGDWDFVLHLRLTKLAALLMVAYAVGVSTQLFQTLTNNPILTPSILGFDSLYVFLQTLLVFTFGGVGYASLPLTGKFGFELVVMMGGSLLLFYTLIKQGGRDLPRMILIGVIFGILFRSLSSLLSRMIDPEEFTAAQANMFAGFNTVHSELLGIGALILLVSAAVVWRERYRLDVHLLGRDQAVNLGINYTRNTLWILLWIAALVATATAVVGPVSFFGLLAASLANHFSPSVKHSVRLPMTVCVGGILLVGGQTVFEHFLGMKAVLSVVVEFAGGLVFLYLVLKHKK

SEQ ID NO: 28304 - protein, 1975 aa, Neisseria meningitidis
MNKGLHRIIFSKKHSTMVAVAETANSQGKGKQAGSSVSVSLKTSGDLCGKLKTTLKTLVCSLVSLSMVLPAHAQITTDKSAPKNQQVVILKTNTGAPLVNIQTPNGRGLSHNRYTQFDVDNKGAVLNNDRNNNPFLVKGSAQLILNEVRGTASKLNGIVTVGGQKADVIIANPNGITVNGGGFKNVGRGILTTGTPQIGKDGALTGFDVRQGTLTVGTSGWNDKGGADYTEVLARAVALQGKLQGKNLAVSTGAQKVDYASGEISAGTAAGTKPTVALDTAALGGMYADSITLIANEKGVGVKNAGTLEAAKQLIVTSSGRIENSGRIATTADGTEASPTYLSIETTEKGAAGTFISNGGRIESKGLLVIETGEDISLRNGAVVQNNGSRPATTVLNAGHNLVIESKTNVNNAKGPATLSADGRTVIKEASIQTGTTVYSSSKGNAELGNNTRITGADVTVLSNGTISSSAVIDAKDTAHIEAGKPLSLEASTVTSDIRLNGGSIKGGKQLALLADDNITAKTTNLNTPGNLYVHTGKDLNLNVDKDLSAASIHLKSDNAAHITGTSKTLTASKDMGVEAGSLNVTNTNLRTNSGNLHIQAAKGNIQLRNTKLNAAKALETTALQGNIVSDGLHAVSADGHVSLLANGNADFTGHNTLTAKADVNAGSVGKGRLKADNTNITSSSGDITLVAGNGIQLGDGKQRNSINGKHISIKNNGGNADLKNLNVHAKSGALNIHSDRALSIENTKLESTHNTHLNAQHERVTLNQVDAYAHRHLSITGSQIWQNDKLPSANKLVANGVLALNARYSQIADNTTLRAGAINLTAGTALVKRGNINWSTVSTKTLEDNAELKPLAGRLNIEAGSGTLTIEPANRISAHTDLSIKTGGKLLLSAKGGNAGAPSAQVSSLEAKGNIRLVTGETDLRGSKITAGKNLVVATTKGKLNIEAVNNSFSNYFPTQKAAELNQKSKELEQQIAQLKKSSPKSKLIPTLQEERDRLAFYIQAINKEVKGKKPKGKEYLQAKLSAQNIDLISAQGIEISGSDITASKKLNLHAAGVLPKAADSEAAAILIDGITDQYEIGKPTYKSHYDKAALNKPSRLTGRTGVSIHAAAALDDARIIIGASEIKAPSGSIDIKAHSDIVLEAGQNDAYTFLKTKGKSGKIIRKTKFTSTRDHLIMPAPVELTANGITLQAGGNIEANTTRFNAPAGKVTLVAGEELQLLAEEGIHKHELDVQKSRRFIGIKVGKSNYSKNELNETKLPVRVVAQTAATRSGWDTVLEGTEFKTTLAGADIQAGVGEKARVDAKIILKGIVNRIQSEEKLETNSTVWQKQAGRGSTIETLKLPSFESPTPPKLSAPGGYIVDIPKGNLKTEIEKLAKQPEYAYLKQLQTAKNVDWKQVQLAYDKWDYKQEGLTGAGAAIVVIIVTALTYGYGAAAAGSVTAAGSSTAAAATTTAAATTTVSTAAAMQTAALASLYSQAAVAIINNKGDVGKALKDLGTSDTVKQIVTSALTAGALNQMGADIAQLNSKVRTELFSSTGNQTIANLGGRLATNLSNAGISAGINTAVNGGSLKDNLGNAALGALVNSFQGEAASKIKTTFSDDYVAKQFAHALAGCVSGLVQGKCKDGAIGAAVGEIVAESILGGRNPATLSDAEKHKVISYSKIIAGSVAALNGGDVNTAANAAEVAVVNNALNFDSTPTNAKKHQPQKPDKTALEKIIQSIMPAHAAGAMTNPQDKDAAIWISNIRNGITGPIVITSYGVYAAGWTAPLIGTAGKLAISTCMANPSGCTVMVTQAAEAGAGIATGAVTVGNAWEAPVGALSKAKAAKQAIPTQTVKELDGLLQESKNIGAVNTRINIANSTTRYTPMRQTGQPVSAGFEHVLEGHFHRPIANNRSVFTISPNELKVILQSNKVVSSPVSMTPDGQYMRTVDVGKVIGTTSIKEGGQPTTTIKVFTDKSGNLITTYPVKGN

SEQ ID NO: 28305 - protein, 74 aa, Neisseria meningitidis
MMKNKYILTKAAIGITAISIFYLLNQESSGKTEEPSYFLMFMFLNLLWFEENKTVMAAVTAIIAAHFIFVALSD

SEQ ID NO: 28306 - protein, 335 aa, Neisseria meningitidis; identical to SEQ ID NO: 14485

SEQ ID NO: 28307 - protein, 127 aa, Neisseria meningitidis
LVEGQKSAVTEYYLNHGEWPANNSSAGVASVSTDIKGKYVQSVTVANGVITAQMASSGVNKEIQGKKLSLWAKRQDGSVKWFCGQPVTRTAPTTTNDDVKADTAANGKQIDTKHLPSTASTRKSTPN

SEQ ID NO: 28308 - protein, 324 aa, Neisseria meningitidis; identical to SEQ ID NO: 4840

SEQ ID NO: 28309 - protein, 248 aa, Neisseria meningitidis; identical to SEQ ID NO: 4029

SEQ ID NO: 28310 - protein, 154 aa, Neisseria meningitidis; identical to SEQ ID NO: 15736

SEQ ID NO: 28311 - protein, 229 aa, Neisseria meningitidis
MKRKNIALIPAAGIGARFGADKPKQYVEIGSKTVLEHTIGIFERHEGVDLTVVVVSPEDTFADKVQTAFPQVRVWKNGGQTRAETVRNGVAKLLEIGLASADDNILVHDAARCCLPSEALTRLIEQAGNAAEGGILAIPVADTLKRADGGNISATVERTSLWQAQTPQLFRAGLLHRALAAENLDGITDEASAVEKLGIRPLLVQGDARNLKLTQPQDAYIVRLLLDAV

SEQ ID NO: 28312 - protein, 433 aa, Neisseria meningitidis
MPSEHQHTSSLLDFDRTHLLHPYTSMTDPLPVYPVKRAEGVFIELADGTRLIDGMSSWWCAIHGYNHPVLNQAVETQMKQMSHVMFGGLTHEPAVELGKLLVGILPQGLDRIFYADSGSVSVEVALKMAVQYQQARGLRAKQNMATVRRGYHGDTWNAMSVCDPETGMHHIFGSALPQRYFVDNLTSRFDDEWDEADLQPVRALFEAHHTDIAAFILEPVVQGAGGMYFYHPQYLRGLRDLCDEFDIVLIFDEIATGFGRTGKMFACEHAEVVPDIMCIGKGLSGGYMTLAAAITSQKVTETISRGEAGVFMHGPTFMANPLACAVACASVKLLLSQDWQANIRRIESILKCRLKTAWDIRGVKDVRVLGAIGVIELEKGVDMARFQADCVAQGIWVRPFGRLVYLMPPYIISDGVLTKLADKTVQILKEHSK

SEQ ID NO: 28313 - protein, 210 aa, Neisseria meningitidis; identical to SEQ ID NO: 23073

SEQ ID NO: 28314 - protein, 118 aa, Neisseria meningitidis
MNEHNLLIFCLKDNVSISEYTEMIDWAYKNIQSETVVEITENQIIEYQNRGLWRLVSEITDNWLFGPSEGDWLIDKESILAVKEKLQNSDFSTEPLVKNIIHVLEYAIKNEKTIIFHF

SEQ ID NO: 28315 - protein, 255 aa, Neisseria meningitidis; identical to SEQ ID NO: 7390

SEQ ID NO: 28316 - protein, 273 aa, Neisseria meningitidis
MMKGMDKLRYQQDFLNIRPIFTAGEQEYLTELSDRLPLSVLTDSVRNIEEIGIDFVYSSAKLEGNTYNQYDTQALLKLGQTAGGKLYSDAVMLINLRESYRHLLSGLDSPEPFDWLDFLKTTHSLISENLLEKGSGGVVRRDSVTISGTDYTPLSNPQSLDTELKWLLQEAPKIENPFDRAVYLHNNLAYLQYFKDCNKRTARNCMTLSLMRSGFFPCVFSPDSYPAYAEAVVAYYETGDYGLFKKYFISAYENTVNKYGPQPDMDIFRNFSL

SEQ ID NO: 28317 - protein, 164 aa, Neisseria meningitidis; identical to SEQ ID NO: 3532

SEQ ID NO: 28318 - protein, 140 aa, Neisseria meningitidis; identical to SEQ ID NO: 14735

SEQ ID NO: 28319 - protein, 188 aa, Neisseria meningitidis; identical to SEQ ID NO: 7225

SEQ ID NO: 28320 - protein, 141 aa, Neisseria meningitidis; identical to SEQ ID NO: 3635

SEQ ID NO: 28321 - protein, 163 aa, Neisseria meningitidis; identical to SEQ ID NO: 2563

SEQ ID NO: 28322 - protein, 201 aa, Neisseria meningitidis; identical to SEQ ID NO: 15193

SEQ ID NO: 28323 - protein, 82 aa, Neisseria meningitidis; identical to SEQ ID NO: 5371

SEQ ID NO: 28324 - protein, 249 aa, Neisseria meningitidis
MLIQAVTIFPEMFDSITRYGVTGRANRQGIWQFEAVNPRKFADNRLGYIDDRPFGGGPGMIMMAPPLHAAIEHAKAQSSQAAKVIYLSPQGKPLTHQKAVELAELPHLILLCGRYEGIDERLLQSSVDEEISIGDFVVSGGELPAMMLMDAVLRLVPGVLGDMQSAEQDSFSSGILDCPHYTKPLEFQGMAVPEVLRSGNHGLIAEWRLEQSLRRTLERRPDLLEKRVLIPKESRLLETIRQEQREIQS

SEQ ID NO: 28325 - protein, 354 aa, Neisseria meningitidis; identical to SEQ ID NO: 14207

SEQ ID NO: 28326 - protein, 376 aa, Neisseria meningitidis
MIKISTRFDAGSVVVKDLTDPSNIRLALRPDNASDFAQWFYFRLQGAAYQNCIMHFENAAEAAYPKGWEGYQACASYDRRNWFRVPTSYENGVLTVNHTPLSNSVYYAYFEPYSEEQHLNLLGDAQGSGLCRIDDLGSTVQGRDINLLTIGNQVESDLKIWITARQHPGETMAEWFVEGLLGRLLDPQDPTARTLLDRATFYIVPNMNPDGSALGNLRTNAAGANLNREWENPTLEKSPEVFFVRERMLETGVDLFLDIHGDEGLPFIFVAGTEGVPNYNPRISALETQFKTALLNASPDFQDEYGYEKDAPGQANMTLATNWVGNRFNCLAYTLEMPFKDNANLPDDDFGWNGQRSLRLGEAALSAILNIIGDLR

SEQ ID NO: 28327 - protein, 485 aa, Neisseria meningitidis; identical to SEQ ID NO: 22659

SEQ ID NO: 28328 - protein, 187 aa, Neisseria meningitidis
MKILALLIAATCALSACGSQSEEQPVSAQPQEQAQSELKTMPVSYTDYQSAANKGLNDQKTGLTLPEHVVPIDNAEGKNLLHDFSDGLTILTVDTDKADKITAVRVVWNTDAMPQKAEKLSKAAAALIAATAPEDRTMLRDTGDQIEMAIDSHNAQKEPTREWARGGIAYKVTVTNLPSVVLTAKAE

SEQ ID NO: 28329 - protein, 70 aa, Neisseria meningitidis; identical to SEQ ID NO: 15062

SEQ ID NO: 28330 - protein, 42 aa, Neisseria meningitidis; identical to SEQ ID NO: 6215

SEQ ID NO: 28331 - protein, 96 aa, Neisseria meningitidis; identical to SEQ ID NO: 3537

SEQ ID NO: 28332 - protein, 346 aa, Neisseria meningitidis; identical to SEQ ID NO: 15725

SEQ ID NO: 28333 - protein, 61 aa, Neisseria meningitidis; identical to SEQ ID NO: 6755

SEQ ID NO: 28334 - protein, 156 aa, Neisseria meningitidis; identical to SEQ ID NO: 22786

SEQ ID NO: 28335 - protein, 601 aa, Neisseria meningitidis
MRYKPLLLALMLVFSTPAVAAHDAAHNRSAEVKKQTKNKKEQPEAAEGKKEKGKNGAVKDKKTGGKEAAKEGKESKKTAKNRKEAEKEATSRQSARKGREGDKKSKAEHKKAHGKPVSGSKEKNAKTQPENKQGKKEAKGQGNPRKGGKAEKDTVSANKKVRSDKNGKAVKQDKKYREEKNAKTDSDELKAAVAAATNDVENKKALLKQSEGMLLHVSNSLKQLQEERIRQERIRQERIRQARGNLASVNRKQREAWDKFQKLNTELNRLKTEVAATKAQISRFVSGNYKNSQPNAVALFLKNAEPGQKNRFLRYTRYVNASNREVVKDLEKQQKALAVQEQKINNELARLKKIQANVQSLLKKQGVTDAAEQTESRRQNAKIAKDARKLLEQKGNEQQLNKLLSNLEKKKAEHRIQDAEAKRKLAEARLAAAEKARKEAAQQKAEARRAEMSNLTAEDRNIQAPSVMGIGSADGFSRMQGRLKKPVDGVPTGLFGQNRSGGDVWKGVFYSTAPATVESIASGTVSYADELDGYGKVVVVDHGENYISIYAGLSEISVGKGYMVAAGSKIGSSGSLPDGEEGLYLQIRYQGQVLNPSSWIR

SEQ ID NO: 28336 - protein, 312 aa, Neisseria meningitidis
MRRKMLNVPKGSYDGMKGFTIIEFLVAGMLSMIVLMAVGSSYFTSRKLNDAANERLAAQQDLRNAATLIVRDARMAGGFGCFNMSEHSATDVIPDTTQQNSPFSLKRNGIDKLIPIAESSNIGYPDFTQRLNALIFQYGIDDVNASADTTVVSSCAKIAKPGKKISTLQEAKSALQITNDDKQNGNITRQRHVVNAYAVGRIAGEEGLFRFQLNDNGQWGNPQLLVKKINKMDIRYIYVSNCPEDDDAGKEETFKYTDKFNSAQNAVTPAGVEVLLSSGTDTKIAASSDNHIYAYRIDATIRGGNVCANRTL

SEQ ID NO: 28337 - protein, 962 aa, Neisseria meningitidis
MSNTTVEQFAAELKRPVEDLLKQLKEAGVSKNSGGDSLTLDDKQLLNAYLTKKNGSNGGTISIRRTKTEVSTVDGVKVETRKRGRTVNIPSAEELAAQVKAAQTQAAPVRPEQTAEDAAKARAEAAARAEARAKAEAEAAKLKAAKAGNKAKPAAQKPTEAKAETAPVAAETKPAEESKAEKAQADKMPSKKPAEPKEKAAKPKHERNGKGKDAKKPAKPAAPAVPQPVVSAEEQAQRDEEARRAAALRAHQEALLKEKQERQARREAMKQQAEQQAKAAQEAKTGRQRPAKPAEKPQAAAPAVENKPVNPAKAKKEDRRNRDDEGQGRNAKGKGGKGGRDRNNARNGDDERVRGGKKGKKLKLEPNQHAFQAPTEPVVHEVLVPETITVADLAHKMAVKGVEVVKALMKMGMMVTINQSIDQDTALIVVEELGHIGKPAAADDPEAFLDEGAEAVEAEALPRPPVVTVMGHVDHGKTSLLDYIRRTKVVQGEAGGITQHIGAYHVETPRGVITFLDTPGHEAFTAMRARGAKATDIVILVVAADDGVMPQTIEAIAHAKAAGVPIVVAVNKIDKDTANPERIRQELTQHEVIPDDWGGTVQFIDVSAKKGTNIDALLEAVLLEAEVLELTAPVDAPAKGIIVEARLDKGRGAVATLLVQSGTLKKGDMLLAGTAFGKIRAMVDENGKAINEAGPSIPVEILGLSDVPNAGEDAMVLADEKKAREIALFRQGKYRDVRLAKQQAAKLENMFNNMGETQAQSLSVIIKADVQGSYEALAGSLKKLSTDEVKVNVLHSGVGGITESDVNLAIASGAFIIGFNVRADASSRKLAENENVEIRYYNIIYDAIDDVKAAMSGMLSPEEKEQVTGTVEIRQVISVSKVGNIAGCMVTDGVVKRDSHVRLIRNNVVIHTGELASLKRYKDDVKEVRMGFECGLMLKGYNEIMEGDQLECFDIVEVARSL

SEQ ID NO: 28338 - protein, 258 aa, Neisseria meningitidis; identical to SEQ ID NO: 3585

SEQ ID NO: 28339 - protein, 712 aa, Neisseria meningitidis
MANGNMKLSLVLTARDDGARRLLADTQRQLDRTAKSRAQLERQSHTYALTGIRSEKQIQREIMLTQAAFNRLARSGKASQNDLARAAVATRNRIRELNAELKQGTGFADKMGKIGRFGAAAVAGGAAAYTVLKPAMDNRKQLDENINRVSRQAFIEDNSKSAAWIATEGAQQIKDLALELVEKNGGTHDKALDLISGMMTTSLNFAQTKNEAQAAYAFALASEGSGEDTAKLIKTLKDGGMSGKDLQLGLEHVLQSGLDGTFEVRDMVRELPSLLPAAQQAGMNGVGGLDYLLSLLQSAANKSGSPAEAATNVQNLLSKTLSPDTIGRLKKMANPNDPKKGVDWIGSVVQGKQNGENAVQVLSRLADAMLVKDKQYQDYKKRAAAGDKTAAEQANMLKGALLAQLLPDLQAKQGLLAATDMTQIREYMASLAGVTLDNGKIAKNNEARMLSAAAQQEQQESLAMLRESLTGTLVDMETSFKKLAAEYPNATLALQALTTAATAASAAMLLTAGGGKGAGFLKDVGSKALGWGKASAGGVAAGATAAGGKLLSWGKSAGSGLMNNPALVKRAGLLGMLLYSESLGDGTLTKGLRGTKTTPEMINRLKNNGIRFEPAPKREQARGGVPQYLAAPSAQPTDKMLSPLFSTQTAAYQAALAQDTAAVTTGLAQVQSAMASASQTINTNVSLNIDGRVIANEVSRYQVAMFGRGAGQ

SEQ ID NO: 28340 - protein, 553 aa, Neisseria meningitidis
MTDNSPPPNGHAQARVRKNNTLLSAVWLVPLIALIAGGWLWIKEIRNRGPVVTLLMDSAEGIEVNNTVIKVLSIDVGRVTRIKLRDDQKGVEVTAQLNADVSGLIRSDTQFWVVKPRIDQSGVTGLGTLLSGSYIAFTPGKSDEAKDVFQVQDIPPVTAIGQSGLRLNLIGKNDRILNVNSPVLYENFMVGQIESAHFDPSDQSVHYTIFIQSPNDKLIHSASRFWLESGINIETTGSGIKLNSAPLPALLSGAISFDSPKTKNSKNVKSEDSFTLYDSRSEVANLPDDRSLYYTAFFKQSVRGLTVGSPVEYKGLNVGVVSDVPYFDRNDSLHLFENGWIPVRIRIEPSRLEINADEQSKEHWKQQFQTALNKGLTATISSNNLLTGSKMIELNDQPSASPKLRPHTVYAGDTVIATQGGGLDDLQVKLADLLDKFDKLPLDKTVAELNGSLAELKSTLKSANAALSSIDKLVGKPQTQNIPNELNQTLKELRQTLQGVSPQSPIYGDVQNTLQSLDKTLKDVQPVINTLKEKPNALIFNSSSKDPIPKGSR

SEQ ID NO: 28341 - protein, 256 aa, Neisseria meningitidis
MKITTWNVNSLNVRLPQVQNLLADNPPDILVLQELKLDQDKFPAAALQMMGWHCVWSGQKTYNGVAIVSRSVPEDVHFGLPSLPDDPQRRVIAATVGGVRVINVYCVNGEAIDSPKFKYKEQWFAALTEFVRDEMARHGKLVLLGDFNIAPADADCYDPEKWHEKIHCSSVERQWFKNLLDLGLTDSLRQVHPEGAFYTWFDYRGAMFQRKLGLRIDHILVSPAMAAALKDVRVDLETRALERPSDHAPVTAEFDW

SEQ ID NO: 28342 - protein, 59 aa, Neisseria meningitidis; identical to SEQ ID NO: 642

SEQ ID NO: 28343 - protein, 473 aa, Neisseria meningitidis
MDTKEILGYAAGSIGSAVLAVIILPLLSWYFPADDIGRIVLMQTAAGLTVSVLCLGLDQAYVREYYAAADKDTLFKTLFLPPLLSAAAIAALLLSRPSLPSEILFSLDDAAAGIGLVLFELSFLPIRFLLLVLRMEGRALAFSSAQLVSKLAILLLLPLTVGLLHFPANTAVLTAVYALANLAAAAFLLFQNRCRLKAVRHAPFSPAVLHRGLRYGIPIALSSIAYWGLASADRLFLKKYAGLEQLGVYSMGISFGGAALLFQSIFSTVWTPYIFRAIEENAPPARLSATAESAAALLASALCLTGIFSPLASLLLPENYAAVRFIVVSCMLPPLFCTLVEISGIGLNVVRKTRPIALATLGALAANLLLLGLAVPSGGARGAAVACAASFWLFFAFKTESSCRLWQPLKRLPLYLHTLFCLTSSAAYTCFGTPANYPLFAGVWAAYLAGCILRHRKDLHKLFHYLKKQGFPL

SEQ ID NO: 28344 - protein, 146 aa, Neisseria meningitidis
VNIRRTVYADCAALAALDAVCNPSAWTQRQFESALVSPSEQVFLAEKDGRIAAFIVWQNLPDESELHLIATAPECRRRGIASALLEYWYAHLLEDTQRLLLEVRAGNTAAQALYAAHGFSIAGRRKNYYRTADGKTEDAVLMEKIC

SEQ ID NO: 28345 - protein, 633 aa, Neisseria meningitidis
MTTPKKTAKTSGNEARELADLSEDIGIRFKYPNSERVYLQGSRGDIRVPLREIRQDDTYTAQGTEANPPIPVYDTSGVYGDPAAHIDLKQGLPHIRTAWLNERGDTEILPKLSSEYGIERAHDPKTAHLRFNQITRPRRAKSGGNVTQLHYARRGIITPEMEFVAIRERLKLDELSQKPEYAKLLKQHAGQSFGANIPTHPDQITPEFVRREIAAGRAIIPANINHPELEPMIIGRNFRVKINGNLGNSAVTSSLTEEVEKMVWSLRWGADTIMDLSTGAHIHETREWIIRNAPVPIGTVPIYQALEKTGGIAEDLTWDLFRDTLIEQAEQGVDYFTIHAGVLLRYVPMTANRLTGIVSRGGSIMAKWCLAHHRENFLYTHFDEICEIMKAYDVSFSLGDGLRPGCIADANDESQFAELHTLGELTDKAWKHDVQVMIEGPGHVPLQRVKENMTEELQHCFEAPFYTLGPLVTDIAPGYDHITSGIGAANIGWYGTAMLCYVTPKEHLGLPDKEDVRTGIITYKLAAHAADLAKGWPGAQLRDNALSKARFEFRWRDQFRLSLDPERAESFHDETLPAEGAKIAHFCSMCGPKFCSMKITQEVRDYADKQKAQRQGMEEKAVEFVKKGAKIYS

SEQ ID NO: 28346 - protein, 64 aa, Neisseria meningitidis; identical to SEQ ID NO: 6143

SEQ ID NO: 28347 - protein, 604 aa, Neisseria meningitidis; identical to SEQ ID NO: 14747

SEQ ID NO: 28348 - protein, 265 aa, Neisseria meningitidis
MNPAPKKPSLLFSSLLFSSLLFSSAAQAASEDSSRSPYYVQADLAYAAERITHNYPEPTGADKDKISTVSDYFRNIRAHSIHPRVSVGYDFGDWRIAADYASYRKWKESNSSTNAENRDNAKNYVKIETKHQGNGSFHAASSLGLSAIYDFKLNDKFKPYIGARVAYGHVKHQVHSVETKTTTVTSKPTATSPQGGPIIQTDPSKPPYHESHSISSLGLGVIAGVGFDITPKLTLDTGYRYHNWGRLENTRFKTHEVSLGMRYHF

SEQ ID NO: 28349 - protein, 521 aa, Neisseria meningitidis; identical to SEQ ID NO: 6486

SEQ ID NO: 28350 - protein, 65 aa, Neisseria meningitidis; identical to SEQ ID NO: 7172

SEQ ID NO: 28351 - protein, 500 aa, Neisseria meningitidis; identical to SEQ ID NO: 11856

SEQ ID NO: 28352 - protein, 78 aa, Neisseria meningitidis; identical to SEQ ID NO: 1622

SEQ ID NO: 28353 - protein, 233 aa, Neisseria meningitidis; identical to SEQ ID NO: 3223

SEQ ID NO: 28354 - protein, 56 aa, Neisseria meningitidis; identical to SEQ ID NO: 326

SEQ ID NO: 28355 - protein, 283 aa, Neisseria meningitidis
MITHPQFDPVLISIGPLAVRWYALSYILGFILFTFLGRRRIAQGLSVFTKESLDDFLTWGILGVIFGGRLGYVLFYKFSDYLAHPLDIFKVWEGGMSFHGGFLGVVIAIWLFGRKHGIGFLKLMDTVAPLVPLGLASGRIGNFINGELWGRVTDINAFWAMGFPQARYEDAEAAAHNPLWAEWLQQYGMLPRHPSQLYQFALEGICLFAVVWLFSKKQRPTGQVASLFLGGYGIFRFIAEFARQPDDYLGLLTLGLSMGQWLSVPMIVLGIVGFVRFGMKKQH

SEQ ID NO: 28356 - protein, 157 aa, Neisseria meningitidis; identical to SEQ ID NO: 14248

SEQ ID NO: 28357 - protein, 492 aa, Neisseria meningitidis
MFSKLTPLAETGIPTLSCANAAGRLLHSDSRQIKQGDIFVACPGEYADGRSYIPAAVANGAAFVFWDDDGKFAWNPEWKVPNQGIKDLKHRAGILAAQVYGNVSDGLKFWGVTGTNGKTSITQWLAQAADLLGEKTAIVGTVGNGFWGALEETTHTTPAPVDVQTLLYRFRQQGATVAAMEVSSHGLDQSRVNGVSFRSAIFTNLTRDHLDYHGTMEAYGAIKSRLFYWHGLKHAVINVDDEYGAELAGRLKKDCPDLAVYSYGFSEHADIRITDFTASSDGIEAVFRTPWGEGKCHTRLLGRFNAQNLAACVALLCANGYPLDKVLDVLEKIRPASGRMDCIMNSGKPLVVVDYAHTPDALEKALATLQEIKPQGAALWCVFGCGGNRDRGKRPLMGAAAVQGADKVVVTSDNPRLENPHDIINDILPAVPAPECVEADRAAAIRYAVEQAAANDIILIAGKGHENYQDVQGVKHRFSDLEIVGQALLTRK

SEQ ID NO: 28358 - protein, 361 aa, Neisseria meningitidis; identical to SEQ ID NO: 2308

SEQ ID NO: 28359 - protein, 55 aa, Neisseria meningitidis; identical to SEQ ID NO: 1257

SEQ ID NO: 28360 - protein, 67 aa, Neisseria meningitidis; identical to SEQ ID NO: 86

SEQ ID NO: 28361 - protein, 179 aa, Neisseria meningitidis; identical to SEQ ID NO: 22551

SEQ ID NO: 28362 - protein, 945 aa, Neisseria meningitidis; identical to SEQ ID NO: 15035

SEQ ID NO: 28363 - protein, 100 aa, Neisseria meningitidis; identical to SEQ ID NO: 1675

SEQ ID NO: 28364 - protein, 46 aa, Neisseria meningitidis; identical to SEQ ID NO: 14880

SEQ ID NO: 28365 - protein, 290 aa, Neisseria meningitidis; identical to SEQ ID NO: 14702

SEQ ID NO: 28366 - protein, 123 aa, Neisseria meningitidis; identical to SEQ ID NO: 15587

SEQ ID NO: 28367 - protein, 403 aa, Neisseria meningitidis; identical to SEQ ID NO: 200

SEQ ID NO: 28368 - protein, 311 aa, Neisseria meningitidis; identical to SEQ ID NO: 11960

SEQ ID NO: 28369 - protein, 160 aa, Neisseria meningitidis; identical to SEQ ID NO: 1762

SEQ ID NO: 28370 - protein, 336 aa, Neisseria meningitidis
MSIKILIISPSWIGDCVMTQPLFRRLKELHPGCTIDVFAPKWSMEVFERMPEVNEILENPFGHGALELKRRWRVGRDLGRRGYDQVIVLPGSLKSAIIALATGIGKRTGYVGESRYFLLNDIRRLDKERLPLMVDRYTALAHPSQEDFDGHSGFPEFSIDERRREISVETFGLNLGKPVLAFCPGAEFGPAKRWPTKHFAELGKHYSAAGWQVWLFGSQKDDEIAEEINRLSDGMCVNLCGKTDLSQAMDLLSLADTVVCNDSGLMHLAAALGRKVVAVYGSSSPTHTPPLSDRAKIVSLHLECSPCFKRECPLGHTDCLNRLYPEKIVQAVEEAV

SEQ ID NO: 28371 - protein, 147 aa, Neisseria meningitidis
MAIFYFSSKKIERNIISSNLNRKQVRAIFSSDVQEIYKSSYSRVPMDVFPELNIHCFYDDKNQLEAIEIFEPNKFFLEDISFNWLGKINDEIISYLYKSGINDFEIDDLGIRLLNIPVSTIINSIGKVECCYLDFSNRDTKFYVKQV

SEQ ID NO: 28372 - protein, 320 aa, Neisseria meningitidis
MKILLVRLSSMGDLIHTLPAIEDLARQCPDVELHWLCEAGFADIARLHPFVKKIHVMKWRQWRKHLFRAETWREMGHLKQTLRQEVFDFVLDSQGLIKSACFAKMAKSPICGLDKNSAREGWAALAYVKTYAVPKGKNAVWRNRELFAQVFGYVMPETQVFGLTVPEAGRLKNLAQPYYAALHATSRDSKLWPVENWRSLLQKLNEEQQCNIYLPWGNEDEKTRAKQIADGLPFAIVCDKINLLQAAYLLKYAVGIVGVDTGLLHLANALEKPVVGIYTDTDPIKTGVQVSPIAKNLGNIGQIPTADLVYQALMDCVAAD

SEQ ID NO: 28373 - protein, 148 aa, Neisseria meningitidis; identical to SEQ ID NO: 4053

SEQ ID NO: 28374 - protein, 418 aa, Neisseria meningitidis; identical to SEQ ID NO: 7682

SEQ ID NO: 28375 - protein, 225 aa, Neisseria meningitidis; identical to SEQ ID NO: 1206

SEQ ID NO: 28376 - protein, 144 aa, Neisseria meningitidis
MRRALIAKIKIAQKELGLDDGTYRAVLERVTGKRSCADMDVSELESVVADMRSHGFKPKAKGNPHGKPHLRRTLSAAMLDKVEALLTVGGKHWNYAHAMARRMFGKDKVEYLDDTQLHKLVAALQIAENRKTEKASGDDGVRKS

SEQ ID NO: 28377 - protein, 919 aa, Neisseria meningitidis
MKRMLFNATQAEELRVAIVDGQNLLDLDIETLGKEQRKGNIYKGIITRIEPSLEACFVDYGTDRHGFLPFKEVSRSYFQDYEGGRARIQDVLKEGMEVIVQVEKDERGNKGAALTTFISLAGRYLVLMPNNPRGGGVSRRIEGEERQELKAAMAELDIPNGMSIIARTAGIGRSAEELEWDLNYLKQLWQAIEEAGKAHHDPYLLFMESSLLIRAIRDYFRPDIGEILVDNQEVYDQVTEFMSYVMPGNIGRLKLYEDHTPLFSRFQIEHQIESAFSRSVSLPSGGAIVIDHTEALVSIDVNSARATRGADIEDTAFKTNMEAAEEVARQMRLRDLGGLVVIDFIDMENPKHQRDVENVLRDALKKDRARVQMGKLSRFGLLELSRQRLKPALGESSHVACPRCAGTGVIRGIESTALHVLRIIQEEAMKDNTGEVRAQVPVDVATFLLNEKRAELFAMEERLDVNVVLIPNIHLENPHYEINRIRTDDVEEDGEPSYKRVAEPEEDESAKPFGGEKAKAARPEPAVKGVRHTSPAPTAAPEKKTSWWDSFKAWLKRIFGGSETQAAPAAETSEKRSTANRSGSRANNRRQNPRRSKREGSKVEVREVAGKTAGQEARADKAETRNNGNRRRNERGDRAAGRADEAEIQDRNIQPAATVADAAPSETEVQTGKRRRNGSRSERGQTAPETATVAETTVQTAENTPSEPHTAEDKGSKPKSERNRRERDSRDAKERRERNNQRDRRQNGKKRNIPSAAKIEQYLNIHDTADKVRSAAAHVFGETDANAPITVSIADPVAERDLPTASPAVSNGDAPVYDAAEKIRRATAAILPEGATPKAEAQEMPSETATFTAAAEQARETAQTGGLVLIETDPAALKAWAAQPEVQAGRGLRRSEQPKPSEVATVPAEEMIQVETRQG

SEQ ID NO: 28378 - protein, 301 aa, Neisseria meningitidis; identical to SEQ ID NO: 5026

SEQ ID NO: 28379 - protein, 333 aa, Neisseria meningitidis
MQFPYRNVPASRMRRMRRDDFSRRLMREHTLTADDLIYPVFVLEGSAREEDVPSMPGVKRQSLDRLLFTAEEAVKLGIPMLALFPVVTANKTERAEEAYNPEGLVPAAVRALRERFPELGIMTDVALDPYTVHGQDGLTDENGYVMNDETVEVLVKQALCHAEAGAQVVAPSDMMDGRIGAIREALEDAGHIHTRIMAYSAKYASAFYGPFRDAVGSSGNLGKADKKTYQMDPANTDEALHEVALDIQEGADMVMVKPGLPYLDVVRRVKDEFGVPTYAYQVSGEYAMLQAAVANGWLDGDKVVLESLLAFKRAGADGILTYYAIEAAKMLKR

SEQ ID NO: 28380 - protein, 256 aa, Neisseria meningitidis; identical to SEQ ID NO: 2322

SEQ ID NO: 28381 - protein, 259 aa, Neisseria meningitidis; identical to SEQ ID NO: 331

SEQ ID NO: 28382 - protein, 183 aa, Neisseria meningitidis; identical to SEQ ID NO: 24021

SEQ ID NO: 28383 - protein, 469 aa, Neisseria meningitidis; identical to SEQ ID NO: 14555

SEQ ID NO: 28384 - protein, 186 aa, Neisseria meningitidis; identical to SEQ ID NO: 11448

SEQ ID NO: 28385 - protein, 878 aa, Neisseria meningitidis
MTMQEQYQPAAIEPAAQKKWDDARIFNVSEDASKPKYYCLSMFPYPSGKLHMGHVRNYTIGDVLSRFKLLNGFNVMQPMGWDAFGMPAENAAMKNNVAPAAWTYDNIEYMKTQLKSLGFAIDWARETATCKPEYYRWEQWLFTKLFEKGIVYRKNGTVNWDPVDQTVLANEQVIDGRGWRSGALIEKREIPMYYFKITDYAEELLNDLDKLEHWPEQVKTMQRNWIGKSRGMTVRFAVSDDSKQGLEGDYANFLQVYTTRPDTLMGATYVAVAAEHPLATAAAAGKPELQAFIAECKAGSVAEADMATMEKKGVPTGRYVVNPLNGDKLEVWIANYVLWGYGDGAVMAVPAHDERDFEFATKYNLPKKQVIAVGDNAFDENQWQEWYGDKENGVLVNSGDLDGLDFQTAFDAVAAKLQSQGAGEPKTQYRLRDWGISRQRYWGCPIPIVHCEQCGDVPVPADQLPVVLPENVVPDGMGSPLAKMPEFYETACPCCGGAAKRETDTMDTFMESSWYFFRYMSPKFSDGMVDPAAAKYWGAVDQYIGGIEHAILHLLYARFFTKLMRDEGLVNVDEPFERLLTQGMVVCETYYRENDKGGKDWINPADVELTFDDKGRPISAVLKADGLPVVISGTEKMSKSKNNGVDPQELINAYGADTARLFMMFAAPPEQSLEWSDSGVEGAHRFLRRLWRTVYEYLKQGEAVKAFAGSQDGLSKELKDLRHKLHATTAKVSDDYGRRQQFNTAIAAVMELLNQYDKTDTGGEQGRAVAQEVLETAVRLLWPIVPHICETLWSELNGAKLWEAGWPTVDEAALVKSEIEVMVQVNGKLRGKITVAADASKADLEAAALATEGAVKFMEGKPAKKIIVVPGRLVNIVV

SEQ ID NO: 28386 - protein, 398 aa, Neisseria meningitidis
MPSEPFGRHNATNTLISITQDDTMTHIKPVIAALALIGLAACSGSKTEQPKLDYQSRSHRLIKLEVPPDLNNPDQGNLYRLPAGSGAVRASDLEKRRTPAVQQPADAEVLKSVKGVRLERDGSQRWLVVDGKSPAEIWPLLKAFWQENGFDIKSEEPAIGQMETEWAENRAKIPQDSLRRLFDKVGLGGIYSTGERDKFIVRIEQGKNGVSDIFFAHKSMKEVYGDKNKDTTMWQPSASDPNLEAAFLTRFMQYLGVDGQQAENALAKKPTLPAANEMARIEGKSLIVFGDYGRNWRRTALALDRIGLTVVGQNTERHAFLVQKAPNESNAITEQKPGLFKRLLGKGKAEKPAEQPELIVYAEPVANGSRIVLLNKDGSAYAGKDASALLGKLHSELR

SEQ ID NO: 28387 - protein, 69 aa, Neisseria meningitidis; identical to SEQ ID NO: 5143

SEQ ID NO: 28388 - protein, 472 aa, Neisseria meningitidis
MENILSVLVGTVNRFLWDYLLIYALLGIGLFFTLYLGAPQITKLGAGFKSVFGGLFAKGDKDDKSLSQFQALAVAISAQIGTGNVAGVATAITAGGPGAIFWMWVSAVLGMSTIFAEALLAQKYRVVSHGKYIGGPAFYITHGLTPKIGRGAARFLSGFFSIALIIALGFIGNATQANSIASAVTIAFDVPSLAVGIVLAVLAGMVVIGGVNRIANIAQFVVPFMAVVYILCAVVILFEFSDHIVPMFNHIFTAAFNPEAVLGGAAGIGMREAIRFGVARGLFSNEAGMGSTPHAHATADVKHPVQQGMAAFVGVFIDTILVCTATALIILLTDANLSGEQGAAVTQFAFNKAFPGFGSQLLAVCLTFFALTTIIGWYYFGESNIRFLFRGRHLGIYRALVLLAIVLGTLGKVDLVWSLSDMFNGFMVIPNLIALFLLRKEIRAIYDDYLAQKKAGRDLSYQYEFHEFHDKG

SEQ ID NO: 28389 - protein, 215 aa, Neisseria meningitidis; identical to SEQ ID NO: 22545

SEQ ID NO: 28390 - protein, 359 aa, Neisseria meningitidis
MKTLTVHTPSHSYPIFIGNGLLPQAGSLLKPHLGKRAAIIANETVAPLYLGTLQTALDAAGVSHFSIILPDGEAHKNWQTLNLIFDGLMQNRAERKTTLIALGGGVIGDMVGFAAATYQRGAPFVQIPTTLLSQVDSSVGGKTAINHPLGKNMIGAFYQPQAVLADLDTLHTLPVRELSAGMAEVIKYGALGDIGFFEWLEQNISGLMTLDREKLAQAVYRCCQMKADIVAQDETEQGIRAWLNLGHTFGHAIETEMGYGTWLHGEAIAAGCVLAARLSEQLGKISAADTARLAALLEAAGLPSAPPVFAFEKWLEHMSHDKKVSGGIMRFIGLNRLGEANITEITDTDILRRTLQPYL

SEQ ID NO: 28391 - protein, 273 aa, Neisseria meningitidis; identical to SEQ ID NO: 15853

SEQ ID NO: 28392 - protein, 223 aa, Neisseria meningitidis; identical to SEQ ID NO: 23386

SEQ ID NO: 28393 - protein, 289 aa, Neisseria meningitidis; identical to SEQ ID NO: 657

SEQ ID NO: 28394 - protein, 337 aa, Neisseria meningitidis; identical to SEQ ID NO: 1101

SEQ ID NO: 28395 - protein, 95 aa, Neisseria meningitidis; identical to SEQ ID NO: 13952

SEQ ID NO: 28396 - protein, 298 aa, Neisseria meningitidis
MESENIISAADKARILAEALPYIRRFSGSVAVIKYGGNAMTEPALKEGFARDVVLLKLVGIHPVIVHGGGPQINAMLEKVGKKGEFVQGMRVTDKEAMDIVEMVLGGHVNKEIVSMINTYGGHAVGVSGRDDHFIKAKKLLIDTPEQNGVDIGQVGTVESIDTGLVKGLIERGCIPVVAPVGVGEKGEAFNINADLVAGKLAEELNAEKLLMMTNIAGVMDKMGNLLTKLTPKRIDELIADGTLYGGMLPKIASAVEAAVNGVKATHIIDGRVPNALLLEIFTDAGIGSMILGGGEDA

SEQ ID NO: 28397 - protein, 355 aa, Neisseria meningitidis; identical to SEQ ID NO: 6188

SEQ ID NO: 28398 - protein, 125 aa, Neisseria meningitidis; identical to SEQ ID NO: 6097

SEQ ID NO: 28399 - protein, 348 aa, Neisseria meningitidis; identical to SEQ ID NO: 2437

SEQ ID NO: 28400 - protein, 162 aa, Neisseria meningitidis; identical to SEQ ID NO: 22303

SEQ ID NO: 28401 - protein, 553 aa, Neisseria meningitidis
MTESITRDSMQYDVVIVGAGPSGLSAAIKLKQLAEQNGREISVCVVEKGSEVGAHSLAGAVIDPIALNELISDWKEKGAPLTRTVTQDKVLFLTEKKAFNLPITPNFDNHGNYIVSLGEVVRWLAEQAENMGVEIYPGFAAAEVLYHEDGSVKGIATGNMGIGKDGEPTDSFQPGMELWAQQTLFAEGCRGSLSKQIIERFQLDQNSQPQTYGLGIKEVWEVPSEQHQPGLVVHSAGWPLDSKTYGGAFVYHFDDNKVAVGFVVGLDYQNPYLSPFEEFQRFKTHPEIRKTFEGGRRIAYGARSLIEGGLQSLPKLSFKGGVLIGDAAGFLNMPRIKGIHTAMKSAMLAAEAVFPLLENLEEVEGFDSGKEAADYQQRFEQSWLYQELYAARNVRPSFKWGVYLGSIYTGIDQMIFRGKAPWTLKHHGKDNEQLKKAAACKPIDYPKPDGVLTFDRLSSVFLANLAHEENQPDHLVLNNPQTMIDVNYKEYASPETRYCPAGVYEIVEENGNPRLQINAANCVHCKTCDIKDPTQNITWICPEGASGPNYGGM

SEQ ID NO: 28402 - protein, 180 aa, Neisseria meningitidis; identical to SEQ ID NO: 5949

SEQ ID NO: 28403 - protein, 642 aa, Neisseria meningitidis; identical to SEQ ID NO: 15324

SEQ ID NO: 28404 - protein, 143 aa, Neisseria meningitidis; identical to SEQ ID NO: 9142

SEQ ID NO: 28405 - protein, 107 aa, Neisseria meningitidis; identical to SEQ ID NO: 7198

SEQ ID NO: 28406 - protein, 268 aa, Neisseria meningitidis
MNMKKWIAAALACSALALSACGGQGKDAAAPAANPDKVYRVAANAEFAPFESLDSKGNVEGFDVDLMNAMAKAGNFKIEFKHQPWDSLFPALNNGDADVVMSGVTITDDRKQSMDFSDPYFEITQVVLVPKGKKISSSDDLKNMNKVGVVTGYTGDFSVSKLLGNDNPKIARFENVPLIIKELENGGLDSVVSDSAVIANYVKNNPAKGMDFVTLPDFTTEHYGIAVRKGDEATVKMLNDALEKVRESGEYDKIYAKYFAKEDEQAAK

SEQ ID NO: 28407 - protein, 513 aa, Neisseria meningitidis; identical to SEQ ID NO: 14609

SEQ ID NO: 28408 - protein, 138 aa, Neisseria meningitidis; identical to SEQ ID NO: 14452

SEQ ID NO: 28409 - protein, 153 aa, Neisseria meningitidis; identical to SEQ ID NO: 14040

SEQ ID NO: 28410 - protein, 403 aa, Neisseria meningitidis
LQTVRTTLTALRIFGIRQNASCENIVDWHERFPELEAQLGAPIEDYAPPKHWTRKQLRSMGRVSYLCVDAAEQALTDAGLLGDESITDGRMGVACGSSSGSTKDIGDVGELLLTGTSRNFSANTYVRMMPHTAAANIGIFFGLKGRIIPTSSACSSGSQGIGYAYEAIKYGLTDMMLAGGGEEFFPSEVYVFDSLYAASRRNGEPEKTPRPYDANRDGLVIGEGAGIFVLEELEHAKRRGAIIYAELVGYGANSDAYHISTPRPDAQGAILAFQTALQHANLAPEDIGWINLHGTGTHHNDSMESRAVAAVFGNNTPCTSTKPQTGHTLGAAGAIEAAFAWGIADRQSNPEGKLPPQLWDGQNDPNLPAINLTGSGSRWETEKRITASSSFAFGGSNCVLIIG

SEQ ID NO: 28411 - protein, 93 aa, Neisseria meningitidis; identical to SEQ ID NO: 13684

SEQ ID NO: 28412 - protein, 269 aa, Neisseria meningitidis; identical to SEQ ID NO: 15214

SEQ ID NO: 28413 - protein, 147 aa, Neisseria meningitidis; identical to SEQ ID NO: 1095

SEQ ID NO: 28414 - protein, 809 aa, Neisseria meningitidis
MRFSRFEPKGRLKQQIRFQTTFLSTSHHGNQTKAAHRHIHVGSTAGTTTIRSGGDTTLKGAQLIGKGIQADTRNLHIESVQDTETSQSKQQNGNVQVTVGYGFSASGSYSQSKVKADHASVTEQSGIYAGEDGYQIKVGNHTDLKGGIITSGKSAEDKGKNLFQTATLTASDIQNHSRYEGRSFGIGGSFDLNGGWDGTVTDKQGRPTDRISLAAGYGSDSDSQSSITKSGINTRNIHITDEAGQLARTGRTAKETEARIYTGIDTETADQHTGRLKNSFDKDAVAKEINLQREVTKEFGRNAAQAVAAVADKLGNTQSYERYQEARTLLEAELQNTDSKAEKAAIRASLGQVNAYLAENQSRYDTWKEGGIGRSILHGAAGGLTTGSLGGILAGSGTSLAAPYLDKAAENLGPAGKAAVNALGGAVIGYAAGGNVGTAAVGANVDWNNRQLHPKETQILNKLSKGKSAEEQYRLKAAACALTRCAEGVPDFDPLYKGLKNLQDAGKQFVAEQNVLMRTDAFKYGTWNSLNDIRSSYDRAATKIKGAGNMGLGATTFVGSGAIGGGLCSTGIGCAAGGLIATAGMTGGYTQASEGSRQLFGTYQSDFGKKVVLSLGTPIEYESPLVSDAKNLAVWGLETLITRKLGNLATGVKTSLTPKTADVQRNILSQSEVGIKWGKGIEGQGMPWEDYVGKGLSANARLPKNFKTFDYFDRGTGTAISAKTLDTQTTARLSKPEQLYSTMKGYIDKTANFKSYELSEVPLRADMIKQREIHLAIPAQTNKEQRLQLQRVVEYGKSQNITVKITEIE

SEQ ID NO: 28415 - protein, 120 aa, Neisseria meningitidis; identical to SEQ ID NO: 1496

SEQ ID NO: 28416 - protein, 107 aa, Neisseria meningitidis; identical to SEQ ID NO: 1793

SEQ ID NO: 28417 - protein, 210 aa, Neisseria meningitidis; identical to SEQ ID NO: 5450

SEQ ID NO: 28418 - protein, 296 aa, Neisseria meningitidis; identical to SEQ ID NO: 337

SEQ ID NO: 28419 - protein, 431 aa, Neisseria meningitidis; identical to SEQ ID NO: 14083

SEQ ID NO: 28420 - protein, 242 aa, Neisseria meningitidis; identical to SEQ ID NO: 9679

SEQ ID NO: 28421 - protein, 153 aa, Neisseria meningitidis
MKPQKSLRARAMDILSRQELSRIGLKRKLAPHAESEEELENVLNEFAERNWQSDLRYAEAYIRSKSRKHGSLRLKQALAQQGIDEETSCNLLPDRSSEKLAAIAVLRKKFKHPAADLKEKQKQARFLAYRGFDADTVQTALKHAWDENWEDGC

SEQ ID NO: 28422 - protein, 97 aa, Neisseria meningitidis; identical to SEQ ID NO: 6454

SEQ ID NO: 28423 - protein, 368 aa, Neisseria meningitidis
MSLYPIYNFSAGPAVLPEAVLETARQEMSDYNGTGFSVMEMSHRSDMFLSILHHAEQDLRQLLNIPSNYKILFLQGGATTQFNMAVLNLAHGFRTADAVVTGNWSRIAYEQMSRLTDTEIRLAAHGGEQFDYLDLPPVETWDVAPDSAFVHFAVNETVNGLQYREVPRLSEGMPPLVCDMSSEILSREFDVADYGLIYAGAQKNIGPAGVTVVIVREDLLERCPNDIPDVFNYRSHINRDGMYNTPSTYAIYMSGLVFRWLQAQGGVKKIEAVNRLKAQTLYETIDGSGGFYINRIRPNARSKMNVVFQTRDEELDRRFVLEAELQGLCLLKGYKTVGGMRASIYNAMPLEGVRALADFMRDFQRRYG

SEQ ID NO: 28424 - protein, 305 aa, Neisseria meningitidis; identical to SEQ ID NO: 22756

SEQ ID NO: 28425 - protein, 259 aa, Neisseria meningitidis; identical to SEQ ID NO: 15437

SEQ ID NO: 28426 - protein, 94 aa, Neisseria meningitidis; identical to SEQ ID NO: 15967

SEQ ID NO: 28427 - protein, 258 aa, Neisseria meningitidis
MTLIHPTAVIDPKAELDSGVKVGAYTVIGPNVQIGANTEIGPHAVINGHTSIGENNRIFQFASLGEIPQDKKYRDEPTKLIIGNGNTIREFTTFNLGTVTGIGETRIGDDNWIMAYCHLAHDCVIGNHTIFANNASLAGHVTIGDYVVLGGYTLVFQFCHIGDYAMTAFAAGVHKDVPPYFMASGYRAEPAGLNSEGMRRNGFTAEQISAVKDVYKTLYHRGIPFEEAKADILRRAETQAELAVFRDFFTQSTRGIIR

SEQ ID NO: 28428 - protein, 753 aa, Neisseria meningitidis; identical to SEQ ID NO: 14304

SEQ ID NO: 28429 - protein, 181 aa, Neisseria meningitidis; identical to SEQ ID NO: 2183

SEQ ID NO: 28430 - protein, 356 aa, Neisseria meningitidis
MYRRKGRGIKPWMGACAAFAALVWLVFALGDTLTPFAVAAVLAYVLDPLVEWLQKKGLNRASASMSVMVFSLILLLALLLIIVPMLVGQFNNLASRLPQLIGFMQNTLLPWLKNTIGGYVEIDQASIIAWLQAHTGELSNALKAWFPVLMRQGGNIVSSIGNLLLLPLLLYYFLLDWQRWSCGIAKLVPRRFAGAYTRITGNLNEVLGEFLRGQLLVMLIMGLVYGLGLVLVGLDSGFAIGMLAGILVFVPYLGAFTGLLLATVAALLQFGSWNGILSVWAVFAVGQFLESFFITPKIVGDRIGLSPFWVIFSLMAFGQLMGFVGMLAGLPLAAVTLVLLREGVQKYFAGSFYRGR

SEQ ID NO: 28431 - protein, 517 aa, Neisseria meningitidis
MNRTYANFYEMLAAACRKNGNGTAVFDGKEKTAYRALKQEAEAVAAYLQNIGVKFGDTVALAVSNSTEFITAYFAVSAIGAVAVPMNTFLKNSEYAYILNDCKAHCLFASVGLSKELAGLKAQTPVEKIIWTDKSRPAGEMAEGDAFFEDVRRFPEKPDLGRQPRINDLAHIIYTSGTTGHPKGALISYANLFANLNGIERIFKISKRDRFIVFLPMFHSFTLTAMVLLPIYMACSIILVKSVFPFSNVLKQALLKRATVFLGVPAIYTAMSKTKIPWYFRWFNRIRLFISGGAPLAEQTILDFKAKFPRAKLLEGYGLSEASPVVAVNTPERQKARSVGIPLPGLEAKAVDEELVEVPRGEVGELIVRGGSVMRGYLNMPAATDETIVNGWLKTGDFVTIDEDGFIFIVDRKKDLIISKGQNVYPREIEEEIYKLDAVEAAAVIGVKDRYADEEIVAFVQLKEGMDLGENEIRRHLRTVLANFKIPKQIHFKDGLPRNATGKVLKRVLKEQFDGNK

SEQ ID NO: 28432 - protein, 797 aa, Neisseria meningitidis; identical to SEQ ID NO: 27797

SEQ ID NO: 28433 - protein, 315 aa, Neisseria meningitidis
MEFFIILLAAVVVFGFKSFVVIPQQEVHVVERLGRFHRALTAGLNILIPFIDRVAYRHSLKEIPLDVPSQVCITRDNTQLTVDGIIYFQVTDPKLASYGSSNYIMAITQLAQTTLRSVIGRMELDKTFEERDEINSTVVSALDEAAGAWGVKVLRYEIKDLVPPQEILRSMQAQITAEREKRARIAESEGRKIEQINLASGQREAEIQQSEGEAQAAVNASNAEKIARINRAKGEAESLRLVAEANAEAIRQIAAALQTQGGADAVNLKIAEQYVAAFNNLAKESNTLIMPANVADIGSLISAGMKIIDSSKTAK

SEQ ID NO: 28434 - protein, 748 aa, Neisseria meningitidis
MCKPNYGGIVLLPLLLASCIGGNFGVQPVVESTPTAYPVTFKSKDVPTSPPAGPSVETTPVNRPAVGAAMRLLRRNIATSDKDGNDFPNSKQAEEKLSFKEEDILFLYGSKKDQRQQLEDKIHQRNPNVKIRTSENENKKYGYNFVDAGYVYVKGEDEIERTSNYKYFTHRFGYDGFVYYSGERPSQSLPSSGTVQYSGNWQYMTDAIRHRTGKAGDPSEDLGYLVYYGQNVGATSYAATADDREGEGKHPAEYTVDFDKKTLNGKLIKNQYVQKKDDEKKPLTIYNITAKLDGNRFTGSAKVNPDLAKNHAKKEHLFFHTDADQRLEGGFFGDKGEELAGRFISNDNSVFGVFAGKQKTEAANAADTKLALPSRKHTKILDSLKISVDEASDNNARQFAISSMPDLGHPDKLLVEGREIPLVNQEQTIDLADGRKMTVRACCDFLTYVKLGRIKTDRPASKSKAEDKGEDEEGAGVDNGEEDEISDEDEVSEDESEEDEEIVEEETEEDETEEDEEGEAEEEEAEEAEETEEKSPAEGNGDSGSILPAPEAPKGRDIDLFLKGIRTAEADIPQTGKAHYTGTWEARISKPIQWDNKADKAAKAEFNVDFGEKSISGTLTEKNGVEAAFYIEKGVIEGNGFHATARTRENGIDLSGQGSTRSQSFKADNLLVTGGFYGPKAEELGGTIFNNDGKSLSITENIENEVEVEAEAEVEVEADVGKQLEPDEVKHQFGVVFGAKKDNKEVEK

SEQ ID NO: 28435 - protein, 117 aa, Neisseria meningitidis; identical to SEQ ID NO: 18705

SEQ ID NO: 28436 - protein, 163 aa, Neisseria meningitidis; identical to SEQ ID NO: 23942

SEQ ID NO: 28437 - protein, 56 aa, Neisseria meningitidis
MAQYMCGPCGWIYDEELGDPEHGIPPGTKFEDIPDDWKCPECGVGKEDFYLLDFVI

SEQ ID NO: 28438 - protein, 173 aa, Neisseria meningitidis
MIFGNPYKFAIWIEEIDEWSSENFSEGIFTFFVNGDMIPQELPNTSTFLPNSLRSIQQFISIIDDLECPNLFDLDYCNAYIFLNDAVHYRNMKLSEEESYSYWKYCITEYIDNHEEKDNIWYLSNKHNEKLLYLNNNIIKESVFKKGYIKNIMEKIIMKYNYILNGNDKIYLT

SEQ ID NO: 28439 - protein, 161 aa, Neisseria meningitidis; identical to SEQ ID NO: 1189

SEQ ID NO: 28440 - protein, 183 aa, Neisseria meningitidis; identical to SEQ ID NO: 1696

SEQ ID NO: 28441 - protein, 271 aa, Neisseria meningitidis; identical to SEQ ID NO: 3345

SEQ ID NO: 28442 - protein, 505 aa, Neisseria meningitidis
MVISNPRELEKLKDRIPNLINIIRVAIVFPLMIMHILGLETGSRANLHASWTAWAFYVWLAIACWLIFFSIIHPHWQWQALRIPSFSAVADITMIGVLTYLFGGIDSGFGILILPFVVCSCLLSYGRYPLLYSSYAAILLIFNAIADGDINMYPLILDAKTVTNTFVLVTGSYFVAMIASLSVRYIDRAGKLAHENHAAYRRIRGLNQIVLNRVQEAVVIINVEYQTVLFNKKAKDLLPTLEIGQHTALFDPITVLWDKAPSRTFERNIDTPALTARIRAVPMNKEQNKLLILYIRPQSEIQAEALSVKLAALGQLTANIAHEIRNPMSAIRHANDLLRENMEAGAADPFNAKLCKIIDGNVCRIDKMLEDISSLNKRNKTERETIGLIPFWEEFKQEFLLGHPDAAGCIRLDMQGNHLTAYFDPAHLRQIMWNLANNAWRHSRKQPGSISVTIRPAQKNTVCILFADRPKCRNTCSNPFTPRRKTAPASGCMSPANWRTPISAI

SEQ ID NO: 28443 - protein, 67 aa, Neisseria meningitidis; identical to SEQ ID NO: 7480

SEQ ID NO: 28444 - protein, 492 aa, Neisseria meningitidis; identical to SEQ ID NO: 14372

SEQ ID NO: 28445 - protein, 259 aa, Neisseria meningitidis
MFFVLSPAKNLNEKDPAPVSEFTQPDLLAESDILMQQLRELAPQQIAELMHVSDKIALLNAQRNAEWNTPFTPENAKQAVFMFNGDVYEGMDANTLDIGQIRYLQNHVRLLSGLYGLLRPLDLIQPYRLEMGTAFANLRGKNLYEFWGDIITNLLNDTLAQAGSNTLVNLASQEYFKSVNTKTLRARLITPIFKDEKNGKYKIISFYAKRARGLMVRYAAEHHITDPEMLKNFNYEGYAFNDAASNESEWVFMRSEQIK

SEQ ID NO: 28446 - protein, 265 aa, Neisseria meningitidis; identical to SEQ ID NO: 2138

SEQ ID NO: 28447 - protein, 74 aa, Neisseria meningitidis; identical to SEQ ID NO: 444

SEQ ID NO: 28448 - protein, 228 aa, Neisseria meningitidis; identical to SEQ ID NO: 2578

SEQ ID NO: 28449 - protein, 604 aa, Neisseria meningitidis; identical to SEQ ID NO: 8822

SEQ ID NO: 28450 - protein, 43 aa, Neisseria meningitidis; identical to SEQ ID NO: 2340

SEQ ID NO: 28451 - protein, 1067 aa, Neisseria meningitidis; identical to SEQ ID NO: 495

SEQ ID NO: 28452 - protein, 41 aa, Neisseria meningitidis; identical to SEQ ID NO: 6542

SEQ ID NO: 28453 - protein, 78 aa, Neisseria meningitidis; identical to SEQ ID NO: 1246

SEQ ID NO: 28454 - protein, 72 aa, Neisseria meningitidis; identical to SEQ ID NO: 1579

SEQ ID NO: 28455 - protein, 384 aa, Neisseria meningitidis; identical to SEQ ID NO: 3277

SEQ ID NO: 28456 - protein, 55 aa, Neisseria meningitidis; identical to SEQ ID NO: 7238

SEQ ID NO: 28457 - protein, 92 aa, Neisseria meningitidis; identical to SEQ ID NO: 510

SEQ ID NO: 28458 - protein, 102 aa, Neisseria meningitidis; identical to SEQ ID NO: 1826

SEQ ID NO: 28459 - protein, 367 aa, Neisseria meningitidis; identical to SEQ ID NO: 4663

SEQ ID NO: 28460 - protein, 248 aa, Neisseria meningitidis; identical to SEQ ID NO: 639

SEQ ID NO: 28461 - protein, 612 aa, Neisseria meningitidis
MLPARFTILSVLAAALLAGQAYAAGAADAKPPKEVGKVFRKQQRYSEEEIKNERARLAAVGERVNQIFTLLGGETALQKGQAGTALATYMLMLERTKSPEVAERALEMAVSLNAFEQAEMIYQKWRQIEPIPGEAQKRAGWLRNVLRERGNQHLDGLEEVLAQADEGQNRRVFLLLAQAAVQQDGLAQKASKAVRRAALKYEHLPEAAVADVVFSVQGREKEKAIGALQRLAKLDTEILPPTLMTLRLTARKYPEILDGFFEQTDTQNLSAVWQEMEIMNLVSLHRLDDAYARLNVLLERNPNADLYIQAAILAANRKEGASVIDGYAEKAYGRGTGEQRSRAALTAAMMYADRRDYAKVRQWLKKVSAPEYLFDKGVLAAAAAVELDGGRAALRQIGRVRKLPEQQGRYFTADNLSKIQMLALSKLPDKREALRGLDKIIEKPPVGSNTELQAEALVQRSVVYDRLGKRKKMISDLERAFRLAPDNAQIMNNLGYSLLSDSKRLDEGFALLQTAYQINPDDTAVNDSIGWAYYLKGDAESALPYLRYSFENDPEPEVAAHLGEVLWALGERDQAVDVWTQAAHLTGDKKIWRETLKRHGIALPQPSRKPRK

SEQ ID NO: 28462 - protein, 765 aa, Neisseria meningitidis
MQPHAPHTDSNTLMLGQYAERAYLEYAMSVVKGRALPEVSDGQKPVQRRILFAMRDMGLTAGAKPVKSARVVGEILGKYHPHGDSSAYEAMVRMAQDFTLRYPLIDGIGNFGSRDGDGAAAMRYTEARLTPIAELLLSEINQGTVDFVPNYDGAFDEPLHLPARLPMVLLNGASGIAVGMATEIPSHNLNEVTQAAIALLKKPTLETADLMQYIPAPDFAGGGQIITPADELRRIYETGKGSVRVRARYEIEKLARGQWRVIVTELPPNANSAKILAEIEEQTNPKPKAGKKQLNQDQLNTKKLMLDLIDRVRDESDGEHPVRLVFEPKSSRIDTDTFINTLMAQTSLEGNVSMNLVMMGLDNRPAQKNLKTILQEWLDFRTVTVTRRLKFRLNQVEKRLHILEGRLKVFLHIDEVIKVIRESDDPKADLMAAFGLTEIQAEDILEIRLRQLARLEGFKLEKELNELREEQGRLNILLGDENEKRKLIIKEMQADMKQYGDARRTLVEEAGRAVLTQTTADEPITLILSEKGWIRSRAGHNLDLSQTAFKEGDRLKQTLEGRTVLPVVILDSLGRTYTLDAAEIPGGRGDGVPVSSLIELQNGAKPVAMLTGLPEQHYLLSSSGGYGFIAKLADMVGRVKAGKVVMTTDSGETVLPPIAVYASSFINPDCKIIAATSQNRALAFPIGELKIMAKGKGLQIIGLNAGESLTHTAVSSEPEILIESEGRRGAAHKDRIPVSLLEAKRGKKGKLLPISGSLKQLSSPK

SEQ ID NO: 28463 - protein, 628 aa, Neisseria meningitidis; identical to SEQ ID NO: 19899

SEQ ID NO: 28464 - protein, 79 aa, Neisseria meningitidis; identical to SEQ ID NO: 6866

SEQ ID NO: 28465 - protein, 265 aa, Neisseria meningitidis; identical to SEQ ID NO: 7180

SEQ ID NO: 28466 - protein, 40 aa, Neisseria meningitidis; identical to SEQ ID NO: 14736

SEQ ID NO: 28467 - protein, 875 aa, Neisseria meningitidis
MPAGRLPRRCPMMTKFTDCTRSNRIQPPTHRGYILKNNRQIKLIAASVAVAASFQAYAGLGGLNIQSNLDEPFSGSITVTGEEAKALLGGGSVTVSEKGLTAKVHKLGDKAVIAVSSEQAVRDPVLVFRIGAGAQVREYTAILDPVGYSPKTKSALSDGKTHRKTAPTAESQENQNAKALRKTDKKDSANAAVKPAYNGKTHTVRKGETVKQIAAAIRPKHLTLEQVADALLKANPNVSAHGRLRAGSVLHIPNLNRIKAEQPKPQTAKPKAETASMPSEPSKQATVEKPVEKPEAKVAAPEAKAEKPAVRPEPVPAANTAASETAAESAPQEAAASAIDTPTDETGNAVSEPVEQVSAEEETESGLFDGLFGGSYTLLLAGGGAALIALLLLLRLAQSKRARRTEESVPEEEPDLDDAADDGIEITFAEVETPATPEPAPKNDVNDTLALDGESEEELSAKQTFDVETDTPSNRIDLDFDSLAAAQNGILSGALTQDEETQKRADADWNAIESTDSVYEPETFNPYNPVEIVIDTPEPESVAQTAENKPETVDTDFSDNLPSNNHIGTEETASAKPASPSGLAGFLKASSPETILEKTVAEVQTPEELHDFLKVYETDAVAETAPETPDFNAAADDLSALLQPAEAPSVEENVTETVAETPDFNATADDLSALLQPSEVPAVEENAAEIVADDLSALLQPAEAPAVEENVTKTVAEIPDFNATADDLSALLQPSEVPAVEENAAETVADDLSALLQPAEAPAVEENATEITLETPDSNTSEADALPDFLKDGEEETVDWSIYLSEENIPNNADTGFPSESVGSDAPSEAKYDLAEMYLEIGDRDAAAETVQKLLEEAEGDVLKRAQALAQELGI

SEQ ID NO: 28468 - protein, 375 aa, Neisseria meningitidis; identical to SEQ ID NO: 15807

SEQ ID NO: 28469 - protein, 269 aa, Neisseria meningitidis; identical to SEQ ID NO: 1709

SEQ ID NO: 28470 - protein, 320 aa, Neisseria meningitidis; identical to SEQ ID NO: 22860

SEQ ID NO: 28471 - protein, 76 aa, Neisseria meningitidis
METLDERIKNLGKSLEDRIDANLIDATLEYITFSERLLAFETLCDYIEDFNIQLTEKESQEISFINKEFGIESTSD

SEQ ID NO: 28472 - protein, 159 aa, Neisseria meningitidis; identical to SEQ ID NO: 6511

SEQ ID NO: 28473 - protein, 637 aa, Neisseria meningitidis
MNPSPLLDLIDSPQDLRRLDKKQLPRLAGELRAFLLESVGQTGGHFASNLGAVELTIALHYVYDTPEDKLVWDVGHQSYPHKILTGRKNQMHTMRQYGGLAGFPKRSESEYDAFGVGHSSTSIGAALGMAAADKLLGSDRRSVAIIGDGAMTAGQAFEALNCAGDMDVDLLVVLNDNEMSISPNVGALPKYLASNVVRDMHGLLSTVKAQTGKVLDKIPGAMELAQKVEHKIKTLAEEAEHAKQSLSLFENFGFRYTGPVDGHNVENLVDVLKDLRSRKGPQLLHVITKKGNGYKLAENDPVKYHAVANLPKESAAQMPSEKEPKPAAKPTYTQVFGKWLCDRAAADSRLVAITPAMREGSGLVEFEQRFPDRYFDVGIAEQHAVTFAGGLACEGMKPVVAIYSTFLQRAYDQLVHDIALQNLPVLFAVDRAGIVGADGPTHAGLYDLSFLRCIPNMIVAAPSDENECRLLLSTCYQADAPAAVRYPRGTGTGVPVSDGMETVEIGKGIIRREGGKTAFIAFGSMVAPALAVAGKLNATVADMRFVKPIDEELIVRLARSHDRIVTLEENAEQGGAGGAVLEVLAKHGICKPVLLLGVADTVTGHGDPKKLLDDLGLSAEAVERRVRAWLSDRDAAN

SEQ ID NO: 28474 - protein, 761 aa, Neisseria meningitidis
MNTKLTKIISGLFVATAAFQTASAGNITDIKVSSLPNKQKIVKVSFDKEIVNPTGFVTSSPARIALDFEQTGISMDQQVLEYADPLLSKISAAQNSSRARLVLNLNKPGQYNTEVRGNKVWIFINESDDTVSAPARPAVKAAPAAPAKQQAAAPSTKSAVSVSKPFTPAKQQAAAPFTESVVSVSAPFSPEKQQAAASAKQQTAAPAKQQAAAPAKQTNIDFRKDGKNAGIIELAALGFAGQPDISQQHDHIIVTLKNHTLPTTLQRSLDVADFKTPVQKVTLKRLNNDTQLIITTAGNWELVNKSAAPGYFTFQVLPKKQNLESGGVNNAPKTFTGRKISLDFQDVEIRTILQILAKESGMNIVASDSVNGKMTLSLKDVPWDQALDLVMQARNLDMRQQGNIVNIAPRDELLAKDKAFLQAEKDIADLGALYSQNFQLKYKNVEEFRSILRLDNADTTGNRNTLVSGRGSVLIDPATNTLIVTDTRSVIEKFRKLIDELDVPAQQVMIEARIVEAADGFSRDLGVKFGATGKKKLKNDTSAFGWGVNSGFGGDDKWGAETKINLPITAAANSISLVRAISSGALNLELSASESLSKTKTLANPRVLTQNRKEAKIESGYEIPFTVTSIANGGSSTNTELKKAVLGLTVTPNITPDGQIIMTVKINKDSPAQCASGNQTILCISTKNLNTQAMVENGGTLIVGGIYEEDNGNTLTKVPLLGDIPVIGNLFKTRGKKTDRRELLIFITPRIMGTAGNSLRY

SEQ ID NO: 28475 - protein, 87 aa, Neisseria meningitidis; identical to SEQ ID NO: 1364

SEQ ID NO: 28476 - protein, 160 aa, Neisseria meningitidis; identical to SEQ ID NO: 15318

SEQ ID NO: 28477 - protein, 434 aa, Neisseria meningitidis; identical to SEQ ID NO: 2219

SEQ ID NO: 28478 - protein, 557 aa, Neisseria meningitidis; identical to SEQ ID NO: 15031

SEQ ID NO: 28479 - protein, 295 aa, Neisseria meningitidis
LATDRAIPEPSKDPLPLRPPRPSRLSPVVHVQSRPARTMAQSLRSRTRTQPHYSHRFQPVLSFRTEHPRLQHLMPLPLAGARQHPVRTVGTDLPTDRKRLKSRESIRRRHRHHYSDRWQQTASGHRSRRRTNQRPNHTEGQRCPLDQEKRPLQTRLQTTYPYRCGRLYRETAHHPRQCPVQTPVAVVGRVTRRYDRLCRRLQCGKPATSGRTSVVGRHYEQSLPQPSAGGNANQTPIFVEAPLCGRTKLRYAAPIPLCAGSLFRAAQSECAKPSESDVFEPVESRQQAKCARCRL

SEQ ID NO: 28480 - protein, 566 aa, Neisseria meningitidis
MSVKIQTRSVNTDVFNHLLTAGADPLIARLCASRGVQSPAELDDKLASLLPYQSLTNCEAAARRLADAVERQEKILIVADYDADGATACAVGLDGLAAMGAKVDFLVPNRFEHGYGLTPELAEIAAEQGVDLLITVDNGIASIAGVARAQELGLDVIVTDHHLPAETVPDCIIVNPNQKGCGFPSKSLAGVGVIFYVLMALRAELRRRNYFSDGIKEPNLGELLDLVALGTVADVVPLDHNNRILVSQGLKRMRSGKMRPGIRALFEVARRDWRKAQPFDMGFALGPRINAAGRLDDMSVGIACLLARDDTEAQELAAQLNNLNIERREIEQSMLQDALNTFPETLPSGQTTLAVYRDDFHQGVVGIVASRLKDRFYRPTIVFAPADNGEVRGSGRSIPNLHLRDALDLVSKRHPDLILKFGGHAMAAGLSILEHNIPAFQTAFEEAVREMVREDDLSQTFITDGSLKACDITLEQAQNLARHVWGQGFAPPSFTDEFHVVRQQPLGAEGKHKKAWLQKDGCEFEAMFWRCSEDIPEYIRTVYRPVANEWRNNLELQLYIDYWEAA

SEQ ID NO: 28481 - protein, 77 aa, Neisseria meningitidis; identical to SEQ ID NO: 5942

SEQ ID NO: 28482 - protein, 207 aa, Neisseria meningitidis; identical to SEQ ID NO: 6666

SEQ ID NO: 28483 - protein, 150 aa, Neisseria meningitidis; identical to SEQ ID NO: 2445

SEQ ID NO: 28484 - protein, 216 aa, Neisseria meningitidis
MPVTRPAKINTYTRIIDASLALFNEEGERNISTNHIAAHLGISPGNLYYHFRNKDEIIVQLFKRYSEALLEYLNEAVLPSDVEDSINYMAGIYDVMWEYRFLFSDVNTLLARSAELLGEHNTFTQAKVSPLLVNLLTQLNGLNIIQADQTAMNDLAVNMWMVTKYWFDFDSSLRGRTKLTEDSKARGIRRTLSLLRPYLLPEHRKKYDRKIGNGNP

SEQ ID NO: 28485 - protein, 136 aa, Neisseria meningitidis
VKLLANNWQPIAIIALVGTGLAVSHHQGYKSAFAKQQAVIDKMERDKAQALLLSAQNYARELEQARAEAKKYEVKAHAVGMALAKKQAEVSRLKTENKKEIENVLTQDRKNASGGCIDGFGSHGLQLYNRALGYGN

SEQ ID NO: 28486 - protein, 463 aa, Neisseria meningitidis; identical to SEQ ID NO: 7825

SEQ ID NO: 28487 - protein, 415 aa, Neisseria meningitidis; identical to SEQ ID NO: 15479

SEQ ID NO: 28488 - protein, 154 aa, Neisseria meningitidis; identical to SEQ ID NO: 741

SEQ ID NO: 28489 - protein, 444 aa, Neisseria meningitidis; identical to SEQ ID NO: 14335

SEQ ID NO: 28490 - protein, 402 aa, Neisseria meningitidis; identical to SEQ ID NO: 13595

SEQ ID NO: 28491 - protein, 171 aa, Neisseria meningitidis; identical to SEQ ID NO: 2424

SEQ ID NO: 28492 - protein, 433 aa, Neisseria meningitidis
MTESLRLPAASLKPSTVALPGSKSISNRTLLLAALSDNTCEIHSLLKSDDTDRMLEALDKLGVEIEYLAEDRLKVHGTGGRFPNRTADLFLGNAGTAFRPLTAALAVLGGDYHLHGVPRMHERPIGDLADALRIAGADVEYLGKEHYPPLHIGKRQDNGERVIPIKGNVSSQFLTALLMALPLTGQAFEIRMVGELISKPYIDITLKLMAQFGVQVANENYRVFKIPADAHYHAPEHLHVEGDASSASYFLAAGLIAATPVCVIGIGANSIQGDVAFARELEKIGADVVWGENFVEVSRPKERAVQSFDLDANHIPDAAMTLAIVALATGQTCTLRNIGSWRVKETDRIAAMANELRKLGAKVVEEAEAIHITPPETPTPDAVIDTYDDHRMAMCFSLVSLLGVPVVINDPKCTHKTFPTYFDVFSSLTETAE

SEQ ID NO: 28493 - protein, 593 aa, Neisseria meningitidis
MPYFALFDDAVSGRAKRYQNYVESRFFRPEELDALDGALQKGWQKGLHSVLFADYEFGLPLTGVESERGGNLALHWFADCTDTDAASWLARHSDDLPAGISTPQSSVSETDYLDRIRQIHEAIRRGDTYQINYTTRLHLQAYGNPVSLYRRLRQPVPYAVLSHLPDAEGQSAWTLCFSPELFLKIGSDGTISTEPMKGTAPILGDGQDERRAAELQADPKNRAENVMIVDLLRNDFGKIAQTGKVCVPEPFKVSRFGSVWQMTSTIQAQALPDTSFADILRAAFPCGSITGAPKKMSMQIIESLETEARGLYTGSIGYLKPCAGGLGFEGAFNVVIRTLSLTPLSDGIYQGVYGVGSGIVIDSDPAAEYRECGWKARFLNELRPDFGIFETLRAENGRCTLLDRHLCRLKTSAQALNLPLPDGCENQIKQYIADLPDGAFRVKALLASDGISLSRAVLNRLTDKQRVIISPTILPAQNYLRRFKTTCRTVFDQAWQTAETQGAFDSLFFNSDGILLEGGRSNVFVKHRGQWLTPSLDLDILNGIMRQAVLDEPQKYLQTNQVIETHITQKTLQEAEEIRLSNALRGVFAAALA

SEQ ID NO: 28494 - protein, 125 aa, Neisseria meningitidis; identical to SEQ ID NO: 535

SEQ ID NO: 28495 - protein, 680 aa, Neisseria meningitidis
MMSPETQKQLKITDVSAKKLDKLNLHTAWDLVLHLPLRYEDETHIMPIKDAPIGVPCQVEGEVIHQEVTFKPRKQLIVQIADGSGSVLFLRFIHFYASHQKQTAVGKRIRAVGEIKHGFYGDEMIHPKIRDAEGGGLAESLTPVYPTVNGLNQPTLRRIIQTALDVTPLHDTLPDALLCRLKLPHLAESLRLLHLPPPSFTIHQLSDGTLPAWQRLKFDELLAQQLSMRLARQKRIGGTAAALGGDGTLTQALRQALPFALTDAQEKVVSEICRDMAQTYPMHRLLQGDVGSGKTIVAALSALTAIESGAQVAVMAPTEILAEQHFIKFKQWLEPLGIEVVRLFGSLRKKAKDEAKAKLADGSVKIAVGTHALFSDGVAFHNLGLTIVDEQHRFGVAQRLALKNKGREVHQLMMSATPIPRTLAMSFFADLDVSVIDELPPGRTPIKTRLVNNVRRAEVEGFVLGTCRKGRQAYWVCPLIEESETLQLQTAAETLARLQTALPELNIGLVHGRMKAAEKAEVMARFSSGGLNVLVATTVIEVGVDVPNAALMVIEHAERMGLAQLHQLRGRVGRGAAESVCVLLFAEPLGELAKARLKVIYEHTDGFEIARQDLNIRGPGEFLGARQSGVPMLRFAKLEEDLHLLEQARETAPMLIEQNPEIVEAHLARWLSGREGYLGV

SEQ ID NO: 28496 - protein, 240 aa, Neisseria meningitidis; identical to SEQ ID NO: 4607

SEQ ID NO: 28497 - protein, 227 aa, Neisseria meningitidis; identical to SEQ ID NO: 23590

SEQ ID NO: 28498 - protein, 188 aa, Neisseria meningitidis; identical to SEQ ID NO: 7019

SEQ ID NO: 28499 - protein, 511 aa, Neisseria meningitidis
MLGMFSVNSYAERSKYHIGNSNVRLDIDHTKSVVTDFRVDGQRFSGRIIEPSIIEHVPTGARSLEKVPVKFTASVSRAGVLAGVGKLARLGAKLSTRAVPYVGTALLAHDVYETFKEDIQAQGYQYDPETDKFVKGYEYSNCLWYEDKRRINRTYGCYGVDSSIMRLMSDDSRFPEVKELMESQMYRLARPFWNWHKEELNKLSSLDWNNFVLNRCTFNWNGGDCLVNKGDDFRNGADFSLIRNSKYKEEMDAKKLEEILSLKVDANPDKYIKATGYPGYSEKVEVAPGTKVNMGPVTDRNGNPVQVVATFGRDSQGNTTVDVQVIPRPDLTPGSAEAPNAQPLPEVSPAENPANNPNPNENPGTSPNPEPDPDLNPDANPDTDGQPGTRPDSPAVPGRTNGRDGEDGGLLCKFFPDILACDRLPEPNPAEDLNLPSETVNVEFQKSGIFQNSAQCPAPVTFTVTVLDSSRQFAFSFENACTIAERLRYMLLALAWAVAAFFCIRTVSREV

SEQ ID NO: 28500 - protein, 367 aa, Neisseria meningitidis; identical to SEQ ID NO: 14271

SEQ ID NO: 28501 - protein, 306 aa, Neisseria meningitidis; identical to SEQ ID NO: 7190

SEQ ID NO: 28502 - protein, 156 aa, Neisseria meningitidis; identical to SEQ ID NO: 955

SEQ ID NO: 28503 - protein, 113 aa, Neisseria meningitidis; identical to SEQ ID NO: 14617

SEQ ID NO: 28504 - protein, 127 aa, Neisseria meningitidis; identical to SEQ ID NO: 1080

SEQ ID NO: 28505 - protein, 98 aa, Neisseria meningitidis; identical to SEQ ID NO: 2571

SEQ ID NO: 28506 - protein, 461 aa, Neisseria meningitidis; identical to SEQ ID NO: 19902

SEQ ID NO: 28507 - protein, 67 aa, Neisseria meningitidis; identical to SEQ ID NO: 966

SEQ ID NO: 28508 - protein, 92 aa, Neisseria meningitidis; identical to SEQ ID NO: 1005

SEQ ID NO: 28509 - protein, 279 aa, Neisseria meningitidis; identical to SEQ ID NO: 2627

SEQ ID NO: 28510 - protein, 182 aa, Neisseria meningitidis; identical to SEQ ID NO: 2877

SEQ ID NO: 28511 - protein, 126 aa, Neisseria meningitidis; identical to SEQ ID NO: 6506

SEQ ID NO: 28512 - protein, 231 aa, Neisseria meningitidis
MKAMILAAGRGERMRPLTDTTPKPLLDVAGKPLIGWHLCRLKQAGFTEIVINHAWLGRQIEEALGDGSAYGVNIAYSPEPAGGLETAGGIAQALPLLGDAPFLVVNGDVLTDIDFTAAFQAASSLPEHISAHLWLADNPPHNSDGDFSLLPDGSVRPEVNGGNGLTFSGVGIYRPEMFDGIEAGSVAKLAPVLRNEMRQNRVSGQKHTGLWLDVGTVCRLKEAQALAGAWK

SEQ ID NO: 28513 - protein, 307 aa, Neisseria meningitidis; identical to SEQ ID NO: 1349

SEQ ID NO: 28514 - protein, 487 aa, Neisseria meningitidis; identical to SEQ ID NO: 9402

SEQ ID NO: 28515 - protein, 122 aa, Neisseria meningitidis
MNPKTLSRLSLCAAVLALTACGDNGQKSLYYYGGYPDTVYEGLKNDDTSLGKQTEKMEKYFVEAGNKKMNAAPGAHAHLGLLLSRSGDKEGAFRQFEEEKRLFPESGVFMDFLMKTGKGGKR

SEQ ID NO: 28516 - protein, 251 aa, Neisseria meningitidis; identical to SEQ ID NO: 14373

SEQ ID NO: 28517 - protein, 472 aa, Neisseria meningitidis
MSIKNAVKLIEESEARFVDLRFTDTKGKQHHFTVPARIVLEDPEEWFENGQAFDGSSIGGWKGIQASDMQLRPDVSTAFVDPFYDDVTVVITCDVIDPADGQGYDRDPRSIARRAEAYLKSSGIGDTAYFGPEPEFFVFDGVEFETDMHKTRYEITSESGAWASGLHMDGQNTGHRPAVKGGYAPVAPIDCGQDLRSAMVNILEGLGIEVEVHHSEVGTGSQMEIGTRFATLVKRADQTQDMKYVIQNVAHNFGKTATFMPKPIMGDNGSGMHVHQSIWKDGQNLFAGDGYAGLSDTALYYIGGIIKHAKALNAITNPSTNSYKRLVPHFEAPTKLAYSAKNRSASIRIPSVNSSKARRIEARFPDPTANPYLAFAALLMAGLDGIQNKIHPGDPADKNLYDLPPEEDALVPTVCASLEEALAALKADHEFLLRGGVFSKDWIDSYIAFKEEDVRRIRMAPHPLEFEMYYSL

SEQ ID NO: 28518 - protein, 262 aa, Neisseria meningitidis; identical to SEQ ID NO: 3640

SEQ ID NO: 28519 - protein, 531 aa, Neisseria meningitidis; identical to SEQ ID NO: 14996

SEQ ID NO: 28520 - protein, 69 aa, Neisseria meningitidis; identical to SEQ ID NO: 3128

SEQ ID NO: 28521 - protein, 675 aa, Neisseria meningitidis
LSLSEFIERRTSFNLMVILTTLFFVCVLVVLVLTVPDQVQMWLDRAKEIIFTEFSWFYVLTFSIFLGFLLILSVSSLGNIRLGRDEDVPEFGFLSWLAMLFAAGMGVGLMFFGVAEPLMHYFSDITAGTPEHRQQQALLHTVFHWGVHAWSVYGTIALALAYFGFRYKLPLALRSCFYPLLKEKISGRFGDAIDIMALLATFFGIITTLGFGASQLGAGLQEMGWIAENSFSVQVLIIAAVMSLAVVSAISGVGKGVKVLSELNLSLAFLLLFFVLAAGPTVYLLSAFGDNIGNYLGNLVRLSFKTYAYEREHKPWFESWTVLYWAWWCSWAPFVGLFIARISKGRTIREFVFGVLLIPGLFGVLWFTVFGNTAIWLNDGVAGGMLEKMTSSPETLLFKFFNYLPLPELTSIVSLLVISLFFVTSADSGIYVLNNITSRDKGLSAPRWQAVMWGVLMSAVAVLLMRSGGLGNLQSMTLIVSLPFALLMLIMCFSLWKGLSADKKYFETRVNPTSVFWTGGKWKERLVQIMSQTQEQDILKFLKHTASPAMHELQRELSEEYGLSVRVDKMFHQDEPAIEFVIRKETMRDFMYGIKSVGQDVSDQLINDGKLPHIRHQTTYKPYAYFFDGRVGYDVQYMNKDELIADILKNYERYLMLLDDVGQELMAHEQVELAE

SEQ ID NO: 28522 - protein, 409 aa, Neisseria meningitidis; identical to SEQ ID NO: 4088

SEQ ID NO: 28523 - protein, 50 aa, Neisseria meningitidis; identical to SEQ ID NO: 7105

SEQ ID NO: 28524 - protein, 280 aa, Neisseria meningitidis; identical to SEQ ID NO: 4431

SEQ ID NO: 28525 - protein, 265 aa, Neisseria meningitidis; identical to SEQ ID NO: 15509

SEQ ID NO: 28526 - protein, 398 aa, Neisseria meningitidis; identical to SEQ ID NO: 6385

SEQ ID NO: 28527 - protein, 74 aa, Neisseria meningitidis
MKKNAPKSFEEALSRLESLTQSMQGEMPLEDALAAYQEGNELVRYCQTKLAQVEQKLQVLDADGPKELNLESDE

SEQ ID NO: 28528 - protein, 273 aa, Neisseria meningitidis
MSLQNIIETAFENRADINPTTVTPEVKEAVLETIRQLDSGKLRVAERLGVGEWKVNEWAKKAVLLSFRIQDNEILNDGVNKYFDKVPTKFADWSEDEFKNAGFRAVPGAVARRGSFVAKNVVLMPSYVNIGAYVDEGAMVDTWATVGSCAQIGKNVHLSGGVGIGGVLEPLQASPTIIEDNCFIGARSEIVEGVIVEEGSVISMGVFIGQSTKIFDRTTGEIYQGRVPAGSVVVSGSMPSKDGSHSLYCAVIVKRVDAQTRAKTSVNELLRGI

SEQ ID NO: 28529 - protein, 104 aa, Neisseria meningitidis; identical to SEQ ID NO: 24072

SEQ ID NO: 28530 - protein, 312 aa, Neisseria meningitidis; identical to SEQ ID NO: 5589

SEQ ID NO: 28531 - protein, 384 aa, Neisseria meningitidis; identical to SEQ ID NO: 7460

SEQ ID NO: 28532 - protein, 208 aa, Neisseria meningitidis; identical to SEQ ID NO: 3160

SEQ ID NO: 28533 - protein, 759 aa, Neisseria meningitidis; identical to SEQ ID NO: 6857

SEQ ID NO: 28534 - protein, 132 aa, Neisseria meningitidis; identical to SEQ ID NO: 1178

SEQ ID NO: 28535 - protein, 596 aa, Neisseria meningitidis; identical to SEQ ID NO: 23469

SEQ ID NO: 28536 - protein, 125 aa, Neisseria meningitidis; identical to SEQ ID NO: 17297

SEQ ID NO: 28537 - protein, 144 aa, Neisseria meningitidis; identical to SEQ ID NO: 4528

SEQ ID NO: 28538 - protein, 544 aa, Neisseria meningitidis
MTKFIFVTGGVVSSLGKGIAAASIAAILESRGLNVTMLKLDPYINVDPGTMSPFQHGEVFVTDDGAETDLDLGHYERFIDSTMTRRNSFSTGQVYENVIAKERRGDYLGGTVQVIPHITDEIKRRIHEGAAGYDVAIVEIGGTVGDIESLPFLEAIRQMRSQLGRNNTLFAHLSYVPYIAAAGEIKTKPTQHTVKEMLSIGLQPDILICRMDREMPADERRKIALFCNVEERAIVGSYDVDSIYECPEMLHDQGIDNIITEQLQLNVQQADLTAWKKIVHAVKNPKHTVKIAMVGKYVDLTESYKSLIEALKHAGVHTETDVQITFVDSESIEKNKGDVSMLKDMDAILVPGGFGSRGVEGKIAAVRYARENNVPYLGICLGMQIALIEYARDVAGLKGANSTEFDLKCAAPVVALIDEWQTADGSVETRDESADLGGTMRLGAQEVELKAGSLAAKIYGSGHIRERHRHRYEVNNNYVPQFEKAGLVIGGVSAGRERLVETIELPNHPWFFACQFHPEFTSNPRKGHPLFTAFVKAALNNKKA

SEQ ID NO: 28539 - protein, 763 aa, Neisseria meningitidis
MLAPELEQILQQLYREARKAHYEFISLEHLLLVLIEEDASVPNVLKLCGADLKVVSEQLAASVAENTPLIPEHLLDTVETRPTLGFQRVMQRAMVHTQSAGKAAVEPLDVLVALMSETDSHTVYFLKLQSVTRFEVLRCIAHGSPDEDEDDGNYSSDGMDDDNENRTKPGKNPLSAYTVNLNAEVKAGRIDPLIGRKHEMERLVQILCRRRKNNPLLVGEAGVGKTALAEGLAHQIVNGGIPDALKDAEVYALDMGSLLAGTKYRGDFEARVKSVLKQLEKIPHAILFIDEIHTIIGAGSTSGGTMDASNLLKPALAKGSLRCIGATTYDEYRTIFDKDHALSRRFQKIDVVEPTVSETVQILRGLKPMFEAFHQVRYTQGALEAAAELSARYINERFLPDKAIDVMDEAGAAQRILPKSKQKKVIGKAQIETVIAKVARIPEKTVSHDDKQVLQFLGRDLKNMVYGQENAIDALVAAVKMSRSGLALPDKPIGSFLFSGPTGVGKTEAAKQLAYSLGVPLQRFDMSEYMERHAVSRLIGAPPGYVGFEQGGLLTEAINKQPHCVLLLDEIEKAHPDIFNVLLQVMDAGKLTDNNGKSADFRNVILIMTTNAGAESLSRPSLGFTAKRERGDEMQAINKLFTPEFRNRLDAIIPFAPLSEPVITKVVDKFLLQLEHRLLDKKVEAEFTSALHKYLAEKGFDPQMGARPMHRLIQEKIRKPLADELLFGKLSDGGFVRIDWDAAKEEAVLKFKKSKVKIKTASA

SEQ ID NO: 28540 - protein, 362 aa, Neisseria meningitidis; identical to SEQ ID NO: 6713

SEQ ID NO: 28541 - protein, 55 aa, Neisseria meningitidis; identical to SEQ ID NO: 13928

SEQ ID NO: 28542 - protein, 421 aa, Neisseria meningitidis; identical to SEQ ID NO: 3036

SEQ ID NO: 28543 - protein, 108 aa, Neisseria meningitidis
MNKIIKGDRVVVIAGKDKGKQGQVVRVLGDKKVVVEGVNVVKRHQKPNPMRGIEGGIITKEMPLDISNIAILNPETNKADRVGIKLIENEGKVKRVRFFKSNGSIIGA

SEQ ID NO: 28544 - protein, 98 aa, Neisseria meningitidis; identical to SEQ ID NO: 3727

SEQ ID NO: 28545 - protein, 329 aa, Neisseria meningitidis; identical to SEQ ID NO: 247

SEQ ID NO: 28546 - protein, 118 aa, Neisseria meningitidis; identical to SEQ ID NO: 13999

SEQ ID NO: 28547 - protein, 446 aa, Neisseria meningitidis; identical to SEQ ID NO: 17245

SEQ ID NO: 28548 - protein, 206 aa, Neisseria meningitidis; identical to SEQ ID NO: 15079

SEQ ID NO: 28549 - protein, 502 aa, Neisseria meningitidis; identical to SEQ ID NO: 18448

SEQ ID NO: 28550 - protein, 65 aa, Neisseria meningitidis; identical to SEQ ID NO: 127

SEQ ID NO: 28551 - protein, 245 aa, Neisseria meningitidis; identical to SEQ ID NO: 3451

SEQ ID NO: 28552 - protein, 280 aa, Neisseria meningitidis
MSGGVMPELPEVETTLRGIAPHIEGKTVEAVVLRQLKLRWQINPDLGEILSGRQVLSCGRRAKYLLIRFQTGVLLIHLGMSGSLRIFTPSDGRIGRPDRHDHVDIVFSDGTVMRYRDPRKFGAILWYEGIEEHHPLLEKLGPEPLSEAFCTDYLYVRLKAQKRAVKLALMDNAVVVGVGNIYANESLFRAGISPHRPANRLKKKECALLVETVKAVLQRAIETGGSTLRDFVDSDGKSGYFQQEYTVYGRHNQPCPRCGGLVVKETLGQRGTFYCPNCQK

SEQ ID NO: 28553 - protein, 64 aa, Neisseria meningitidis
MNNYYLYRNCSSDVLWVKRIQRQIDGSLLLISDNSTYPPMPLALAEHPDIQIIGQVVQVSKDLN

SEQ ID NO: 28554 - protein, 268 aa, Neisseria meningitidis
MKSSFVQTLTIAGSDSGGGAGIQADLKTFQMRGVFGTCVITAVTAQNTLGVSAVHLVPTETITAQIQAIREDFDIRAYKIGMLGTAEIIECVADKLKHCDFGRRVLDPVMIAKGGAPLLQDSAVAALTRLLLPDTDVLTPNLPEAEALTGVHIENRKDAERAAKILLDYGVKNVVIKGGHLNGSSSGRCTDWLFTQNETLELDSPRFPTAHTHGTGCTFSACITAELAKGLDVCEAVQTAKAYITAAISNPLEIGAGHGPVNHWAYRD

SEQ ID NO: 28555 - protein, 395 aa, Neisseria meningitidis
MNTLLKQLKPYPFARLREAMQGISAPEGLEAVPLHIGEPKHPTPKVITDALTASLHELEKYPLTAGLPELRQACANWLKRRYDGLTLNPDTEILPVLGSREALFSFVQTVLNPVSDGLKPVIVSPNPFYQIYEGATLLGGGEIHFANCPAPSFNPDWRSISEEVWKRTKLVFVCSPNNPSGSVLDLDGWKEVFDLQDKYGFIIASDECYSEIYFDGNKPLGCLQAAAQLGRSRQKLLMFTSLSKRSNVPGLRSGFVAGDAELLKNFLLYRTYHGSAMSIPVQRASIAAWDDEQHVIDNRRLYQEKFERVIPILQQVFDVKLPDASFYIWLKVPDGDDLAFARNLWQKAAIQVLPGRFLARDTEQGNPGEGYVRIALVADVATCVKAAETIVSLYR

SEQ ID NO: 28556 - protein, 257 aa, Neisseria meningitidis; identical to SEQ ID NO: 15638

SEQ ID NO: 28557 - protein, 436 aa, Neisseria meningitidis
VANQQTSSGSSKFGDLKKRLLFLFGALIVFRIGAHIPVPGVDAVALAKLYESAGNGILGILNMFSGGSLERFSIFAIGIMPYISASIIVQLASEILPSLKALKKEGEAGRKVITKYTRYGTVLLAILQSLGVASFVFQQGIVVTSSFEFHVSTVVSLVTGTMFLMWLGEQITERGIGNGISLIITAGIASGIPSGIAKLVTLTNQGSMSMLTALFIVFGALLLIYLVVYFESAQRKIPIHYAKRQFNGRAGSQNTHMPFKLNMAGVIPPIFASSIILFPSTLLGWFGSADTNSVLHKIAGLLQHGQLLYMALFAVTVIFFCYFYTALVFSPKEMAENLKKSGAFVPGIRPGEQTSRYLEKVVLRLTLFGALYITTICLIPEFLTTVLNVPFYLGGTSLLILVVVTMDFSTQINSYRLTQQYDKLMTRSEMKSFSRK

SEQ ID NO: 28558 - protein, 60 aa, Neisseria meningitidis; identical to SEQ ID NO: 3547

SEQ ID NO: 28559 - protein, 172 aa, Neisseria meningitidis; identical to SEQ ID NO: 601

SEQ ID NO: 28560 - protein, 463 aa, Neisseria meningitidis; identical to SEQ ID NO: 14079

SEQ ID NO: 28561 - protein, 273 aa, Neisseria meningitidis
MMRIFSTGGKMDTQAVITHIARWLDEYAARANAKGFVVGVSGGIDSAVVSALAARTGRPTLLLDMPIRQHPGQLERARLHIRNLQRQYANVSAQTVDLTDTFQTFEQTVGAHQTAFDSQPLSLANARSRLRMLTLYYYGQIHGLLVTGTGNKIEDFGVGFFTKYGDGGVDISPIADLTKTQVYRLAEALGVDEAIQKAPPTDGLWDTERTDEEQMGASYPELEWAMGVYGTRKPEDFEGRQREVLEIYTRLHRAMRHKINPIPVCRIPPELLG

SEQ ID NO: 28562 - protein, 414 aa, Neisseria meningitidis; identical to SEQ ID NO: 7206

SEQ ID NO: 28563 - protein, 378 aa, Neisseria meningitidis; identical to SEQ ID NO: 7324

SEQ ID NO: 28564 - protein, 488 aa, Neisseria meningitidis; identical to SEQ ID NO: 3695

SEQ ID NO: 28565 - protein, 317 aa, Neisseria meningitidis
MTHTVHLHLEEIDNLALQRLCGSFDNNLDLLAKALDIHISRRFEHFTFNGAFAHAGKRALLKLLETAQTRDLNNGDIRLAAVEAQTEDAGHQEKNHDHAYYFRTKRGSIGGRTPRQNGYIRALLNHDIVFGLGPAGTGKTYLAVAAAVDTMEKHQIERIVLVRPAVEAGEKLGFLPGDLTQKVDPYLRPLYDALYDLMGFDRVTKLIEKGLIEIAPLAYMRGRTLNGAYIILDEAQNTTPEQMKMFLTRIGFGAKAVITGDISQIDLPKNIKSGLKDAREKLHDVEGLYFHTFTSEDVVRHPLVQKIVEAYESAEHD

SEQ ID NO: 28566 - protein, 395 aa, Neisseria meningitidis; identical to SEQ ID NO: 1105

SEQ ID NO: 28567 - protein, 389 aa, Neisseria meningitidis; identical to SEQ ID NO: 19357

SEQ ID NO: 28568 - protein, 291 aa, Neisseria meningitidis
MNTEIEIIATDKVSNQAAMRSVLVMEQWGNGETYSEERWVERGRQAVRQTMEGMFELGRALIILKEHTEHGRFMEIVKSQFGLGIAETSRLMSATRRFATPQMQKAAPKLMDLGKSKLLELLVEEDVTLVGLAEGEEVNGMTFDDVDRMTVRELRVALRESRENLAAKDEVMKTKTAKIDELAEKLAKKQTVVREPKAEDVGSELAMQLTSLEVGIRSQVSRLKDLFDQLNAHSEAHEISHQAKMVGTLNQIILDCEQLRESYALPTEAPTDNVPEWLGGETGEGDESGND

SEQ ID NO: 28569 - protein, 188 aa, Neisseria meningitidis; identical to SEQ ID NO: 23125

SEQ ID NO: 28570 - protein, 499 aa, Neisseria meningitidis; identical to SEQ ID NO: 12146

SEQ ID NO: 28571 - protein, 1029 aa, Neisseria meningitidis; identical to SEQ ID NO: 14377

SEQ ID NO: 28572 - protein, 337 aa, Neisseria meningitidis
MIFSIIVPIYNVEKYLRCCVDSVLAENFADYEMILVDDGSPDGCGKICDEYAGKYPHIKVIHQENGGLSDARNAGIRAAKGDYLIFLDSDDYWADTNRSKNAGGGILFDLQQLADKKVDLILHPSSLNYHVIPKGADFSDNDFVRHFETLVEGRYYIANAWTKIVRREIIIKNNLFFPKGYIHEDFPYSLQLARFIKTFAFYDNPFYQYRVLGGSISHNIKYKNFSDVLTHLDRGVDFLVENKNSPIYGGLQKFVFDNIGYLRSILVRLYFSKNIIVIYRKYFSFKEKCRKIFGAKAIRPVFIGKTAFIIGLPILRLLVPPMLYPAIKAVYQKFFSE

SEQ ID NO: 28573 - protein, 216 aa, Neisseria meningitidis; identical to SEQ ID NO: 7775

SEQ ID NO: 28574 - protein, 277 aa, Neisseria meningitidis; identical to SEQ ID NO: 7531

SEQ ID NO: 28575 - protein, 89 aa, Neisseria meningitidis; identical to SEQ ID NO: 1367

SEQ ID NO: 28576 - protein, 489 aa, Neisseria meningitidis; identical to SEQ ID NO: 4824

SEQ ID NO: 28577 - protein, 363 aa, Neisseria meningitidis; identical to SEQ ID NO: 2781

SEQ ID NO: 28578 - protein, 186 aa, Neisseria meningitidis; identical to SEQ ID NO: 23094

SEQ ID NO: 28579 - protein, 156 aa, Neisseria meningitidis; identical to SEQ ID NO: 681

SEQ ID NO: 28580 - protein, 672 aa, Neisseria meningitidis; identical to SEQ ID NO: 21256

SEQ ID NO: 28581 - protein, 502 aa, Neisseria meningitidis; identical to SEQ ID NO: 7174

SEQ ID NO: 28582 - protein, 206 aa, Neisseria meningitidis; identical to SEQ ID NO: 1725

SEQ ID NO: 28583 - protein, 97 aa, Neisseria meningitidis
MNFQEENENIKNDIEINLSHSAEADSVEAMMDLAVYGLAAMVAKHNKTRGEQLVLQAIAGHMRKLLAALPETESLVQTGKVYRRLEDLIFKTYLPEQ

SEQ ID NO: 28584 - protein, 107 aa, Neisseria meningitidis; identical to SEQ ID NO: 9670

SEQ ID NO: 28585 - protein, 693 aa, Neisseria meningitidis; identical to SEQ ID NO: 8128

SEQ ID NO: 28586 - protein, 217 aa, Neisseria meningitidis; identical to SEQ ID NO: 5286

SEQ ID NO: 28587 - protein, 363 aa, Neisseria meningitidis; identical to SEQ ID NO: 14154

SEQ ID NO: 28588 - protein, 331 aa, Neisseria meningitidis; identical to SEQ ID NO: 6104

SEQ ID NO: 28589 - protein, 273 aa, Neisseria meningitidis; identical to SEQ ID NO: 6485

SEQ ID NO: 28590 - protein, 68 aa, Neisseria meningitidis; identical to SEQ ID NO: 531

SEQ ID NO: 28591 - protein, 77 aa, Neisseria meningitidis; identical to SEQ ID NO: 15066

SEQ ID NO: 28592 - protein, 168 aa, Neisseria meningitidis; identical to SEQ ID NO: 13970

SEQ ID NO: 28593 - protein, 451 aa, Neisseria meningitidis; identical to SEQ ID NO: 7557

SEQ ID NO: 28594 - protein, 852 aa, Neisseria meningitidis; identical to SEQ ID NO: 18475

SEQ ID NO: 28595 - protein, 192 aa, Neisseria meningitidis; identical to SEQ ID NO: 23462

SEQ ID NO: 28596 - protein, 322 aa, Neisseria meningitidis
MTAKPFSLNLTNLLLLAVLFAVSLSVGVADFRWSDVFSLSDSQQVMFISRLPRTFAIVLTGASMAVAGMIMQILMRNRFVEPSMAGAGQSAALGLLLMSLLLPAAPLPVKMSVAAVAALIGMLVFMLLIRRLPPTAQLMVPLVGIIFGGVVEAVATFVAYEFEMLQMLGVWQQGDFSGVLLGRYELLWATGILALFAYLIADQLTILGLGETVSVNLGLNRTAILWSGLIIVALITSLVVVTVGNIPFIGLVVPNIISRLMGDKLRQSLPAVALLGASLVLLCDIVGRVIVFPFEIPVSTVFGVMGTALFLWLLLRKPAHAV

SEQ ID NO: 28597 - protein, 497 aa, Neisseria meningitidis; identical to SEQ ID NO: 1619

SEQ ID NO: 28598 - protein, 240 aa, Neisseria meningitidis; identical to SEQ ID NO: 1969

SEQ ID NO: 28599 - protein, 287 aa, Neisseria meningitidis; identical to SEQ ID NO: 2812

SEQ ID NO: 28600 - protein, 661 aa, Neisseria meningitidis; identical to SEQ ID NO: 15513

SEQ ID NO: 28601 - protein, 245 aa, Neisseria meningitidis; identical to SEQ ID NO: 428

SEQ ID NO: 28602 - protein, 300 aa, Neisseria meningitidis; identical to SEQ ID NO: 2507

SEQ ID NO: 28603 - protein, 242 aa, Neisseria meningitidis; identical to SEQ ID NO: 4670

SEQ ID NO: 28604 - protein, 56 aa, Neisseria meningitidis; identical to SEQ ID NO: 6169

SEQ ID NO: 28605 - protein, 258 aa, Neisseria meningitidis
MSDNALTSSRRFGGIARLYGDSALAHFSQAHVCVVGVGGVGSWAIEALARTGIGRLTLIDLDNVAESNVNRQLHALTGDFGKAKVTALRERVAQINPGCQVFEIEDFVTEDNLPEYFGKGFDFVIDAIDQVRVKAAMAAYFVERKQPFVLSGGAGGQKNPALIQTADLSRVTHDPLLANLRYTLRKRYGFSRDTKAKMRVPCVFSTENITPPQSGAACSTDAAPQGLSCAGYGASMLVTASFGLYCAQAAVEHIADKK

SEQ ID NO: 28606 - protein, 356 aa, Neisseria meningitidis; identical to SEQ ID NO: 14018

SEQ ID NO: 28607 - protein, 678 aa, Neisseria meningitidis
MTDNALLHLGEEPRFDQIKTEDIKPALQTAIAEAREQIAAIKAQTHTGWANTVEPLTGITERVGRIWGVVSHLNSVADTPELRAAYNELMPEITAFFTEIGQDIALYNRFKTIKNSPEFATLSTAQKTKLNHDLRDFVLSGAELPPEQQAELAQLQTEGAQLSAKFSQNVLDATDAFGIYFDDAAPLAGIPEDALAMFAAAAQSEGKTGYKIGLQIPHYLAVIQYADNRELREQIYRAYVTRASELSDDGKFDNTANIDRTLANALQTAKLLGFKNYAELSLATKMADTPEQVLNFLHDLARRAKPYAEKDLAEVKAFARESLNLADLQPWDLGYASEKLREAKYAFSETEVKKYFPVGKVLNGLFAQIKKLYGIGFTEKTVPVWHKDVRYFELQQNGETIGGVYMDLYAREGKRGGAWMNDYKGRRRFSDGTLQLPTAYLVCNFTPPVGGREARLSHDEILILFHETGHGLHHLLTQVDELGVSGINGVEWDAVELPSQFMENFVWEYDVLAQMSAHEETGVPLPKELFDKMLAAKNFQRGMFLVRQMEFALFDMMIYSEDDEGRLKNWQQVLDSVRKEVAVIQPPEYNRFALSFGHIFAGGYSAGYYSYAWAEVLSADAYAAFEESDDVAATGKRFWQEILAVGGSRSAAESFKAFRGREPRIDALLRHSGFDNAV

SEQ ID NO: 28608 - protein, 469 aa, Neisseria meningitidis; identical to SEQ ID NO: 6715

SEQ ID NO: 28609 - protein, 266 aa, Neisseria meningitidis; identical to SEQ ID NO: 14691

SEQ ID NO: 28610 - protein, 352 aa, Neisseria meningitidis; identical to SEQ ID NO: 14418

SEQ ID NO: 28611 - protein, 52 aa, Neisseria meningitidis; identical to SEQ ID NO: 7295

SEQ ID NO: 28612 - protein, 114 aa, Neisseria meningitidis
LKAINLYDCAFEDFVPEIKDNFCVGIDLDIGTDDSDAADIFSVRICSPKWILHNCFQNQRVKWGAGMMIMNEFNHSVIKSEIEKILKECSKETWEKSLTYLLRFFSWEFEDYQC

SEQ ID NO: 28613 - protein, 168 aa, Neisseria meningitidis; identical to SEQ ID NO: 673

SEQ ID NO: 28614 - protein, 272 aa, Neisseria meningitidis; identical to SEQ ID NO: 1395

SEQ ID NO: 28615 - protein, 433 aa, Neisseria meningitidis; identical to SEQ ID NO: 14229

SEQ ID NO: 28616 - protein, 484 aa, Neisseria meningitidis; identical to SEQ ID NO: 15726

SEQ ID NO: 28617 - protein, 259 aa, Neisseria meningitidis; identical to SEQ ID NO: 2935

SEQ ID NO: 28618 - protein, 465 aa, Neisseria meningitidis; identical to SEQ ID NO: 23495

SEQ ID NO: 28619 - protein, 111 aa, Neisseria meningitidis; identical to SEQ ID NO: 7069

SEQ ID NO: 28620 - protein, 96 aa, Neisseria meningitidis; identical to SEQ ID NO: 6139

SEQ ID NO: 28621 - protein, 156 aa, Neisseria meningitidis; identical to SEQ ID NO: 14845

SEQ ID NO: 28622 - protein, 413 aa, Neisseria meningitidis; identical to SEQ ID NO: 15870

SEQ ID NO: 28623 - protein, 412 aa, Neisseria meningitidis; identical to SEQ ID NO: 12960

SEQ ID NO: 28624 - protein, 421 aa, Neisseria meningitidis
MNTLQRRKTHQVRIDHITVGSEAPVVIQSMTNTDTADAKATALQIKELSDAGSEMVRITVNSPEAASKVAEIRRRLDDMGYATPLIGDFHFNGERLLAEFPECGKALSKYRINPGNVGKGVKGDEKFAFMIRTAAENDKAVRIGVNWGSLDQSLAKRMMDANLASSAPKPPEEVTKEALIVSSLESAEKAVLLGLPEDKIILSCKVSAVQDLIQVYRELGSRCAYPLHLGLTEAGMGSKGIVASTAALSVLLQEGIGDTIRISLTPEPGSPRTQEVVVGQEILQTMGLRSFTPMVTACPGCGRTTSTVFQELAQDVQNYLRQKMSIWRTLYPGVESLNVAVMGCVVNGPGESKLADIGISLPGTGETPVAPVYVDGERKVTLKGDNIATEFLAIVEEYVKTNYGENGLKRHQGKVIPIHSL

SEQ ID NO: 28625 - protein, 659 aa, Neisseria meningitidis; identical to SEQ ID NO: 14759

SEQ ID NO: 28626 - protein, 172 aa, Neisseria meningitidis; identical to SEQ ID NO: 17358

SEQ ID NO: 28627 - protein, 59 aa, Neisseria meningitidis; identical to SEQ ID NO: 23106

SEQ ID NO: 28628 - protein, 151 aa, Neisseria meningitidis; identical to SEQ ID NO: 6340

SEQ ID NO: 28629 - protein, 296 aa, Neisseria meningitidis; identical to SEQ ID NO: 22660

SEQ ID NO: 28630 - protein, 60 aa, Neisseria meningitidis; identical to SEQ ID NO: 6474

SEQ ID NO: 28631 - protein, 346 aa, Neisseria meningitidis
MDISDFDFTLPEKLIAQHPPEVRGSSRLLVALPDMPLQDRVFGDLSDYVGEGDVLVFNNTKVMKARLFGQKDSGGRIEALIERVLDNHTALAHIRSSKSPKPGMGLVFEGGIRAVMVGREGELFCLRFEGGQTVYELLEQNGHLPLPPYIERAADADDDSRYQTVYAKYQGAVAAPTAGLHFTEELLRRLKDKGAVTAEVTLHVGAGTFQPVRVEKIEEHKMHSEWFEVPSETAAAVEAAKARGNKVWAVGTTSMRALESAARATGRLKAGQGDTDIFITPGYRFNVADRLVTNFHLPKSTLLMLVSAFSGMGHIRAAYRYAVEREYRFFSYGDAMILGRNEGVVR

SEQ ID NO: 28632 - protein, 289 aa, Neisseria meningitidis; identical to SEQ ID NO: 23923

SEQ ID NO: 28633 - protein, 121 aa, Neisseria meningitidis; identical to SEQ ID NO: 6750

SEQ ID NO: 28634 - protein, 89 aa, Neisseria meningitidis; identical to SEQ ID NO: 6952

SEQ ID NO: 28635 - protein, 671 aa, Neisseria meningitidis; identical to SEQ ID NO: 15047

SEQ ID NO: 28636 - protein, 256 aa, Neisseria meningitidis; identical to SEQ ID NO: 6198

SEQ ID NO: 28637 - protein, 103 aa, Neisseria meningitidis
MFNQTQTVTYPATFLGAKKFKGEIDGSNIDTCSVLVATPLPAQSGNAVGFTAAQMKFGDSKNFSRLENLKYPCEVMVTVEMTSTGKGMVPSLIDFQVAEKPKG

SEQ ID NO: 28638 - protein, 172 aa, Neisseria meningitidis; identical to SEQ ID NO: 2773

SEQ ID NO: 28639 - protein, 310 aa, Neisseria meningitidis; identical to SEQ ID NO: 15223

SEQ ID NO: 28640 - protein, 1786 aa, Neisseria meningitidis; identical to SEQ ID NO: 15305

SEQ ID NO: 28641 - protein, 120 aa, Neisseria meningitidis
MTGFNDAAGVASSPSDIKGKYVQKVEVAKGVITAQMASSNVNNEIKGKKLSLWAKRQNGSVKWFCGQPVTRADTATNNDAVTAATDNSNNINTKHLPSTCRDDSSAVCIETPPTAFYKNT

SEQ ID NO: 28642 - protein, 160 aa, Neisseria meningitidis; identical to SEQ ID NO: 515

SEQ ID NO: 28643 - protein, 380 aa, Neisseria meningitidis; identical to SEQ ID NO: 15739

SEQ ID NO: 28644 - protein, 244 aa, Neisseria meningitidis
MSANVSRLVVQNLQKSFKKRQVVKSFSLEIESGEVVGLLGPNGAGKTTSFYMIVGLIAADAGSVTLDGQELRHLPIHERARLGVGYLPQEASIFRKMTVEQNIRAILEIRTKDKNQIDREIEKLLADLNIERLRNNPAPSLSGGERRRVEIARVLAMKPHFILLDEPFAGVDPIAVIDIQKIIGFLKSRGIGVLITDHNVRETLSICDRAYIISDGTVLASGKPDDLVGNEQVRSVYLGENFKY

SEQ ID NO: 28645 - protein, 359 aa, Neisseria meningitidis
VHAPDVTLRNLTVTRSGMSLPAMDAGIYLEETAPRALIEHNNIFDNSVGVYLHGSAEAMVRENKIVGDATLRVNERGNGVTVWNAPGAQVVGNDISKGRDGIFSNTSTHNTYKNNRFSDLRFAVHYMYTNDSEVSGNISVGNNMGYVLMFSERLKVFDNIAVGSRDGIMLNYVNYSDIHDNIINKAGKCVFAYNANYDKLSANHFENCQIGIHFTAAIEGTSLHDNSFINNESQVKYVSTRFLDWSEGGHGNYWSDNSAFDLNGDGFGDSAYRPNGIIDQIIRAPVLRLLMNSLAISIVKWAQAQFPAVLPGGVVDSKPLMKPYVPKIQTRYQAMKDELLKEAETRQSEWGRAENGSLN

SEQ ID NO: 28646 - protein, 305 aa, Neisseria meningitidis; identical to SEQ ID NO: 9487

SEQ ID NO: 28647 - protein, 201 aa, Neisseria meningitidis; identical to SEQ ID NO: 26261

SEQ ID NO: 28648 - protein, 248 aa, Neisseria meningitidis; identical to SEQ ID NO: 14834

SEQ ID NO: 28649 - protein, 74 aa, Neisseria meningitidis; identical to SEQ ID NO: 2281

SEQ ID NO: 28650 - protein, 342 aa, Neisseria meningitidis
MARRSKTFEEAAAEVEERFGHRGIKLVEFEGTAKPCVINCPKHGNQTCSRYSNMFIGSSWGCPSCGNEQAAKAGIATLRKNHIALEMLKQAVTGMTKQERITTQAYNEMTKSVAGSNSIVLNDVQGDTTINNHHTHTHNRSVADGKALSMRLTPRPLLSDRQAAAFARTGKLTGSFDLFASVVAPSQYTFAVAMPDTSMSPVIEKGDLLVVEPRMCPADEDIALIELSDKRLVVAHLVIDIAGRMLIYQTGRPSEAFDLPEGSTILGVVLESKNGLCPPHRQEGVLIRITAPDVWTVGMISASKTSCTRPTAARKSAVCFLRFWQATRGIPKTRSWRNPNNA

SEQ ID NO: 28651 - protein, 344 aa, Neisseria meningitidis; identical to SEQ ID NO: 6064

SEQ ID NO: 28652 - protein, 244 aa, Neisseria meningitidis
MTKQLKLSALFVALLASGTAVAGEVSVQGYTVSGQSNEIVRNNYGECWKNAYFDKASQGRVECGDAVAAPEPEPEPEPEPAPAPVVVVEQAPQYVDETISLSAKTLFGFDKDSLRAEAQDNLKVLAQRLSRTNVQSVRVEGHTDFMGSDKYNQALSERRAYVVANNLVSNGVPVSRISAVGLGESQAQMTQVCEAEVAKLGAKVSKAKKREALIACIEPDRRVDVKIRSIVTRQVVPAHNHHQH

SEQ ID NO: 28653 - protein, 387 aa, Neisseria meningitidis; identical to SEQ ID NO: 9434

SEQ ID NO: 28654 - protein, 321 aa, Neisseria meningitidis
MSDTQLTQGERYHIQYLSRHCTVTEIAKQLNRHKSTISREIRRHRTQGQQYSAEKAQRQSQTIKQRKRQPYKLDSQLIQHIDTLIRRKLSPEQVCAYLCKHHRITLHHSTIYRYLRQDKSNGSTLWQHLRICSKPYRKRYGSTWTRGKVPNRVGIENRPAIVDQKSRIGDWEADTIVGKGQKSALLTLVERVTRYTIICKLDSLKAEDTARAAVRALKAHKDRVHTITMDNGKEFYQHTKITKALKAETYFCRPYHSWEKGLNENTNGLIRQYFPKQTDFRNISDREIRRVQDELNHRPRKTLGYETPSVLFLNLFQPLIH

SEQ ID NO: 28655 - protein, 796 aa, Neisseria meningitidis
MTEQKHEEYGADSIQVLEGLEAVRKRPGMYIGDTQDGSGLHHMVFEVLDNAIDEALAGHCDKITVTIHADHSVSVADNGRGMPTGIHPKEGRSAAEVIMTVLHAGGKFDNNSYKISGGLHGVGVSVVNALSDWVTLTIYRDGKEHFVRFVRGETEEPLKVVGDSDKKGTTVRFLASAETFGNVEYSFDILAKRIRELSFLNNGVDIELTDERDGKHESFALSGGVAGFVQYMNRKKTPLHEKIFYAFGEKDGMSVECAMQWNDSYQESVQCFTNNIPQRDGGTHLTALRQVMTRTINNYIEANEVAKKAKVETAGDDMREGLTCVLSVKLPDPKFSSQTKDKLVSGEIGPVVNEVISQALTDFLEENPNEAKIITGKIVDAARAREAARKAREITRRKGVMDGLGLPGKLADCQEKDPALSELYLVEGDSAGGSAMQGRDRKFQAILPLKGKILNVEKARFEKMLASQEVAALITALGAGIGKEEFNAEKLRYHRIIIMTDADVDGAHIRTLLLTFFYRQMPELVERGYIYIAQPPLYKAKYGKQERYLKDELEKDQWLLGLALEKAKIVSDSRTIEGEELANTAKQFLLAKTVIEQESRIIDELVLHAMLHASPVDLSTAESADRSVAELNGLLDEKEVALERIEGHEGHQFIKITRKLHGNVVVSYLEPKFLNSKAYQTLTQTAAALKGMVGKGAKLYKGDNEYDIDSFEGALDILMSVAQKGMSIQRYKGLGEMNPEQLWETTMDPAVRRLLKVRIEDAIAADEVFVTLMGDEVEPRRAFIENNALIAQNIDA

SEQ ID NO: 28656 - protein, 199 aa, Neisseria meningitidis; identical to SEQ ID NO: 368

SEQ ID NO: 28657 - protein, 371 aa, Neisseria meningitidis; identical to SEQ ID NO: 14361

SEQ ID NO: 28658 - protein, 179 aa, Neisseria meningitidis; identical to SEQ ID NO: 8483

SEQ ID NO: 28659 - protein, 143 aa, Neisseria meningitidis; identical to SEQ ID NO: 7796

SEQ ID NO: 28660 - protein, 217 aa, Neisseria meningitidis; identical to SEQ ID NO: 8419

SEQ ID NO: 28661 - protein, 71 aa, Neisseria meningitidis; identical to SEQ ID NO: 2650

SEQ ID NO: 28662 - protein, 105 aa, Neisseria meningitidis; identical to SEQ ID NO: 895

SEQ ID NO: 28663 - protein, 81 aa, Neisseria meningitidis; identical to SEQ ID NO: 2079

SEQ ID NO: 28664 - protein, 140 aa, Neisseria meningitidis; identical to SEQ ID NO: 11162

SEQ ID NO: 28665 - protein, 264 aa, Neisseria meningitidis; identical to SEQ ID NO: 14473

SEQ ID NO: 28666 - protein, 263 aa, Neisseria meningitidis
MITVNTLQKMKAAGEKIAMLTAYESNFAALMDDAGVEMLLVGDSLGMAVQGRQSTLPVSLRDMCYHTECVARGAKNAMIVSDLPFGAYQQSKEQAFAAAAELMAAGAHMVKLEGGVWMAETTEFLQMRGIPVCAHIGLTPQSVFAFGGYKVQGRGGKAQALLNDAKAHDDAGAAVVLMECVPAELAKKVTETVACPTIGIGAGVDCDGQVLVMHDMLGIFPGKTAKFVKNFMHGQSSIQAAVRAYVEEVKAKTFPAAEHIFAD

SEQ ID NO: 28667 - protein, 65 aa, Neisseria meningitidis; identical to SEQ ID NO: 7687

SEQ ID NO: 28668 - protein, 179 aa, Neisseria meningitidis; identical to SEQ ID NO: 8483

SEQ ID NO: 28669 - protein, 201 aa, Neisseria meningitidis; identical to SEQ ID NO: 2273

SEQ ID NO: 28670 - protein, 197 aa, Neisseria meningitidis; identical to SEQ ID NO: 1551

SEQ ID NO: 28671 - protein, 104 aa, Neisseria meningitidis; identical to SEQ ID NO: 6457

SEQ ID NO: 28672 - protein, 141 aa, Neisseria meningitidis; identical to SEQ ID NO: 15166

SEQ ID NO: 28673 - protein, 533 aa, Neisseria meningitidis
MHSIYFFKEKQMSQTDTQRDGRFLRTVEWLGNMLPHPVTLFIIFIVLLLIASAAGAYFGLSVPDPRPVGAKGRADDGLIHVVSLLDADGLIKILTHTVKNFTGFAPLGTVLVSLLGVGIAEKSGLISALMRLLLTKSPRKLTTFMVVFTGILSNTASELGYVVLIPLSAIIFHSLGRHPLAGLAAAFAGVSGGYSANLFLGTIDPLLAGITQQAAQIIHPDYVVGPEANWFFMVASTFVIALIGYFVTEKIVEPQLGPYQSDLSQEEKDIRHSNEITPLEYKGLIWAGVVFVALSALLAWSIVPADGILRHPETGLVSGSPFLKSIVVFIFLLFALPGIVYGRVTRSLRGEQEVVNAMAESMSTLGLYLVIIFFAAQFVAFFNWTNIGQYIAVKGATFLKEVGLGGSVLFIGFILICAFINLMIGSASAQWAVTAPIFVPMLMLAGYAPEVIQAAYRIGDSVTNIITPMMSYFGLIMATVIKYKKDAGVGTLISMMLPYSAFFLIAWIALFCIWVFVLGLPVGPGAPTFYPAP

SEQ ID NO: 28674 - protein, 758 aa, Neisseria meningitidis; identical to SEQ ID NO: 14184

SEQ ID NO: 28675 - protein, 119 aa, Neisseria meningitidis
MNIKHLITAALIASAAFAAQAAPQKPVSAAQTAQHPAVWIDVRSEQEFSEGHLHNAVNIPVDQIVRRIHEAAPDKDTPVNLYCRSGRRAEAALQELKKAGYTNVANHGGYKDLLKKGMK

SEQ ID NO: 28676 - protein, 104 aa, Neisseria meningitidis; identical to SEQ ID NO: 1772

SEQ ID NO: 28677 - protein, 397 aa, Neisseria meningitidis; identical to SEQ ID NO: 103

SEQ ID NO: 28678 - protein, 104 aa, Neisseria meningitidis; identical to SEQ ID NO: 24072

SEQ ID NO: 28679 - protein, 100 aa, Neisseria meningitidis; identical to SEQ ID NO: 448

SEQ ID NO: 28680 - protein, 210 aa, Neisseria meningitidis; identical to SEQ ID NO: 5238

SEQ ID NO: 28681 - protein, 547 aa, Neisseria meningitidis
MNAFTRAWHALERHYQDTRHVLLRDRFACEPDRFERMHERLDGMLFDYSKNRLGEDTLQLLCNLADAADLEGKMRALRTGAKVNNSEGRAALHTALRLPDGAGAVYADGRDVLPEIRRELNRALEFAHSLDDGSYQGITGKRITDFVHIGIGGSDLGPAMCVQALEPFRRHIAVHFAANADPACLDAVLCRLNPETTVFCVASKSFKTPETLLNAQAVKAWYRGAGFSESETACHFCAVSADTAAAAAFGIAAERVFAMYDWVGGRYSVWSSVGLPVMVAVGGARFRELLAGAHAMDSHFFHTPPRRNIPVLMALIAVWYNNFQHADGQTAVPYSHNLRLLPAWLNQLDMESLGKSRASDGSPAVCKTGGIVFGGEGVNCQHAYFQLLHQGTRLIPCDFIVPMTAQGVEEGRSRFTVANAFAQAEALMKGKTLDEARAELADLPEAERERLAPHKEFPGNRPSNSILLDRLTPYNLGMLMAAYEHKTFVQGVIWDINPFDQWGVEYGKQLAKTIIGELEGGTSVHDASTEGLMAFYRECRLKGGGAA

SEQ ID NO: 28682 - protein, 335 aa, Neisseria meningitidis; identical to SEQ ID NO: 14485

SEQ ID NO: 28683 - protein, 369 aa, Neisseria meningitidis
MSNWKPDIPYNDLPPLPPKQDIESKTILKRCIAARASLARLKQAAELIPNQAMLINTLPVMEARASSEIENIVTTTDKLFQSLQMDTERQDPATKEALQYRTALFAGYESLTSRPLCTQTAIMVCNAIKHPYEMAIRKTGGTALKGGNSGNVVYTPPEGEETIRGKLANWERFIHESGDLDPLIIMAAAHYQFEAIHPFTDGNGRTGRILNSLLLIEKGLLDLPILYLSRYIIENRADYYRLLLGVTERQDWESWIIYILDGVADTADWTVAKIDAIRRLFEQTRQHIRTHAQGIYTHELVNLLFEQPYTRIANLEAAGIAKRQTASKYLKELSDIGVLQEIVIGRDKLFIHPRLMELLRGEGNSFTSF

SEQ ID NO: 28684 - protein, 103 aa, Neisseria meningitidis; identical to SEQ ID NO: 28637

SEQ ID NO: 28685 - protein, 199 aa, Neisseria meningitidis; identical to SEQ ID NO: 3649

SEQ ID NO: 28686 - protein, 45 aa, Neisseria meningitidis; identical to SEQ ID NO: 645

SEQ ID NO: 28687 - protein, 135 aa, Neisseria meningitidis; identical to SEQ ID NO: 803

SEQ ID NO: 28688 - protein, 371 aa, Neisseria meningitidis; identical to SEQ ID NO: 849

SEQ ID NO: 28689 - protein, 106 aa, Neisseria meningitidis; identical to SEQ ID NO: 3331

SEQ ID NO: 28690 - protein, 98 aa, Neisseria meningitidis; identical to SEQ ID NO: 1735

SEQ ID NO: 28691 - protein, 195 aa, Neisseria meningitidis; identical to SEQ ID NO: 15117

SEQ ID NO: 28692 - protein, 477 aa, Neisseria meningitidis; identical to SEQ ID NO: 3214

SEQ ID NO: 28693 - protein, 561 aa, Neisseria meningitidis; identical to SEQ ID NO: 15486

SEQ ID NO: 28694 - protein, 754 aa, Neisseria meningitidis; identical to SEQ ID NO: 15328

SEQ ID NO: 28695 - protein, 595 aa, Neisseria meningitidis
MKLPLSYLPNIRFLSWCCLLAGIIAPATLLASPNPAEIRMQQDIQQRQREEQLRQTMQPESDVRLHQKNTGETVNQLMGDDSSQPCFAINEVVLEGEHHARFQFALKRALRETGFQAGKCLHAGNINQIMSLAQNALIGRGYTTTRILAAPQDLNSGKLQLTLIPSYLRSIRIDRSNDDQTHAGRIAAFQNKFPTRSNDLLNLRDLEQGLENLKRLPTAEADLQIVPVEGEPNQSDVVVQWRQRLLPYRVSVGMDNSGSEATGKYQGNITFSADNPLGLSDMFYVNYGRSIGGTPDEESFDGHRKEGGSNNYAVHYSAPFGKWTWAFNHNGYRYHQAVSGLSEVYDYNGKSYNTDFGFNRLLYRDAKRKTYLGVKLWMRETKSYIDDAELTVQRRKTAGWLAELSHKEYIGRSTAGFKLKYKRGTGMKDALRAPEEAFGEGTSRMKIWTASADVNTPFQIGKQLFAYDTSVHAQWNKTPLTSQDKLAIGGHHTVRGFDGEMSLSAERGWYWRNDLSWQFKPGHQLYLGADVGHVSGQSAKWLSGQTLVGTAIGIRGQIKLGGNLHYDIFTGRALKKPEFFQSRKWASGFQVGYTF

SEQ ID NO: 28696 - protein, 504 aa, Neisseria meningitidis; identical to SEQ ID NO: 14975

SEQ ID NO: 28697 - protein, 859 aa, Neisseria meningitidis
MRYDKLTAKFQQALAEAQSLALAADGSYLEAGFVLKALLDDQNSGAAALLAHSGVNVPQVKQRLQQHLSSLPKVSGQGGDILPSRELQAVLNLMDKAATKRGDAYIASELFLLALVQQNDAAGKILKEAGATEQNINAAIDAVRGGQNVNDANAEDQRDALKKYTLDLTQRARDGKLDPVIGRDDEIRRAIQVLQRRTKNNPVLIGEPGVGKTAIVEGLAQRIVNGEVPESLRNKRLLVLDLAALIAGAKYRGEFEERLKGVLNDLAKDDGNTLIFIDEIHTLVGAGKTDGAMDAGNMLKPALARGELHCIGATTLDEYRQYIEKDAALERRFQKVLVGEPSVEDTIAILRGLQERYEIHHGIDITDPAIVAAAELSDRYITDRFLPDKAIDLIDEAASRVKMEKETKPEAMDKIDRRLIQLRMEKAHVEKEKDDASKKRLELIDEEINGLQKEYADLDEIWKAEKAISDGAANIKKQIDEVKIKIEQAKRQGDLALASKLMYEDLEHLEKQRAAAERADTDSTKPANKLLRNNVGAEEIAEVVSRMTGIPVSKMMEGERDKLLKMEEVLHRRVVGQDEAVRAVSDAIRRSRSGLADPNKPYGSFLFLGPTGVGKTELCKALAGFLFDSEDHLIRIDMSEYMEKHAVARLIGAPPGYVGYEEGGYLTEQVRRKPYSVILLDEVEKAHPDVFNILLQVLDDGRLTDGQGRTVDFKNTVIVMTSNIGSQHIQQMGIQDYEAVKEVVMEDVKEHFRPEMINRIDEVVVFHGLDQDNIRNIAKIQLKGLEKRLEKQNLRLTVSDAALDIIAKAGFDPIYGARPLKRAIQSEIENPLAKALLAGNYAPESEIRVEADGDRLKFA

SEQ ID NO: 28698 - protein, 347 aa, Neisseria meningitidis; identical to SEQ ID NO: 23795

SEQ ID NO: 28699 - protein, 463 aa, Neisseria meningitidis; identical to SEQ ID NO: 5153

SEQ ID NO: 28700 - protein, 133 aa, Neisseria meningitidis; identical to SEQ ID NO: 17655

SEQ ID NO: 28701 - protein, 298 aa, Neisseria meningitidis
LNPTNDLKAWQQRAQAQTELLLERFLPSENEIPHTLHEAMRYAALDGGKRLRPMLVLAASELGGAVADAVGQAMAAIEMIHVYSLVHDDMPAMDNDSLRRGKPTCHIKYGEATALLVGDALQTQAFDVLARPSGLPASRQLAMLSVLAKAGGSRGMAGGQAIDLANVGKQMVQADLEQMHSLKTGALIRAAVLLGAMSCPNLSEDSLAVLDDYAAKLGLAFQVIDDVLDCEADTATLGKTAGKDADNDKPTYVKLMGLEAARSYAHKLVAEAVALLEPFGDKALRLRQLAEFAVARKY

SEQ ID NO: 28702 - protein, 222 aa, Neisseria meningitidis; identical to SEQ ID NO: 197

SEQ ID NO: 28703 - protein, 213 aa, Neisseria meningitidis
MLKPETIHISGPAGILETIHIPSEQVLARGVAVINHPNPLQGGTNTNKVIQTAAKALSKLGFHCYLPNLRGVGNSEGTHDYGRGETQDCLAVIDYARAQHPEAPEFALSGFSFGGYVATFAAQARIPDLLLLIGAAVCHYTGRPEPSAVPNVAKTLMIHGAEDEVVEIGKALKWAEPQDLPVITIAGSTHFFHGKLIVLRDTILRFAPVCLNG

SEQ ID NO: 28704 - protein, 309 aa, Neisseria meningitidis; identical to SEQ ID NO: 8627

SEQ ID NO: 28705 - protein, 330 aa, Neisseria meningitidis; identical to SEQ ID NO: 22426

SEQ ID NO: 28706 - protein, 239 aa, Neisseria meningitidis; identical to SEQ ID NO: 5111

SEQ ID NO: 28707 - protein, 470 aa, Neisseria meningitidis; identical to SEQ ID NO: 2364

SEQ ID NO: 28708 - protein, 260 aa, Neisseria meningitidis; identical to SEQ ID NO: 14745

SEQ ID NO: 28709 - protein, 430 aa, Neisseria meningitidis
MAVFPLSAKHRKYALRALAVSIILVSAAYIASTERTERVRPQRVEQKLPPLSWGGSGVQTAYWVQEAVQPGDSLADVLARSGMARDEIARITEKYGGEADLRNLRADQSVHVLVGGDGGAREVQFFTDEDGERNLVALEKKGGIWRRSASEADMKVLPTLRSVVVKTSARGSLARAEVPVEIRESLSGIFAGRFSLDGLKEGDAVRLMYDSLYFHGQQVAAGDILAAEVVKGGTRHQAFYYRSDKEGGGGGNYYDEDGKVLQEKGGFNIEPLVYTRISSPFGYRMHPILHTWRLHTGIDYAAPQGTPVRASADGVITFKGRKGGYGNAVMIRHANGVETLYAHLSAFSQAEGNVRGGEVIGFVGSTGRSTGPHLHYEARINGQPVNPVSVALPTPELTQADKAAFAAQKQKADALLARLRGIPVTVSQSD

SEQ ID NO: 28710 - protein, 1071 aa, Neisseria meningitidis
MPKRTDLKSILIIGAGPIVIGQACEFDYSGAQACKALREEGYKVILVNSNPATIMTDPEMADVTYIEPIMWQTVEKIIAKERPDAILPTMGGQTALNCALDLARNGVLAKYNVELIGATEDAIDKAEDRGRFKEAMEKIGLSCPKSFVCHTMNEALAAQEQVGFPTLIRPSFTMGGSGGGIAYNKDEFLAICERGFDASPTHELLIEQSVLGWKEYEMEVVRDKNDNCIIICSIENFDPMGVHTGDSITVAPAQTLTDKEYQIMRNASLAVLREIGVNTGGSNVQFAVNPENGEMIVIEMNPRVSRSSALASKATGFPIAKVAAKLAVGFTLDELRNDITGGKTPASFEPSIDYVVTKIPRFAFEKFPAADDRLTTQMKSVGEVMAMGRTIQESFQKALRGLETGLCGFNPRSSDKAEIRRELANPGPERMLFVADAFRAGFTLEEIHEICAIDPWFLAQIEDLMKEEKAVSDGILSDLDFAALRRLKRKGFSDKRLAQLLNVSEKEVREHRYALKLHPVYKRVDTCAAEFATETAYLYSTYEEECESRPSDRKKVMILGSGPNRIGQGIEFDYCCVHAALALRESGFETIMVNCNPETVSTDFDTSDRLYFEPLTLEDVLEIVRTENPWGVIVHYGGQTPLKLANALVENGVNIIGTSADSIDAAEDRERFQKVLNDLGLRQPPNRIAHNEEEALVKAEEIGYPLVVRPSYVLGGRAMQIVHSAEELQKYMREAVQVSEDSPVLLDFFLNNAIEVDVDCVSDGKDVVIGGIMQHVEQAGIHSGDSGCSLPPYSLSEEIQDEIRRQTKAMAYALGVVGLMNVQFAVQDGVVFVLEVNPRASRTVPFVSKATGVPLAKVGARCMAGISLKEQGVEKEVVPDFYAVKEAVFPFIKFPGVDTILGPEMRSTGEVMGVGASFGEAYYKAQLGAGERLNPTGKIFLSVREEDKERVIKTAKNFQALGYGICATRGTAQYLTEHGLIVQTINKVPEGRPHIGDALKNGEIALVVNTVSSDPQSVSDSHIIRQSALQQRVPQYTTTAGGEAMSEGAKSRDHLGVYSVQELHGRLKNRN

SEQ ID NO: 28711 - protein, 316 aa, Neisseria meningitidis; identical to SEQ ID NO: 6611

SEQ ID NO: 28712 - protein, 2065 aa, Neisseria meningitidis
MNKGLHRIIFSKKHSTMVAVAETANSQGKGKQAGSSVSVSLKTSGDLCGKLKTTLKTLVCSLVSLSMVLPAHAQITTDKSAPKNQQVVILKTNTGAPLVNIQTPNGRGLSHNRYTQFDVDNKGAVLNNDRNNNPFLVKGSAQLILNEVRGTASKLNGIVTVGGQKADVIIANPNGITVNGGGFKNVGRGILTTGTPQIGKDGALTGFDVRQGTLTVGTSGWNDKGGADYTEVLARAVALQGKLQGKNLAVSTGAQKVDYASGEISAGTAAGTKPTVALDTAALGGMYADSITLIANEKGVGVKNAGTLEAAKQLIVTSSGRIENSGRIATTADGTEASPTYLSIETTEKGAAGTFISNGGRIESKGLLVIETGEDISLRNGAVVQNNGSRPATTVLNAGHNLVIESKTNVNNAKGSANLSAGGRTTINDATIQAGSSVYSSTKGDTELGENTRIIAENVTVLSNGSIGSAAVIEAKDTAHIEAGKPLSLETSNVASNIRLNNGSIKGGKQVVLMADDDIQAKASHLNASGNLYIHAGKDLDLNADKDLSTQSISLRADNTALISSNGNTLTAEKNLDIQAGSLSVRQSNLQSSGGNVQMSATKGNISLNQSWINASQNIDTAALQGNIISDGLTAVAEVGRVSLLANGNVDFNGLNTLIAEGDINAGSVGKGRLKMDNTDIYASAGDVKLVAGGQLDLGNGTVNGGHISLDSNKGSMVVQNVHLNARASLKVDADQTLTINNSKLNSDHNTQINTNHGHMTLNQLDAHSRRHMSISAQGKGKGKDSGQILQNDQQNSKSTLAADGVLSLNSSALQVLDNTTLRGGAINIKAGGGIIKRGHIDWETQDTATMRSAELKPLSGMMSIESGGDNPLTVEPGNRIVSAGDLAVNHNGTFQISARAGNNGNPSAQTASVSAKGNIGIVAGEVDIDAANIAAGKDLALVATKGNISLNSIRNTFSNYQLKTDKHNITQQLTDVEQELSKLTSDPKYRKAQDLSQMLRRKYKRRDKVFGDSEARLRGLRAKINAADEAWAERQSPVKALLERKQLLQQALLTVSQPGSGHENQGSTLSGQNIKLLAAGGIRIQGSKVAATQQANIQAAGFLPAPAAEELQEGRLQSAIDISGVLDTFEYGQQGSDKYGYAIFSRPSEISGKTGVTLSAPNANENSRISLSAANIEAENGKIKIQSYGDQSYYAGQGELYTFERRSYKTGKWYNRKHITEVKEHKNAKPDAVNLSASQGIDIKSGGSIDAYATAFDAPKGSINIEAGRKLTLYAVEELNYDKLDSQKRRRFLGISYSKAHDTTTQVMKTALPSRVVAESANLQSGWDTKLQGTQFETTLGGATIRAGVGEQARADAKIILEGIKSSIHTETVSSSKSTLWQKQAGRGSNIETLQLPSFTGPVAPVLSAPGGYIVDIPQGNLKTQIETLTKQPEYAYLKQLQVAKNINWNQVQLAYDKWDYKQEGLTEAGAAIIALAVTVVTSGAGTGAVLGLNGAAAAATDAAFASLASQASVSFINNKGNIGNTLKELGRSSTVKNLVVAAATAGVADKIGASALNNVSDKQWINNLTVNLANAGSAALINTAVNGGSLKDNLEANILAALVNTAHGEAASKIKQLDQHYIVHKIAHAIAGCAAAAANKGKCQDGAIGAAVGEIVGEALTNGKNPATLTAKEREQILAYSKLVAGTVSGVVGGDVNTAANAAKVAIENNLLSQEEYALREKLIKKAKGKGLLSLDWGSLTEQEARQFIYLIEKDRYSNQLLDRYQKNPSSLNNQEKNILAYFINQTSGGNTAWAASILKTPQSMGNLTIPSKDINNTLSKAYQTLSRYDSFDYKSAVAAQPALYLLNGPLGFSVKAATVAAGGYNIGQGAKAISNGEYLHGTVQVVNGTLMVAGSVSAQAAISAKPAPVTRYLSNDSAPALRQALTAESQRIRMKLPEEYRQIGNLAIAKIDVKGLPQRMEAFSSFQKGEHGFISLPETKIFKPISVDKYHNIASPPRGTLRNIDGEYKLLETIAQQLGNNRNVSGRIDLFTELKACQSCSNVILEFRNRYPNIQLNIFTGK

SEQ ID NO: 28713 - protein, 157 aa, Neisseria meningitidis
MEQKGFTLIEMMIVVAILGIISVIAIPSYQSYIEKGYQSQLYTEMVGINNISKQFILKNPLDDNQNIKSKLERFVSGYKMNPKIAEKYNVSVHFVNQEKPRAYSLVGVPKTGTGYTLSVWMNSVGDGYKCRDAASAQAHLETLSSDAGCEAFSNRKK

SEQ ID NO: 28714 - protein, 188 aa, Neisseria meningitidis; identical to SEQ ID NO: 2501

SEQ ID NO: 28715 - protein, 321 aa, Neisseria meningitidis; identical to SEQ ID NO: 7425

SEQ ID NO: 28716 - protein, 489 aa, Neisseria meningitidis; identical to SEQ ID NO: 7627

SEQ ID NO: 28717 - protein, 88 aa, Neisseria meningitidis; identical to SEQ ID NO: 1982

SEQ ID NO: 28718 - protein, 182 aa, Neisseria meningitidis; identical to SEQ ID NO: 14015

SEQ ID NO: 28719 - protein, 142 aa, Neisseria meningitidis; identical to SEQ ID NO: 5523

SEQ ID NO: 28720 - protein, 116 aa, Neisseria meningitidis; identical to SEQ ID NO: 5541

SEQ ID NO: 28721 - protein, 106 aa, Neisseria meningitidis; identical to SEQ ID NO: 18989

SEQ ID NO: 28722 - protein, 161 aa, Neisseria meningitidis
MDALHTIARNLTKKRQTVSCAESCTGGMLAAAFTSVAGSSQWFDQSFVTYSNKAKEDCLGVLPETLLEHGAVSRQTVYEMARGAKAVAQADYAVGISGIAGPGGGSESKPVGTVWFGFAFPGGSCEAMRRFDGNRESVRAQAVAFALERLAGLIENGGDAV

SEQ ID NO: 28723 - protein, 328 aa, Neisseria meningitidis
VSGAESYRHITVLLNEAVDALAVREDGVYVDGTFGRGGHSRLILSRLGDAGRLIVFDKDPQAIAVAEELARSDKRVGVVHGGFASFQTALDGLGIGKVDGALFDLGISSPQIDDGSRGFSFRFDAPLDMRMDTTRGMSAAEWIAVASEQDLHEVIKNYGEERFSRQIARAIVAQRAESPIDTTRKLAQIVAQNVRTRERGQDPATRTFQAIRIFINRELEEVGAVLPQVMCRLKEGGRLAVIAFHSLEDRIVKQFVKKYSQHAPLPRWAAVREADLPEPPLKIVGRALKPGEAEIAANPRARSAVLRVAERTAGPIPEQSQRKTSEWQ

SEQ ID NO: 28724 - protein, 394 aa, Neisseria meningitidis
MTEPTSRRRFLKTCTAAAGAGLLQACGTSATSVPPLPSSHSVVKARTVPLQTPRRQSSDGNLLRVVASSGFAEDTNRVNTALTRLYNVGFTVTNQQAGSRRFQRFAGTDTQRAADFQEVASGRVATPKVLMGLRGGYGAARILPHIDFASLGARMREHGTLFFGFSDVCAVQLALLAKGNMMSFAGPMAYSDFGKPAPGAFTMDAFIKGATQNRLTVDVPYIQRADVETEGILWGGNLSVLASLAGTPYMPDIDGGILFLEDVGEQPYRIERMLNTLYLSGILKKQRAIVFGNFRMEKIRDVYDPSYDFSAVANHVSRTAKIPVLTGFPFGHIADKITFPLGAHARIRMNGNGGYAVAFGGYPTLDASALTLDTLLPPPDLPIFPESGVADISE

SEQ ID NO: 28725 - protein, 67 aa, Neisseria meningitidis; identical to SEQ ID NO: 6237

SEQ ID NO: 28726 - protein, 375 aa, Neisseria meningitidis; identical to SEQ ID NO: 23766

SEQ ID NO: 28727 - protein, 61 aa, Neisseria meningitidis; identical to SEQ ID NO: 2615

SEQ ID NO: 28728 - protein, 114 aa, Neisseria meningitidis; identical to SEQ ID NO: 565

SEQ ID NO: 28729 - protein, 214 aa, Neisseria meningitidis; identical to SEQ ID NO: 909

SEQ ID NO: 28730 - protein, 480 aa, Neisseria meningitidis
VNYFPIFANLAGRPVLVVGGGSVAARKISLLLDAGAQVRVVANQLNAELSALAAENKILWLAEEFRAEHIRTVFLIIAASSDQALNRRVFQLAESCQKPVNVVDDRDYCSFIFPSIINRNPIQIAVSSSGSAPVLARLLREKLEALLPPSLGDMAEISGRWRDAVKAKLKSVTERRRFWEKQFNGRFAALVKNQQTAQAEQELAKQLEQNYQGGFVSLVGAGPGDAGLLTLKGLQEIQQADVVLYDALVSDGILSLVRRDAERIFVGKRARGGRTPQEDTNALMVRLAREGRRVVRLKGGDPFVFGRGGEELETLARHQIPFSVVPGITAAVGATAYAGIPLTHRDYAQSAVFVTGHRKADAPDIEWQTLARSHQTLVIYMGALKAALIAERLQQHGRSPDTPAAVISQGTLPAQKTATGTLANLAELAETAPNPALIVIGEVVGLHEKLAWFGENGEGENRVGQAYPALGGLNAGQRAA

SEQ ID NO: 28731 - protein, 150 aa, Neisseria meningitidis; identical to SEQ ID NO: 13725

SEQ ID NO: 28732 - protein, 94 aa, Neisseria meningitidis; identical to SEQ ID NO: 3728

SEQ ID NO: 28733 - protein, 117 aa, Neisseria meningitidis; identical to SEQ ID NO: 4861

SEQ ID NO: 28734 - protein, 41 aa, Neisseria meningitidis; identical to SEQ ID NO: 1263

SEQ ID NO: 28735 - protein, 423 aa, Neisseria meningitidis
MFQWLYDALWLLAPIWIRRYLDKRSGSAPAYRAHRDERFGKPYPNPVTGAVWIHAVSVGETRAAQPLIRELRQRFPDAPLLMTQMTPTGRETAQVLFPDAQCRYLPYDKKTWVRQFLREHRPMFGILMETEIWPNLMTECRKSGVPLFLANARLSEKSLNGYLKVRRLIRPAAASLTGCLAQTEADAARLAKLGAASVQVCGNTKYDLMPSEQMKTLAGQFEKRIGDRPVAVCGSTRVYRGEDEAEKLLAAWQQYRGDALLVVVPRHPEHFQTVFETAKRFGFKVQRRSDGLPVEPDTQVWIGDSMGELCAYYLCADVAFVGGSLVDSGCQNIIEPLSCGVPTIFGFSTYNFSEACRHALASGAAVQVESADAWREAVEKTLSSEEGGMQMQARADGFIAQHRGAGARIAEAVREAVCGHRGR

SEQ ID NO: 28736 - protein, 798 aa, Neisseria meningitidis; identical to SEQ ID NO: 6178

SEQ ID NO: 28737 - protein, 111 aa, Neisseria meningitidis; identical to SEQ ID NO: 14177

SEQ ID NO: 28738 - protein, 144 aa, Neisseria meningitidis
MNFALSVITFTLASFLPVPPAEAAVFTWKDGGGNSYSDVPKQLHPDQSQILNLRTRQTKPAIKPAQADAGKRTDGAAQENNPDTAEKNRQLEEEKKRIAETERQNKEENCRISKMNLKAVGNSNAKNKDDLIRKYNNAVNKYCR

SEQ ID NO: 28739 - protein, 175 aa, Neisseria meningitidis; identical to SEQ ID NO: 5

SEQ ID NO: 28740 - protein, 149 aa, Neisseria meningitidis; identical to SEQ ID NO: 628

SEQ ID NO: 28741 - protein, 214 aa, Neisseria meningitidis; identical to SEQ ID NO: 1743

SEQ ID NO: 28742 - protein, 658 aa, Neisseria meningitidis; identical to SEQ ID NO: 15447

SEQ ID NO: 28743 - protein, 283 aa, Neisseria meningitidis; identical to SEQ ID NO: 14636

SEQ ID NO: 28744 - protein, 130 aa, Neisseria meningitidis; identical to SEQ ID NO: 1661

SEQ ID NO: 28745 - protein, 261 aa, Neisseria meningitidis; identical to SEQ ID NO: 6798

SEQ ID NO: 28746 - protein, 611 aa, Neisseria meningitidis; identical to SEQ ID NO: 6640

SEQ ID NO: 28747 - protein, 255 aa, Neisseria meningitidis; identical to SEQ ID NO: 14826

SEQ ID NO: 28748 - protein, 525 aa, Neisseria meningitidis; identical to SEQ ID NO: 4048

SEQ ID NO: 28749 - protein, 126 aa, Neisseria meningitidis; identical to SEQ ID NO: 3142

SEQ ID NO: 28750 - protein, 71 aa, Neisseria meningitidis; identical to SEQ ID NO: 1238

SEQ ID NO: 28751 - protein, 184 aa, Neisseria meningitidis; identical to SEQ ID NO: 3342

SEQ ID NO: 28752 - protein, 252 aa, Neisseria meningitidis; identical to SEQ ID NO: 6509

SEQ ID NO: 28753 - protein, 252 aa, Neisseria meningitidis
MKITPVKALTDNYIWMIQHGNHAVCVDPSEPSPVLEFLVRNRLMLAQTWVTHPHPDHEGGAAALWRGYMESPVYGESDIEAATHTVTAGTQFTFGEGLITVWATPGHTDRHISYLMETSDGIHVFCGDTLFSAGCGRVFTGTVEQLYDSFQRFNQLPEGTLFYPAHEYTAANLRFAAHIEPDNADIQTALKAAEHTPTLPVTLAHERRVNPFLRVDLPHVRDRAEALSGKTLNSSLDTFVALRELKNQYRTK

SEQ ID NO: 28754 - protein, 213 aa, Neisseria meningitidis; identical to SEQ ID NO: 1951

SEQ ID NO: 28755 - protein, 163 aa, Neisseria meningitidis; identical to SEQ ID NO: 684

SEQ ID NO: 28756 - protein, 58 aa, Neisseria meningitidis; identical to SEQ ID NO: 2174

SEQ ID NO: 28757 - protein, 117 aa, Neisseria meningitidis; identical to SEQ ID NO: 302

SEQ ID NO: 28758 - protein, 119 aa, Neisseria meningitidis; identical to SEQ ID NO: 8399

SEQ ID NO: 28759 - protein, 218 aa, Neisseria meningitidis; identical to SEQ ID NO: 8119

SEQ ID NO: 28760 - protein, 206 aa, Neisseria meningitidis; identical to SEQ ID NO: 1164

SEQ ID NO: 28761 - protein, 453 aa, Neisseria meningitidis
MLKKWLNKMLPSGRSSKKAESKTIIPAERHNIRAEMLSFAAENVIRRLKGAGFQAYVVGGAVRDLLLGIEPKDFDVATDATPEQVHKLFRRSRIIGRRFQIVHVMNGAEIIEVTTFRGGAKVHQNAHGRIMKDNTYGSIEEDAMRRDFTCNALYYDPEKEEILDFHNGIADVAARRLVMIGDAAERYQEDPVRILRAIRLSGKLGFDLSEETTAPIAESICRLKHEPVARLFDEIMKLLFSGHARECLKRLNGFDIPDDIHPLLNALRVSDGIAGKMTVLALKNTDERLRADKSVSVGFVLAALMWPELERHWKSNLQQGLKPAPALSDAINTMRETVERGWGVPQRFSATMREIWMFQPQFENRKGARPHKLFAQARFRAAYDFLLLRAETGNADRALAEWWTAFQTASTEQRTEMTKNEAAARHEKNEGQAKKRRRRRRKPKPKVVGTDWE

SEQ ID NO: 28762 - protein, 361 aa, Neisseria meningitidis; identical to SEQ ID NO: 7621

SEQ ID NO: 28763 - protein, 149 aa, Neisseria meningitidis
MKKLLIAAMMAAALAACSQEAKQEVKEAVQAVESDVKDTAASAAESAASAVEEAKDQVKDAAADAKASAEEAVTEAKEAVTEAKEAVTEAKEAVTEAKEAVTEAKEAVTEAKEAVTEAKEAVTEAAKDTLNKAADATQEAADKMKDAAK

SEQ ID NO: 28764 - protein, 448 aa, Neisseria meningitidis; identical to SEQ ID NO: 5964

SEQ ID NO: 28765 - protein, 159 aa, Neisseria meningitidis; identical to SEQ ID NO: 4539

SEQ ID NO: 28766 - protein, 236 aa, Neisseria meningitidis
MLFEGLPCLAVWCKNRLSAVLPVGGLNVSENLLEIETHPFDPVLPSKAAVMMMGTFPPKEDKRAMQFHYPNFQNDMWRVYGLVFFGDADYFKVPSNGEAAHSEKAFDAEKIKTFLHERGIASCPTVLKAVRQHGNASDKFLKVVETVDLAAVLAKIPDCRHICTTGGKATEILLDIQGGGIKMPKTGETVPFPFAGRDLTLTRLPSTSRAYPLSLAKKAAAYRAFFEMAGLCEKQL

SEQ ID NO: 28767 - protein, 447 aa, Neisseria meningitidis; identical to SEQ ID NO: 2570

SEQ ID NO: 28768 - protein, 270 aa, Neisseria meningitidis; identical to SEQ ID NO: 12989

SEQ ID NO: 28769 - protein, 218 aa, Neisseria meningitidis; identical to SEQ ID NO: 19343

SEQ ID NO: 28770 - protein, 219 aa, Neisseria meningitidis
MDTWHDALGGEKQQPYFQEILNAVRQERLSGQIIYPPAADVFNAFRLTAFDRVKAVILGQDPYHGAGQAHGLAFSVRQGVRIPPSLLNIYKELETDIEGFSIPAHGCLTAWAEQGVLLLNTVLTVRAGQAHSHALLGWERFTDTVIRQLATHRKHLVFMLWGGYAQQKRKLIDSQNHLILTAPHPSPLSAYRGFFGCRHFSQANSYLSRHGIDPINWKL

SEQ ID NO: 28771 - protein, 916 aa, Neisseria meningitidis; identical to SEQ ID NO: 4091

SEQ ID NO: 28772 - protein, 545 aa, Neisseria meningitidis; identical to SEQ ID NO: 3410

SEQ ID NO: 28773 - protein, 366 aa, Neisseria meningitidis; identical to SEQ ID NO: 15531

SEQ ID NO: 28774 - protein, 138 aa, Neisseria meningitidis; identical to SEQ ID NO: 6327

SEQ ID NO: 28775 - protein, 328 aa, Neisseria meningitidis
MQYRIRRENEAPEAKNAGETLWERDIMREVLLSAYQDRRRERMWKNIWRAVSTLILVALIAGIFRKDEAALQLAGNTPHTAVVNLYGEIGNGVEDQVKKLKDGMEAAYKNPQAKAIVIRANSPGGSPVVSNTAFEEIRRLKAQHPGIPVYLVAEDMCASGCYYIAAAADKIYADPSSIVGSIGVIGSSFDATGLMEKIGVKRRVKIAGSNKGMGDPFSPETPEQSKIWEEMLTGIHGEFIKAVKTGRGSRLKFQQYPDVFSGRVYTGADALKVGLVDGLGNIYSVAQDVVKAPDVVDYTPKDDFGRILGRRFGAELKASVREALQAVR

SEQ ID NO: 28776 - protein, 436 aa, Neisseria meningitidis
MSVTVETLENLERKVVLSLPWSEINAETDKKLKQTQRRAKIDGFRPGKAPLKMIAQMYGASAQNDVINELVQRRFYDVAVAQELKVAGFPRFEGVEEQDDKESFKVAAIFEVFPEVVIGDLSAQEVEKVTASVGDAEVDQTVEILRKQRTRFNHVEREARNGDRVIIDFEGKIDGEPFAGGASKNYAFVLGASQMLPEFEAGVVGMKAGESKDVTVNFPEDYHGKDVAGKTAVFTITLNNVSEATLPEVDADFAKALGIADGDVAKMREEVQKNVSREVERRVNEQTKESVMNALLKAVELKAPVALVNEEAARLANEMKQNFVNQGMADAANLDLPLDMFKEQAERRVSLGLILAKLVDENKLEPTEEQIKAVVANFAESYEDPQEVIDWYYADPSRLQAPTSLAVESNVVDFVLGKAKVNEKALSFDEVMGAQA

SEQ ID NO: 28777 - protein, 90 aa, Neisseria meningitidis; identical to SEQ ID NO: 14294

SEQ ID NO: 28778 - protein, 150 aa, Neisseria meningitidis
MNIEVEMKVLDERMADFIPAYATAGSAGLDLRACLDEEVVLQPGETFLVPTGLAIYLADPSYAAVLLPRSGLGHKHGIVLGNLVGLIDSDYQGELKVSLWNRSSEPFTVKPFERIAQMVVVPIVQARFKRVEEFVGSSRGEGGFGSTGLH

SEQ ID NO: 28779 - protein, 178 aa, Neisseria meningitidis
MRYWKNSRIKMFEQEDEWISKTQMKKQMNDLQDLGMALTKLSNDTLKKIGLDADLYEAVTAYKKITSNGALKRQAQFIGRLMRDTDPAPIEAFLAKLRGDDAAHNAFLQRVEQARVRLLADDGALTQFMSDFPHADAGKLRTLVRNTKKEQEQNKPPKNFRALFQELKTVMENGDAEI

SEQ ID NO: 28780 - protein, 74 aa, Neisseria meningitidis; identical to SEQ ID NO: 2956

SEQ ID NO: 28781 - protein, 406 aa, Neisseria meningitidis
MTLFCEQVPYPRLAEAFGTPLYVYSQSALTEAFEHYQTAFAELSPLVCYAVKANGNLSIIKHFASLGSGFDIVSGGELVRVLAAGGDAAKTIFSGVGKSEAEIEFALNAGVKCFNMESIPEIDRIQKVAARLGKTAPVSLRINPDVDAKTHPYISTGLKANKFGIAYADALEAYRHAAQQPNLKIIGIDCHIGSQLTDLSPLIEACERILILVDALAAEGIVLEHLDLGGGVGIVYKDESVPDLGAYAQAVQKLIGTRRLKLILEPGRSLVGNAGSLLTRVEFVKHGEEKNFVMVDAAMNDLMRPALYDAYHHIEAVETKNISPLTANIVGPICETGDFLGKDRTIACEEGDLLLIRSAGAYGASMASNYNARNRAAEVLVDGNEYRLIRRRETLEQQMANELACL

SEQ ID NO: 28782 - protein, 622 aa, Neisseria meningitidis; identical to SEQ ID NO: 14089

SEQ ID NO: 28783 - protein, 498 aa, Neisseria meningitidis
MFSNYLLSLAIWIPIAAGVLVLATGKDSRAPLARVLAFMGALAGFLVTLPLFTGFDRLSGGYQFTEFHEWIPLLKINYALGVDGISVLFIILNAFITLLVVLAGWEVIQKRPAQYMAAFLMMSGLINGAFAAQDAILFYVFFEGMLIPLYLIIGVWGGPRRVYASVKLFLYTLMGSLLMLVAMVYLYYQTGSFSIVDFQNIKQIPLGVQQLLFAAFFLSFAVKVPMFPVHTWLPDAHVEAPTGGSMVLAAITLKLGAYGFLRFILPIMPDAARYFAPVIIVLSLIAVIYIGMVALVQTDMKKLVAYSSISHMGFVTLGMFLFVDGQLDDWALKGAIIQMISHGFVSAAMFMCIGVMYDRLHTRNIADYGGVVNVMPKFAAFMMLFGMANAGLPATSGFVGEFMVIMGAVKVNFWVGALAAMTLIYGASYTLWMYKRVIFGAIHNPHVAEMKDINCREFTILAVLAVAVLGMGLYPNAFIEVVHQAANDLIAQVAQSKM

SEQ ID NO: 28784 - protein, 244 aa, Neisseria meningitidis; identical to SEQ ID NO: 24529

SEQ ID NO: 28785 - protein, 230 aa, Neisseria meningitidis; identical to SEQ ID NO: 1269

SEQ ID NO: 28786 - protein, 418 aa, Neisseria meningitidis
MKVLVLGAGVAGVSSAWYLAEAGHEVTVIDRAEGVAMETSFANAGQLSYGYTTPWAAPGIPTKALKWLFKSHPPLLFRPDGSLYQIEWLWQMLQNCTAAHYQTNKERMVRISEYSREMFRRFEAQTGMNFEERKKGTLQIFRQTKEVEAAEQDIAVLERYGVPYRRLKPEECAEFEPALARVTAKIAGGLHLPADATGDCHLFTENLYKLCQEKGVQFHFNQTISRIDHNGLRIKAVETETGRFEADAVVCALGCFSRTVLAQLDLDLPIYPVKGYSLTLPVTNSDGAPVSTVLDESYKVAITRFDNRIRVGGMAELSGYEIKLPEKRRETLALVVNDLFPEGGDLSQASFWSGLRPMTPDSTPLIGRTRFDNLFLNTGHGTLGWTMSLGSAKLTADIVSGKDTEIRSDDLSLSRYQA

SEQ ID NO: 28787 - protein, 390 aa, Neisseria meningitidis
MATRGDEVKIQNGQEADSAKAKRKRRLTALTLLFALAAVAAGSAFFLWWQHEEETEDAYVAGRVVQVTPQKGGTVRKVLHDDTDAVKKGDVLAVLDDDNDVLAYERAKNELIQAVRQNRRQNAATSQAAAQVALRRADLARAQDDLRRRSALAESGAVSAEELAHARAAVSQAQAAVKAALAEESSARAALGGQVSLREQPAVQTAIGRLKDAWLNLQRTQIRAPADGQVAKRSVQVGQQVAAGAPLMAVVPLSDVWVDANFKETQLRHMKIGQPAELVSDLYGKQIVYRGRVAGFSAGTGSAFSLIPAQNATGNWIKVVQRVPVRIVLNREDVDRHPLRIGLSMTVKVDTSAAGAPVSKTPGAALPEIESTDWSEVDRTVDEILGQSAP

SEQ ID NO: 28788 - protein, 146 aa, Neisseria meningitidis; identical to SEQ ID NO: 660

SEQ ID NO: 28789 - protein, 280 aa, Neisseria meningitidis; identical to SEQ ID NO: 5980

SEQ ID NO: 28790 - protein, 362 aa, Neisseria meningitidis
MSDYTQQLQDKKDHLKTLFAGLDVPEWEVYESPDKHYRMRAEFRIWHEGGEMFYAMFEKGQKAGGASLIRCDRFDAASEAVNCLMPELIAVAAQSAELRNRWYAVEFLSTLSGEMLVTMIYHKRLDDEWMQAAQALQQQLDTSVIGRSRGQKIVLKQDYVTETLKVGNRDFRYRQIEGGFTQPNAAVCQKMLEWACGAAEGLDGDLLELYCGNGNFTLPLSEKFERVLATEISKTSVSAAQWNIEANRIGNIKIARLSAEEFTEAYTGKREFKRLKDGGIALTDYAFSTIFVDPPRAGIDEETLKLVSQFDNIIYISCNPETLRANLDTLAETHAVERAALFDQFPFTHHIESGVLLKKKIL

SEQ ID NO: 28791 - protein, 157 aa, Neisseria meningitidis; identical to SEQ ID NO: 140

SEQ ID NO: 28792 - protein, 133 aa, Neisseria meningitidis
MRKLNNHDVHKRYQDRLEEDVEFTINYELPLSCLWSTIKDFSSDFEEKTEAFFILFKELLRRGHLKLQRDGQIIGHTPEEWEQIFREVWPEYEIEPNPLPGYAPFDIGMWLTVEAPAYAVWIDPEDGSEYWAG

SEQ ID NO: 28793 - protein, 235 aa, Neisseria meningitidis; identical to SEQ ID NO: 1248

SEQ ID NO: 28794 - protein, 272 aa, Neisseria meningitidis
MNPAPKKPSLLFSSLLFSSLLFSSLLFSSAAQAASEDSGRSPYYVQADLAYAAERITHNYPEPTGANNTSTVSDYFRNIRAHSIHPRVSVGYDFGDWRIAADYASYRKWNNNKYSVNTKVLKENKGNRENLKTENQENGSFHASSSLGLSAIYDFKLNDKFDKFKPYIGARVAYGHVKHQVHSVETETTIYTTAPTKGAKVGGTIPNKAISKPPYHESHSTSSLGLGVIAGVGFDITPKLTLDTGYRYHNWGRLENTRFKTHEVSLGVRYHF

SEQ ID NO: 28795 - protein, 56 aa, Neisseria meningitidis; identical to SEQ ID NO: 2455

SEQ ID NO: 28796 - protein, 451 aa, Neisseria meningitidis; identical to SEQ ID NO: 14296

SEQ ID NO: 28797 - protein, 436 aa, Neisseria meningitidis
MTDLFAREPDAPLAERLRPHTLDDVVGQEHLIGEGKPLRVAVEGGKPHSMLLWGPPGVGKTTLARILAQSFNAQFLPVSAVFSGVKDIREAIDKAEIALQQGRATILFVDEVHRFNKAQQDAFLPHVESGLLTFIGATTENPSFEVNPALLSRAQVYVLQSLSSDDLKKLIAKVLALPEYQEFTIETDAQKLLVNTADGDARRLLNLLEQLLGAAETRRLKTLTAEFLADSLGAQIRRFDKGGESFYNQISALHKSVRGSHPNAALYWFCRMLDGGTDPRYLARRIVRIAWEDIGLADPRALQIANDAAATFERLGSPEGELALAQAVLYLAAAAKSNAGYKAYNQMRRFVKENASDEVPVHLRNAPTKLMKELGYGREYRYAHDEPNAYAAGESYMPDCLDEPDFYQPVPRGLEIKIGEKLEWLKSLDEEVLKAK

SEQ ID NO: 28798 - protein, 410 aa, Neisseria meningitidis; identical to SEQ ID NO: 14901

SEQ ID NO: 28799 - protein, 71 aa, Neisseria meningitidis; identical to SEQ ID NO: 23489

SEQ ID NO: 28800 - protein, 122 aa, Neisseria meningitidis; identical to SEQ ID NO: 66

SEQ ID NO: 28801 - protein, 291 aa, Neisseria meningitidis; identical to SEQ ID NO: 15551

SEQ ID NO: 28802 - protein, 231 aa, Neisseria meningitidis; identical to SEQ ID NO: 1993

SEQ ID NO: 28803 - protein, 301 aa, Neisseria meningitidis; identical to SEQ ID NO: 23890

SEQ ID NO: 28804 - protein, 264 aa, Neisseria meningitidis; identical to SEQ ID NO: 6162

SEQ ID NO: 28805 - protein, 170 aa, Neisseria meningitidis; identical to SEQ ID NO: 1571

SEQ ID NO: 28806 - protein, 138 aa, Neisseria meningitidis; identical to SEQ ID NO: 15462

SEQ ID NO: 28807 - protein, 146 aa, Neisseria meningitidis; identical to SEQ ID NO: 2658

SEQ ID NO: 28808 - protein, 544 aa, Neisseria meningitidis; identical to SEQ ID NO: 1000

SEQ ID NO: 28809 - protein, 556 aa, Neisseria meningitidis; identical to SEQ ID NO: 15389

SEQ ID NO: 28810 - protein, 178 aa, Neisseria meningitidis; identical to SEQ ID NO: 5654

SEQ ID NO: 28811 - protein, 130 aa, Neisseria meningitidis; identical to SEQ ID NO: 4345

SEQ ID NO: 28812 - protein, 125 aa, Neisseria meningitidis; identical to SEQ ID NO: 14258

SEQ ID NO: 28813 - protein, 144 aa, Neisseria meningitidis; identical to SEQ ID NO: 2515

SEQ ID NO: 28814 - protein, 225 aa, Neisseria meningitidis; identical to SEQ ID NO: 15175

SEQ ID NO: 28815 - protein, 702 aa, Neisseria meningitidis
MKISFHLALLPTLIIASFPVAAADTQDNGEHYTATLPTVSVVGQSDTSVLKGYINYDEAAVTRNGQLIKETPQTIDTLNIQKNKNYGTNDLSSILEGNAGIDAAYDMRGESIFLRGFQADASDIYRDGVRESGQVRRSTANIERVEILKGPSSVLYGRTNGGGVINMVSKYANFKQSRNIGAVYGSWANRSLNMDINEVLNKNVAIRLTGEVGRANSFRSGIDSKNVMVSPSITVKLDNGLKWTGQYTYDNVERTPDRSPTKSVYDRFGLPYRMGFAHRNDFVKDKLQVWRSDLEYAFNDKWRAQWQLAHRTAAQDFDHFYAGSENGNLIKRNYAWQTDNKTLSSNFTLNGDYTIGRFENHLTVGMDYSREHRNPTLGYNRDFSASINPYDRASWPASGRLQPVFTQNRHKADAYGIFVQNIFSATPDLKFVLGGRYDKYTFNSESKLTGSSRQYSGHSFSPNIGAVWNINPVHTLYASYNKGFAPYGGRGGYLSIDTSSSAVFNADPEYTRQYETGVKSSWLDDRLSTTLSAYQIERFNIRYRPDPKNNPYIYAVSGKHRSRGVELSAIGQIIPKKLYLRGSLGVMQAKVVEDKKNPDRVGIHLNNTSNVTGNLFFRYTPTENLYGEIGVTGTGKRYGYNSRNKEVTTLPGFARVDAILGWNHKNVNVTFAAANLFNQKYWRSDSMPGNPRGYTARVNYRF

SEQ ID NO: 28816 - protein, 145 aa, Neisseria meningitidis; identical to SEQ ID NO: 3684

SEQ ID NO: 28817 - protein, 445 aa, Neisseria meningitidis
MTFQNKKILVAGLGGTGISMIAYLRKNGAEVAAYDAELKPERVSQIGKMFDGLVFYTGRLKDALDNGFDILALSPGISERQPDIEAFKQNGGRVLGDIELLADIVNRRDDKVIAITGSNGKTTVTSLVGYLCIKCGLDTVIAGNIGTPVLEAEWQREGKKADVWVLELSSFQLENTESLRPTAATVLNISEDHLDRYDDLLDYAHTKAKIFRGDGVQVLNSDDVFCRAMKRAGREVKWFSLEHEADFWLERETGRLKQGNEDLIATQDIPLQGLHNAANVMAAVALCEAIGLSREALLEHVKTFQGLPHRVEKIGEKNGVVFIDDSKGTNVGATAAAIAGLQNPLFVILGGMGKGQDFTPLRDALVGKAKGVFLIGVDAPQIRRDLDGCGLNMTDCATLGEAVQTAYAQAEAGDIVLLSPACASFDMFKGYAHRSEVFIEAFKAL

SEQ ID NO: 28818 - protein, 428 aa, Neisseria meningitidis; identical to SEQ ID NO: 5940

SEQ ID NO: 28819 - protein, 274 aa, Neisseria meningitidis; identical to SEQ ID NO: 5218

SEQ ID NO: 28820 - protein, 291 aa, Neisseria meningitidis; identical to SEQ ID NO: 7133

SEQ ID NO: 28821 - protein, 252 aa, Neisseria meningitidis; identical to SEQ ID NO: 6230

SEQ ID NO: 28822 - protein, 476 aa, Neisseria meningitidis; identical to SEQ ID NO: 15752

SEQ ID NO: 28823 - protein, 741 aa, Neisseria meningitidis; identical to SEQ ID NO: 13915

SEQ ID NO: 28824 - protein, 511 aa, Neisseria meningitidis; identical to SEQ ID NO: 28499

SEQ ID NO: 28825 - protein, 244 aa, Neisseria meningitidis
MTTRQIILDTETTGLYADGGDRLVEFAGLEMVNRQMTDKNLHLYVHPERDMPEEAARVHGLTIEVLEGKNAPPFAEVGRQIADFLRGAELIIHNAKFDVGFLNMEFRRMGLPTVEELGCTVTDTLAMAREMFPGQKASLDALCNRFSVDRSKRVLHGALIDCELLGEVYLAMTRRQFDLMGEAEEEEPAAKPVASAEMKLGAKLKVIKADEAELAAHGQYLDGLGEACIWRKEAVPSENGGADA

SEQ ID NO: 28826 - protein, 264 aa, Neisseria meningitidis
MKAYLDLMRHVLDNGTDKSDRTGTGTRSVFGYQMRFDLGKGFPLLTTKKLHLRSIIHELLWFLKGDTNIKYLKDNNVSIWDEWADENGDLGPVYGYQWRSWPAPDGRHIDQIANVVEQIKKNPDSRRLIVSAWNPALVDEMALPPCHALFQFYVADGKLSCQLYQRSADIFLGVPFNIASYALLTMMMAQVCGLEAGEFIHTFGDAHLYRNHFEQAELQLEREPRTLPVMKINPEVKDLFSFKFEDFELEGYDPHPHIKAAVSV

SEQ ID NO: 28827 - protein, 175 aa, Neisseria meningitidis; identical to SEQ ID NO: 5147

SEQ ID NO: 28828 - protein, 366 aa, Neisseria meningitidis
MTRIAILGGGLSGRLTALQLAEQGYQIALFDKGCRRGEHAVAYVAAAMLAPAAEAVEATPEVIRLGRQSIPLWRGIRCRLNTHTMMQENGSLIVWHGQDKPLSSEFVRHLKRGGVADDEIVRWHADDIAEREPQLGGRFSDGIYLPTEGQLDGRQILSALADALDELNVPCHWEHECAPEDLQAQYDWLIDCRGYGAKTAWNASAEHGSTLRGIRGEVARVYTPEITLNRPVRLLHPRYPLYIAPKENHVFVIGATQIESESQAPASVRSGLELLSALYAVHPAFGEADILEIATGLRPTLNHHNPEIRYSRKRRLIEINGLFRHGFMISPAVTAAAVRLAVALFDGKDAPERDEESGLAYIRRQD

SEQ ID NO: 28829 - protein, 307 aa, Neisseria meningitidis
MPSEHPFSDGISTPNPKETMNDTAQITASYGRRYIVRTPDGTTYEASTRKKRVDFACGDRVRISPVNAEQVVIEDFLPRQSLLYRQDAWKTKLIAANVTQLLIVTAAVPSPSMRLLQRALLAAEAAGIRAVIVLNKADLPETALWREKLKFYETLGYPVIETRALENAGSLRPALQGHSNILLGQSGMGKSTLTNALLGSQTARTGDISAALDSGKHTTTHARLYDLNGETQLIDSPGLQEFGLHHLQAADLPRYFPDFRHLVGQCRFHNCTHRAEPGCAFKAAAQTGKIRTERLTFLQRITDDLLK

SEQ ID NO: 28830 - protein, 103 aa, Neisseria meningitidis; identical to SEQ ID NO: 1558

SEQ ID NO: 28831 - protein, 405 aa, Neisseria meningitidis; identical to SEQ ID NO: 15536

SEQ ID NO: 28832 - protein, 766 aa, Neisseria meningitidis; identical to SEQ ID NO: 6920

SEQ ID NO: 28833 - protein, 725 aa, Neisseria meningitidis; identical to SEQ ID NO: 15613

SEQ ID NO: 28834 - protein, 83 aa, Neisseria meningitidis
MASSNVNNEIKGKKLSLWAKRQAGSVKWFCGQPVTRNAKAANADDVAADDTNKIDTKHLPSTCRDASSAVCIETPPTAFYKNT

SEQ ID NO: 28835 - protein, 67 aa, Neisseria meningitidis; identical to SEQ ID NO: 1893

SEQ ID NO: 28836 - protein, 123 aa, Neisseria meningitidis; identical to SEQ ID NO: 4020

SEQ ID NO: 28837 - protein, 235 aa, Neisseria meningitidis
MNAAIEHVQAVAFDLDGTLCDSVPDLAAAAEAMLEQLGMKPLPAKVVESYVGDGIGKLVHRVLSNDRDREADSELWEKGFVSYMKYYRDHLSVFTRPYPETATGLALLKSLGIPLAVITNKNEILAVELLKQLGLADYFSLILGGDSLPEKKPSPLPLRHAAEVLGIDVANMVMVGDSRNDIIAAKAAGCLSVGVTFGYGDMTLLSQDDATRPDWIIGSLPEIYENLQPQKNKEE

SEQ ID NO: 28838 - protein, 404 aa, Neisseria meningitidis; identical to SEQ ID NO: 14773

SEQ ID NO: 28839 - protein, 328 aa, Neisseria meningitidis; identical to SEQ ID NO: 372

SEQ ID NO: 28840 - protein, 426 aa, Neisseria meningitidis
MKSLFIRLLLLGSAAGVFYHTQNQSLPAGELVYPSAPQIRDGGDALHYLNRIRAQIGLHKLAHAPVLENSARRHARYLTLNPEDGHGEHHPDNPHYTAQKLTERTRLAGYLYNGVHENISTEEEAAESSDSDIRTQQRQVDGLMSAIYHRLSLLDRHTDEAGAAFVRENGKTVLVFNQGNGRFERHCAQGRNQPEAGRKYYRNACHNGAVVYTDEAMPAQELLYTAYPVGSGALPYFHGERPDPVPEYEITGNPASIDFSEAAGKITMKSFKLYQGKNEIRPVRVLTAGNDPNGRLTAYQFALFPLKPLEYGTLYTAVFDYVRNGRRAQAKWQFRTRKPDYPYFEVNGGETLAVRKGEKYFIHWRGRWCLEACTRYTYRQRPGSRLSIGRHEAGGIVFSVGGMAGSSITLAPEDSPERGVTLYLQD

SEQ ID NO: 28841 - protein, 336 aa, Neisseria meningitidis; identical to SEQ ID NO: 15423

SEQ ID NO: 28842 - protein, 423 aa, Neisseria meningitidis; identical to SEQ ID NO: 18241

SEQ ID NO: 28843 - protein, 402 aa, Neisseria meningitidis; identical to SEQ ID NO: 2438

SEQ ID NO: 28844 - protein, 268 aa, Neisseria meningitidis; identical to SEQ ID NO: 8872

SEQ ID NO: 28845 - protein, 369 aa, Neisseria meningitidis
MFSDTDISMMENALRLAALGRFSTSPNPRVGCVIAHGSQIVGQGFHVKAGEPHAEVHALRQAGEMAQGATAFVTLEPCSHYGRTPPCAEALLRSGVTRVVAAMRDPNPPVAGKGFAMLEAAGIKTECGLLEHQARELNRGFLSRIERRRPFVRLKCAVSLDGKTALSDGSSFWITGEDARADVQVLRAESCAVLTGIGTVLADNPRLNVRAFPTLRQPARIVLDSRLRLPLDSHLLTDGQSPTYIATLERNEDRLHPYREHAHVRILMPSETADSKIDLHHLMRLLADEGFGEIMVEAGSELTSAFLAENLADEIVLYRSPKILGSGKDLFSLLENRAALSAPPLWTPVSSEILGHDIKTVFRKNGNAF

SEQ ID NO: 28846 - protein, 179 aa, Neisseria meningitidis; identical to SEQ ID NO: 4252

SEQ ID NO: 28847 - protein, 92 aa, Neisseria meningitidis; identical to SEQ ID NO: 32

SEQ ID NO: 28848 - protein, 122 aa, Neisseria meningitidis; identical to SEQ ID NO: 83

SEQ ID NO: 28849 - protein, 181 aa, Neisseria meningitidis
MSKIICLTAGHSNTDPGAVNGSDREADLAQDMRNIVASILRNDYGLTVRTDGEGKGNMPLRDAVKLIRGSDVAIEFHTNAAANKTATGIEALSTPKNKRWCQVLGKAVAKKTGWKLRGEDGFKPDNAGRHSRLAYAQAGGIVFEPFFISNDTDLALFKTTKWGICRAIADAIAMELGAAKV

SEQ ID NO: 28850 - protein, 172 aa, Neisseria meningitidis; identical to SEQ ID NO: 6617

SEQ ID NO: 28851 - protein, 208 aa, Neisseria meningitidis; identical to SEQ ID NO: 18194

SEQ ID NO: 28852 - protein, 119 aa, Neisseria meningitidis
MLSNIIPLSIGAALGATARWLLNLAVPASIPPATGNLFANWIGAFLIGIFAETVNHPQWKLLLITGFLGSLTTLSGFSLETVTLLQSNRPASALSNIFLHTAGSLLLTWLGLKIGAAVK

SEQ ID NO: 28853 - protein, 354 aa, Neisseria meningitidis; identical to SEQ ID NO: 6299

SEQ ID NO: 28854 - protein, 165 aa, Neisseria meningitidis; identical to SEQ ID NO: 14199

SEQ ID NO: 28855 - protein, 158 aa, Neisseria meningitidis
MPIEIERRFLIGNDNWRQYADEPLLLRQGYLSVEKERTVRVRIAGQRAWLTLKGYISELSRSEFEYEIPLADAEKMMETMCPFKMEKWRYPVRWGGSLFEIDVFLGDNAPLVVAEIELPDENADFDRPDWLGREITADGMFTNAYLSRHPFSSWKNAV

SEQ ID NO: 28856 - protein, 518 aa, Neisseria meningitidis
MDFSWLAEPHTWIGFATLLVLEVVLGIDNLVFVAILANKVQPARRDRARIIGLGLAVVIRIIMLAFMAHIITLTEPLFQIGGLAVSGKDMIMLAGGIFLLYKATTELHERLEGHNRFTVADNQKKHAPFWGVVAQILILDAVFSIDSVITAVAMVDHIVVAMGAVVVAMAVMISASKLLTEFVDRHPTVVMLCLGFLLMIGFSLIAEAFHFHIPKGYLYAAIGFSILIELFNQISQRNSRKNDYIGSSWRKRTAENVLGMMGIRESVLADAGGESGDDAHFEENEKSMIRSVLTLAERPIMGVMIPRRDIERLDISQSREEQCAQLQNTPYSRLLVVGKAGVDEPLGYINKKDLLSQLLETGGLDIQTALRQPLVLPDSTTALGAIELFRQSSADYALVVDEFGAVLGMVTMKDLLETIAGEFPEEFEREEEPAVQGNPDESLTVEGALEYVELASQLNLPQQEEDADFHTVAGLIMEELQTIPDVGDFADFHGWRFEVVEKEGQRIERVKITKLPEE

SEQ ID NO: 28857 - protein, 248 aa, Neisseria meningitidis; identical to SEQ ID NO: 3755

SEQ ID NO: 28858 - protein, 108 aa, Neisseria meningitidis
MKQTVKWLAAALIALGLNQAVWADDVSDFRENLQAAEQGNAAAQYNLGAMYYKGQGVRRDDAEAVRWYRQAAEQGLAQAQNNLGVMYAERRGVRQDRALAQEWLGKAC

SEQ ID NO: 28859 - protein, 161 aa, Neisseria meningitidis; identical to SEQ ID NO: 6695

SEQ ID NO: 28860 - protein, 417 aa, Neisseria meningitidis; identical to SEQ ID NO: 22188

SEQ ID NO: 28861 - protein, 644 aa, Neisseria meningitidis; identical to SEQ ID NO: 778

SEQ ID NO: 28862 - protein, 420 aa, Neisseria meningitidis
MSNTQKQLALAKAAKKSVNTADTEEKNRALLAMADSLEAAAADILAANRQDLEAAAGNIPESMTDRLLLDGKRICAMADGIRAVTALPDPVGEILETSTLPNGLEIVKKRVAMGVIGIIYESRPNVTSDAAALALKSGSAVVLRSGKDAFQSARAIVAALKTGLAQTRIDPDALQLIEDTGRESSYEMMRAKDYLDLLIPRGGAGLIRAVVENAVVPVIETGTGIVHIYIDKDADWDKALRIVYNAKTSRPSVCNSMEVLLVHEDIAADFLPKLERLLVRNRIEAGLPPVRFRLDPQAARHIGGEAAGADNFDTEFLDYILAVKTVASVEEAVGHIETHGTHHSDGIVTENRHAADYFTTHIDSAAVYVNASTRFTDGGEFGLGCEMGISTQKLHARGPMGLKELTSYKYIVQGTGQVRE

SEQ ID NO: 28863 - protein, 209 aa, Neisseria meningitidis; identical to SEQ ID NO: 4591

SEQ ID NO: 28864 - protein, 287 aa, Neisseria meningitidis; identical to SEQ ID NO: 23547

SEQ ID NO: 28865 - protein, 227 aa, Neisseria meningitidis; identical to SEQ ID NO: 2059

SEQ ID NO: 28866 - protein, 389 aa, Neisseria meningitidis
MTAHKILPVLLSIILGVSHATAASPAPNKPAVHAAPTFQTPETLTAAHIVIDLQSRQTLSAKNINTPVEPAALTQLMTAYLVFKNMKSGNIQSEENLKIPESAWASEGSRMFVRPGDTVSTDKLLKGMIALSANDAALTLAGRLGNGSIENFVQQMNKEARRLGMKNTVFKNPTGLSREGQVSTAKDLAQLSEALMRDFPEYYPLFSIKSFKFKNIEQNNRNILLYRDNNVNGLKAGHTESGGYNLAVSYSGNGRHILVITLGSESAETRASDNSKLLNWALQAFDTPKIYPKGKTVAQIQISGGSKKTVRAGFLKEAYITLPHKEAKMAEQILETIQPIPAPVKKGQILGKIKIRQNGYTIAEKEIVALENVKKRSRWQRLWACLTGQ

SEQ ID NO: 28867 - protein, 172 aa, Neisseria meningitidis; identical to SEQ ID NO: 1639

SEQ ID NO: 28868 - protein, 389 aa, Neisseria meningitidis; identical to SEQ ID NO: 19971

SEQ ID NO: 28869 - protein, 102 aa, Neisseria meningitidis; identical to SEQ ID NO: 14592

SEQ ID NO: 28870 - protein, 612 aa, Neisseria meningitidis
MCGIVGAIRAHHNVVDFLTDGLKRLEYRGYDSSGIAVNTDGKIKRVRRVGRVQLMEDAAREKGISGGIGIGHTRWATHGGVTEPNAHPHISGGMIAVVHNGIIENFESERKRLEGLGYRFESQTDTEVIAHSINHEYAQNGGRLFEAVQEAVKRFHGAYAIAVIAQDKPDELVVARMGCPLLVALGDDETFIASDVSAVIAFTRRVAYLEDGDIALLASDGIKRLTDKNGLPAERKVKVSELSLASLELGPYSHFMQKEIHEQPRAIADTAEVFLDGGFIPENFGKNAKSVFESIRSVKILACGTSYYAALTAKYWLESIAKIPADVEIASEYRYRSVIADPDQLVITISQSGETLDTMEALKYAKSLGHRHSLSICNVMESALPRESSLVLYTRAGAEIGVASTKAFTTQLVALFGLAVTLAKVRGLVSEEDEARYTEELRQLPGSVQHALNLEPQIAAWAQQFAKKTSALFLGRGIHYPIALEGALKLKEITYIHAEAYPAGELKHGPLALVDENMPVVVIAPNDSLLDKVKANMQEVGVRGGKLFVFADLDSNFNATEGVHVIRAPRHVGELSPVVHTIPVQLLAYHTALARGTDVDKPRNLAKSVTVE

SEQ ID NO: 28871 - protein, 296 aa, Neisseria meningitidis
LAADRTIPEPSKNPLPPRPPRPSRLPAVVHVQSRPARTMAQPLRSRTRTQPHHPHRFQPVLPFRTEHPLQHLMPLPQLAGARRHPVRIAQTDQPTTDRKRPKSRESIRRRRRHHYSDRRQQTASGHRSRRRTNQRPNHTEGQRCPLDKEKRPLQTRLQTTYPYRCGRLYRETAHYPRQCPVQTPVAVVGRSAQRYDRLCRRLRQCGKPATSGRASVVGRHYAQSLPQPSAGGNANQTPIFVEAPLCGRTKLRYAAPIPLRSGSLFRTDSECAKPPEGDVFEPVESGQQAKCARCRL

SEQ ID NO: 28872 - protein, 388 aa, Neisseria meningitidis; identical to SEQ ID NO: 22125

SEQ ID NO: 28873 - protein, 43 aa, Neisseria meningitidis; identical to SEQ ID NO: 9163

SEQ ID NO: 28874 - protein, 105 aa, Neisseria meningitidis
MQKRIDEIQSKYREWCHLLPQLEEDIRRWKYVVTLIRDMDNFYTHEYQACHQAIEDGVELDLSTEGEYSIMSEDALWNALGEFHQLAWLYLRSSIDALDKYTQED

SEQ ID NO: 28875 - protein, 864 aa, Neisseria meningitidis; identical to SEQ ID NO: 22949

SEQ ID NO: 28876 - protein, 66 aa, Neisseria meningitidis; identical to SEQ ID NO: 587

SEQ ID NO: 28877 - protein, 506 aa, Neisseria meningitidis; identical to SEQ ID NO: 15579

SEQ ID NO: 28878 - protein, 206 aa, Neisseria meningitidis; identical to SEQ ID NO: 22197

SEQ ID NO: 28879 - protein, 210 aa, Neisseria meningitidis; identical to SEQ ID NO: 5679

SEQ ID NO: 28880 - protein, 307 aa, Neisseria meningitidis; identical to SEQ ID NO: 2891

SEQ ID NO: 28881 - protein, 281 aa, Neisseria meningitidis; identical to SEQ ID NO: 11711

SEQ ID NO: 28882 - protein, 220 aa, Neisseria meningitidis; identical to SEQ ID NO: 5269

SEQ ID NO: 28883 - protein, 96 aa, Neisseria meningitidis; identical to SEQ ID NO: 6081

SEQ ID NO: 28884 - protein, 1296 aa, Neisseria meningitidis; identical to SEQ ID NO: 14827

SEQ ID NO: 28885 - protein, 322 aa, Neisseria meningitidis
MKLTLALPSLNLDEDEIRIPLCLPAFNKILQYGSLHRQSCTASAFYARYLWCGRLAERAAQSLNMPSETVALATPVWQKMGMHQANVLTAEYLDVGTDEAERLCRDLSAFYGDIPWRFVPVLPELWLVSLPRAYRWGAKPVLDLGGLLGADDQPDGEDALEWLRVQTEIQMWLAAHPVNHNRKKRGLPELNGLWLWGGTNGGTQGGTLFADTVWSRFHPDRRALPDNFRAYEETAAHLPDTHHILFMDDLRLTALTGDRERYASVLQQWEEHWFAPIYEAVRTGKIKRLDITTDGQHGGTLTFKPADRWKFWRGAKTFDGIW

SEQ ID NO: 28886 - protein, 160 aa, Neisseria meningitidis
MTNIRIGQGYDVHQLIEGRKLILGGVEIPFEKGLLGHSDADALLHAVTDALLGAAGLGDIGSHFPDTAAEFKDADSRVLLRAAYQSVQAQGWQAVNVDTTVIAQKPKLAPHIPQMRANIAADLGIDISCVNIKGKTNEKLGYLGRMEGIEAQAAVLLVRI

SEQ ID NO: 28887 - protein, 154 aa, Neisseria meningitidis; identical to SEQ ID NO: 15052

SEQ ID NO: 28888 - protein, 671 aa, Neisseria meningitidis
MSKSRRSPPLLSRPWFAFFSSMRFAVALLSLLGIASVIGTVLQQNQPQTDYLVKFGPFWAQIFGFLGLYDVYASAWFVVIMMFLVVSTSLCLIRNVPPFWREMKSFREKVKEKSLAAMRHSSLLDVKIAPEVAKRYLEVQGFQGKTINREDGSVLIAAKKGTMNKWGYIFAHVALIVICLGGLIDSNLLLKLGMLTGRIVPDNQAVYAKDFKPESILSASNLSFRGNVNISEGQSADVVFLNADNGILVQDLPFEVKLKKFHIDFYNTGMPRDFASDIEVTDKATGEKLERTIRVNHPLTLHGITIYQASFADGGSDLTFKAWNLGDASREPVVLKATSIHQFPLEIGKHKYRLEFDQFTSMNVEDMSEGAEREKSLKSTLNDVRAVTQEGKKYTNIGPSIVYRIRDAAGQAVEYKNYMLPVLQEQDYFWITGTRSGLQQQYRWLRIPLDKQLKADTFMALREFLKDGEGRKRLVADATKGAPAEIREQFMLAAENTLNIFAQKGYLGLDEFITSNIPKEQQDKMQGYFYEMLYGVMNAALDETIRRYGLPEWQQDEARNRFLLHSMDAYTGLTEYPAPMLLQLDGFSEVRSSGLQMTRSPGALLVYLGSVLLVLGTVLMFYVREKRAWVLFSDGKIRFAMSSARSERDLQKEFPKHVESLQRLGKDLNHD

SEQ ID NO: 28889 - protein, 437 aa, Neisseria meningitidis; identical to SEQ ID NO: 1149

SEQ ID NO: 28890 - protein, 292 aa, Neisseria meningitidis; identical to SEQ ID NO: 3715

SEQ ID NO: 28891 - protein, 242 aa, Neisseria meningitidis; identical to SEQ ID NO: 15535

SEQ ID NO: 28892 - protein, 299 aa, Neisseria meningitidis
MKTNSEELTVFVQVVESGSFSRAAEQLAMANSAVSRIVKRLEEKLGVNLLNRTTRQLSLTEEGAQYFRRAQRILQEMAAAETEMLAVHEIPQGVLRVDSAMPMVLHLLAPLATKFNERYPHIRLSLVSSEGYINLIERKVDIALRAGELDDSGLRARHLFDSRFRVIASPEYLAKHGTPQSTEELAGHQCLGFTEPGSLNTWAVLDAQGNPYKISPHFTASSGEILRSLCLSGCGIACLSDFLVDNDIAEGKLIPLLAEQTSNKTHPFNAVYYSDKAVNLRLRVFLDFLVEELGNNLCG

SEQ ID NO: 28893 - protein, 227 aa, Neisseria meningitidis; identical to SEQ ID NO: 15115

SEQ ID NO: 28894 - protein, 123 aa, Neisseria meningitidis
LVEGQKSAVTEYYLNHGEWPANNSSAGVASVSTDIKGKYVQSVTVANGVITAQMASSGVNKEIQGKKLSLWAKRQNGSVKWFCGQPVTRADNAKDDGVTADAAAKKIDTKHLPSTCRDASSAS

SEQ ID NO: 28895 - protein, 334 aa, Neisseria meningitidis
MQRQIKLKNWLQTVYPERDFDLTFAAADADFRRYFRATFSDGSSVVCMDAPPDKMSVAPYLKVQKLFDMVNVPQVLHADTDLGFVVLNDFGNTTFLTAMLQEQGETAHKALLLEAIGELVELQKASREGVLPEYDRETMLREINLFPEWFVAKELGRELTFKQRQLWQQTVDTLLPPLLAQPKVYVHRDFIVRNLMLTRGRPGVLDFQDALYGPISYDLVSLLRDAFIEWEEEFVLDLVIRYWEKARAAGLPVPEAFDEFYRWFEWMGVQRHLKVAGIFARLYYRDGKDKYRPEIPRFLNYLRRVSRRYAELAPLYALLVELVGDEELETGFTF

SEQ ID NO: 28896 - protein, 481 aa, Neisseria meningitidis; identical to SEQ ID NO: 15075

SEQ ID NO: 28897 - protein, 150 aa, Neisseria meningitidis; identical to SEQ ID NO: 7624

SEQ ID NO: 28898 - protein, 321 aa, Neisseria meningitidis; identical to SEQ ID NO: 2168

SEQ ID NO: 28899 - protein, 310 aa, Neisseria meningitidis; identical to SEQ ID NO: 25531

SEQ ID NO: 28900 - protein, 544 aa, Neisseria meningitidis
MIKPNLRPKLGSSALIAFLSLYSSLVLNYAFFAKVVELHPFNGTGADIFLYTMPVVLFFLSNFVFHVIALPFVHKVLIPLILVISAAVSYQEIFFNIYFNKSMLNNVLQTTAAESARLITPGYVLWIVCLGVLPALAYIAVKVKYRVWYKEFLTRLVLAAVSFLCALGIAMLQYQDYASFFRNNKSVTHLIVPSNFIGAGVSKYKDWKRSNIPYTQLDMAVVQNRPAGSLRRFVVLVVGETTRAANWGLNGYSRQTTPLLAARGDEIVNFPQVRSCGTSTAHSLPCMFSTFDRTDYDEIKAEHQDNLLDIVQRAGVEVTWLENDSGCKGVCGKVPNTDVTSLNLPEYCRNGECLDNILLTKFDEVLNKNDKDAVLILHTIGSHGPTYYERYTEAERKFTPTCDTNEINKCTRATLVNTYDNTVLYVDQFIDKVIRKLENRDDLESAVHYVSDHGESLGENGMYLHAAPYAIAPSGQTHIPMVMWFSKAFRQHGGIDFQCLKQKAAENEYSHDHYFSTVLGLMDISNSQTYRKEMDILAACRRPR

SEQ ID NO: 28901 - protein, 436 aa, Neisseria meningitidis; identical to SEQ ID NO: 3415

SEQ ID NO: 28902 - protein, 169 aa, Neisseria meningitidis
MTDTQNRVAMGYIKGVFGIKGWLKIAANTEYSDSLLDYPEWHLVKDGKTISVTLEAGKVVNSELQVKFEGINDRDLAFSLRGYTIEIPREAFAPTEEDEYYWTDLVGMTVVNKDHTVLGKVSNLMETGANDVLMIDGEHGQILIPFVSQYIETVDTGSKTITADWGLDY

SEQ ID NO: 28903 - protein, 343 aa, Neisseria meningitidis; identical to SEQ ID NO: 14146

SEQ ID NO: 28904 - protein, 416 aa, Neisseria meningitidis; identical to SEQ ID NO: 15444

SEQ ID NO: 28905 - protein, 199 aa, Neisseria meningitidis; identical to SEQ ID NO: 2043

SEQ ID NO: 28906 - protein, 321 aa, Neisseria meningitidis; identical to SEQ ID NO: 17072

SEQ ID NO: 28907 - protein, 558 aa, Neisseria meningitidis; identical to SEQ ID NO: 14733

SEQ ID NO: 28908 - protein, 402 aa, Neisseria meningitidis
MTGIIHSLLDTDLYKFTMLQVVLHQFPQTHSLYEFRCRNASTVYPLADIKEDLEVELDALCRLRFTHDELGYLRSLRFIKSDFVDYLELFQLQRRFVEVGTDDKGRLNIRIEGPMIQAMFFEIFILAIVNELYFRHLETPAVIEEGERRLQAKAARLKEIAAAQNPDEPPFLISDFGTRRRYKLAWQEHVIRTLLEAAPSIVRGTSNVFLAKKLGITPIGTMAHEFLQAFQALDVRLRNFQKAALESWVHEYRGDLGVALTDVVGMDAFLRDFDLYFAKLFDGLRHDSGDPYVWGDKAYAHYQKLKIDSRTKMLTFSDGLDIERSWALHQYFKDRFKTGFGIGTNLTNDMGHTPLNIVLKLVECNGQSVAKLSDSPGKTMTNNSTFLAYLRQVFDVPEPETP

SEQ ID NO: 28909 - protein, 470 aa, Neisseria meningitidis; identical to SEQ ID NO: 22195

SEQ ID NO: 28910 - protein, 375 aa, Neisseria meningitidis; identical to SEQ ID NO: 18254

SEQ ID NO: 28911 - protein, 456 aa, Neisseria meningitidis
MPQNTLNIVILAAGKGTRMYSKMPKVLHCIGGKPMLGRVIDTAAALNPQNICVVVGHGKEQVLDTVKRDILWVEQTEQLGTGHAVKTALPHLSAEGRTLVLYGDVPLIDVETLKTLLEAAGNEVGLLTDVPADPTGLGRIIRDSNGSVTAIVEEKDADTAQKAVKETNTGILVLPNAKLENWLNSLSSNNAQGEYYLTDLIAKAVADGIKVHPVRVRASHLAAGVNNKRQLAELERIFQTGQAQELLKAGVTLRDPARFDLRGRLKHGQDVVIDVNCIFEGEVEIGDNVEIGANCVIKNAKIGANSKIAPFSHLEDCEVGENNRIGPYARLRPQARLADDVHVGNFVEIKNAAIGKGTKANHLTYIGDAEVGSKTNFGAGTIIANYDGVHKHKTVIGDEVRIGSNCVLVAPVTLGNKVTTGAGSTITRNIEDNKLALARARQTVIEGWVRPEKDKQ

SEQ ID NO: 28912 - protein, 296 aa, Neisseria meningitidis
MFPVFHLSGESRRRMLQTALRFPYVFKARAEDSHKGTFGTLAVVGGSAGMSGAPVLAASAAMYLGCGKVWAGFNQDALPFAVIAVFPEIMLDTADGLTKRQDINAWVVGCGLGTGRAEVGTLAGILAEHTDKPVLLDADALNILSTDAETRNLARGCKNLILTPHPAEAARLLGTTVAQVQADRTAAVRKIGAIFGATVVLKGHKTLVAASDTEIYVNESGNAGLATAGSGDVLGGIIGSLLAQGVPVFEAACAGVWLHGAAADVIKESAGIAAGLLAGEIAPAARWLRNWITESM

SEQ ID NO: 28913 - protein, 201 aa, Neisseria meningitidis; identical to SEQ ID NO: 13953

SEQ ID NO: 28914 - protein, 419 aa, Neisseria meningitidis
MKQTVLKNNLQNLLESAENILLLQGPVGDFFLRLADWLTENGKTVHKFNFNAGDDYFYPPTQAHTVVFNDNYDAFPEFLQEYIVQHHIQAVVCFGDTRPYHVIAKRIANENQASFWAFEEGYFRPYYITLEKDGVNAFSPLPRRADFFLEQFPKLAQQEYKAPTPVHGGFTPMAKNAIRYYIELFRNPRKYPDYIHHRAPNAGHYLKPWSLSILKRLNYYIEDIQIAKRVEAGKYGKFFIVPLQVFNDSQVRIHCDFPSVRSFLLHVLSSFAEHAPADTNIIIKHHPMDRGFIDYWRDIKRFIKEHPELKGRVIYVHDVPLPVFLRHGLGMVTINSTSGLSGLIHNMPVKVLGRAYYDIPGITDQNTLAEFWNHPTPPDKELFHAYRMYHLNVTQINGNFYSQVFFPNKKTSNSSTPVI

SEQ ID NO: 28915 - protein, 321 aa, Neisseria meningitidis; identical to SEQ ID NO: 2168

SEQ ID NO: 28916 - protein, 96 aa, Neisseria meningitidis
MLCLAVFALGLATPAVAADWVQVGIDSDNNTTFGDADSRTDDRAWFEIRYAKPEKIGDGKFYNKIKKLEEMDCSGKRSRTLTATGYFESGNSRACP

SEQ ID NO: 28917 - protein, 188 aa, Neisseria meningitidis; identical to SEQ ID NO: 14756

SEQ ID NO: 28918 - protein, 311 aa, Neisseria meningitidis; identical to SEQ ID NO: 25402

SEQ ID NO: 28919 - protein, 133 aa, Neisseria meningitidis
MPITPPLNIISPKLYPNEQWNESEALGAITWLWYQSPTHRQVPIVEMMTYILPVLKNGQFALFCKGTQPIGYISWAYFDEVAQAHYLESDRHLRDNSDWNCGDNIWLIQWFAPLGHSHQMRSAVRQLFPRACP

SEQ ID NO: 28920 - protein, 74 aa, Neisseria meningitidis; identical to SEQ ID NO: 15629

SEQ ID NO: 28921 - protein, 60 aa, Neisseria meningitidis; identical to SEQ ID NO: 3237

SEQ ID NO: 28922 - protein, 367 aa, Neisseria meningitidis; identical to SEQ ID NO: 14158

SEQ ID NO: 28923 - protein, 52 aa, Neisseria meningitidis; identical to SEQ ID NO: 7703

SEQ ID NO: 28924 - protein, 498 aa, Neisseria meningitidis
MKLSIQKFMMLFAAAISLLQIPISHANGLDARLRDDMQAKHYEPGGKYHLFGNARGSVKNRVYAVQTFDATAVGPILPITHERTGFEGVIGYETHFSGHGHEVHSPFDNHDSRSTSDFSGGVDGGFTVYQLHRTGSEIHPEDGYDGPQGSDYPPPGGARDIYSYYVKGTSTKTKINTVPQAPFSDRWLKENAGAASGFLSRADEAGKLIWENDPNQNWWGNRMDDIRGIIQGAANPFLTGFQGLGVGAITDSAVNPVTYAAARKTLQGIHNLGNLSPEAQLAAATALQDSAFAVKDSINSARQWADAHPNITATAQTALSVAEAAGTVWGGKKVELNPTKWDWVKNTDYKTPAARPMQTLDGEMAGGNKPPKSITSGGKANAATYPQLVNQLTGQNLKNIAAQDPRLSLALHKSEKNFPIGTATYEEADRLGKIWVGEGARQTSGGGWLSIDGTRQYRPPTEKNSQFATTGIQANFETYTIDSNGKRNKIKNGHLNIR

SEQ ID NO: 28925 - protein, 57 aa, Neisseria meningitidis; identical to SEQ ID NO: 2122

SEQ ID NO: 28926 - protein, 336 aa, Neisseria meningitidis; identical to SEQ ID NO: 23763

SEQ ID NO: 28927 - protein, 105 aa, Neisseria meningitidis; identical to SEQ ID NO: 5128

SEQ ID NO: 28928 - protein, 331 aa, Neisseria meningitidis; identical to SEQ ID NO: 12175

SEQ ID NO: 28929 - protein, 197 aa, Neisseria meningitidis; identical to SEQ ID NO: 14688

SEQ ID NO: 28930 - protein, 182 aa, Neisseria meningitidis; identical to SEQ ID NO: 14728

SEQ ID NO: 28931 - protein, 178 aa, Neisseria meningitidis; identical to SEQ ID NO: 6466

SEQ ID NO: 28932 - protein, 310 aa, Neisseria meningitidis
MYEIKQPFHSGYLQVSEIHQIYWEESGNPDGVPVIFLHGGPGAGASPECRGFFNPDVFRIVIIDQRGCGRSRPYACAEDNTTWDLVADIEKVREMLGIGKWLVFGGSWGSTLSLAYAQTHPERVKGLVLRGIFLCRPSETVWLNEAGGVSRIYPEQWQKFVAPIAENRRNRLIEAYHGLLFHQDEEVCLSAAKAWADWESYLIRFEPEEVDEDAYASLAIARLENHYFVNGGWLQGDRAILNNIGKIRHIPTIIVQGRYDLCTPMQSAWALSKAFPEAELRVVQAGHRAFDPPLADALVQAVEDILPHLL

SEQ ID NO: 28933 - protein, 199 aa, Neisseria meningitidis; identical to SEQ ID NO: 4318

SEQ ID NO: 28934 - protein, 301 aa, Neisseria meningitidis; identical to SEQ ID NO: 2409

SEQ ID NO: 28935 - protein, 416 aa, Neisseria meningitidis; identical to SEQ ID NO: 22205

SEQ ID NO: 28936 - protein, 151 aa, Neisseria meningitidis; identical to SEQ ID NO: 1838

SEQ ID NO: 28937 - protein, 690 aa, Neisseria meningitidis
MNNPLVNQAAMVLPVFLLSACLGGGGSFDLDSVDTEAPRPAPKYQDVSSETPQAQKDQGGYGFAMRFKRRNWHPKNKEDHKALSEADWEKLGAGKPDEFPQKNEISAMDKGTLNESITPGDGKSRAEGYTDFQYVRSGYIYRNGVNKIDYQNNIALSGPDGYLFYKGSNPSQALPTGKAIYKGTWDYVTDAKEKQKFPQLGSFQAGDRYGALSAEEEDVLRNKSEAKEGQTDFGLTSEFEVDFAAKTMTGKLYRNNRITNNETENRDKQIKRYDIQANLHGNRFNGKATATDKPKENETKQHPFVSDSSSLSGGFFGPQGEELGFRFLSNDQKVAVVGSAKTQDKAANGNTAAASGDASVSASNGAAGTSSENGKLTTVLDAVELTLNDKKIKNLDNFSNAAQLVVDGIMIPLLPETSESGNNQADKGKNGGTAFTRKFDHTPKSDEKDTQAGTAANGAQTASGTAGDTSGKTKTYQVEVCCSNLNYLKYGMLTRKNSESAMQAGESSSQTPAAQTAQGAQSMFLQGERTDENKIPTDQNVVYRGSWYGHIASSTSWSGNASNATSGNRAEFTVNFDTKKITGKLTAENRQEATFTIDGKIEGNGFEGTAKTAELGFDLDQSNTTGTPKAYITNAKVQGGFYGPKAEELGGWFAYPGDKQTENTTVASGNGNSASSATVVFGAKRQKPVQ

SEQ ID NO: 28938 - protein, 218 aa, Neisseria meningitidis; identical to SEQ ID NO: 5912

SEQ ID NO: 28939 - protein, 140 aa, Neisseria meningitidis; identical to SEQ ID NO: 1638

SEQ ID NO: 28940 - protein, 287 aa, Neisseria meningitidis; identical to SEQ ID NO: 15174

SEQ ID NO: 28941 - protein, 297 aa, Neisseria meningitidis; identical to SEQ ID NO: 22328

SEQ ID NO: 28942 - protein, 114 aa, Neisseria meningitidis
MLPNKVLGKYDWNVDGKTGIGAAWVVAAFILPILVWAIFMLSRMQGWLAPTKANPTWELVWLLICMPCLLIASKCLGWKGWRRVVNIFACLTVCAILSVPASLLIAFTLRDLLK

SEQ ID NO: 28943 - protein, 216 aa, Neisseria meningitidis; identical to SEQ ID NO: 1372

SEQ ID NO: 28944 - protein, 365 aa, Neisseria meningitidis; identical to SEQ ID NO: 1845

SEQ ID NO: 28945 - protein, 222 aa, Neisseria meningitidis
MCTRKQQGFTLTELLIVMVIAAIMAMIALPNMSQWIASRRIASHAERIANLLRFSRGEAVRLNLPVYICPVQVKKDGAPNNKCDSGKKGQGMLAFGDKNGNKIYDNDTADVLLRSVVLNDDINNKRINYAFNHIAFGQTQPTADRVVWTFNQNGTFGYTKDQHLTSKSSFFYSDGYIQIVLTDARAVSDADKKFRSAVVLINSSGRVEVCPRNDRRTVCQYK

SEQ ID NO: 28946 - protein, 124 aa, Neisseria meningitidis; identical to SEQ ID NO: 27956

SEQ ID NO: 28947 - protein, 374 aa, Neisseria meningitidis
MQNTSFDNESDYSDDSDFVSASETENRIGLTVPLELAGGRLDAVLAKLLPDYSRSRLTSWIKEGAVIVNDKPSQPKDKMIGGEQICVTVRPSEENLAFVPEPMALDIVYEDDTVIVVNKPAGLVVHPAAGNWTGTLLNGLLAHCPELSQIPRAGIVHRLDKETSGLMVVAKTLSAQNSLVRQLQERTVKRIYRAVANGIVPFDGKIETQIGRDPHNRLKMAVVKFGGKPAVTHVKVLERYLAHSYIECSLETGRTHQIRVHMREANHPLAADPVYGNPRHPCGDTVKEAVKSLGARQALHAYRLSFTHPKTGETVSFEAPIPDDIYHLLSVLRLEAGLDSSLSNEEEWQDKFGADDDDDWNEDDYDVEVVYVRE

SEQ ID NO: 28948 - protein, 178 aa, Neisseria meningitidis; identical to SEQ ID NO: 1654

SEQ ID NO: 28949 - protein, 311 aa, Neisseria meningitidis; identical to SEQ ID NO: 14030

SEQ ID NO: 28950 - protein, 462 aa, Neisseria meningitidis; identical to SEQ ID NO: 15065

SEQ ID NO: 28951 - protein, 391 aa, Neisseria meningitidis; identical to SEQ ID NO: 7218

SEQ ID NO: 28952 - protein, 327 aa, Neisseria meningitidis; identical to SEQ ID NO: 6287

SEQ ID NO: 28953 - protein, 239 aa, Neisseria meningitidis; identical to SEQ ID NO: 3265

SEQ ID NO: 28954 - protein, 467 aa, Neisseria meningitidis
MDTTLKTTLTSVAAAFALSACTMIPQYEQPKVEVAETFKNDTADSGIRAVDLGWHDYFADPRLQKLIDIALERNTSLRTAALNSEIYRKQYMIERNNLLPTLAANANDSRQGSLSGGNVSSSYKVGLGAASYELDLFGRVRSSSEAALQGYFASTANRDAAHLSLIATVAKAYFNERYAEEAMSLAQRVLKTREETYKLSELRYKAGVISAVALRQQEALIESAKADYAHAARSREQARNALATLINQPIPEDLPAGLPLDKQFFVEKLPAGLSSEVLLDRPDIRAAEHALKQANANIGAARAAFFPSIRLTGTVGTGSAELGGLFKSGTGVWSFAPSITLPIFTWGTNKANLDVAKLRQQAQIVAYESAVQSAFQDVANALAAREQLDKAYDALSKQSRASKEALRLVGLRYKHGVSGALDLLDAERSSYAAEGAALSAQLTRAENLADLYKALGGGLKRDTQTDK

SEQ ID NO: 28955 - protein, 514 aa, Neisseria meningitidis; identical to SEQ ID NO: 13965

SEQ ID NO: 28956 - protein, 542 aa, Neisseria meningitidis; identical to SEQ ID NO: 2483

SEQ ID NO: 28957 - protein, 93 aa, Neisseria meningitidis
MNTIPLHTILKLMAHPERMAILIQLLDSERNIAELAKSLSLPATAVSGHLNRLRAGGLVDFTRYHRIIEYRLISEDTATILRTIRDLENKRAV

SEQ ID NO: 28958 - protein, 196 aa, Neisseria meningitidis; identical to SEQ ID NO: 1147

SEQ ID NO: 28959 - protein, 119 aa, Neisseria meningitidis; identical to SEQ ID NO: 6994

SEQ ID NO: 28960 - protein, 371 aa, Neisseria meningitidis
MLKFTLHKKDGYARRGTLELNHGKIETPVFMPVGTYGSVKAMNPQNLHDIKAQIILGNTYHLWLRPGLEVVEQFGGLHGFIGWDKPILTDSGGFQVFSLSDMRKLTEEGCTFKSPINGDKLFLSPEISMKIQTVLNSDIAMQLDECTPGEATREQAKKSLQMSLRWAERSKKAFEDLKNPNALFGIVQGAMYEDLREESLRGLEQFDFPGLAVGGLSVGEPKPEMYRMLRAVGPILPEHKPHYLMGVGTPEDLVYGVAHGIDMFDCVMPTRNARNGWLFTRFGDLKIKNAKHKLDKRPIDESCTCYACQNFSRAYLHHLHRTGEILGAQLNTIHNLHFYQVIMAEMREAVEQGKFADWQARFHENRARGID

SEQ ID NO: 28961 - protein, 102 aa, Neisseria meningitidis; identical to SEQ ID NO: 427

SEQ ID NO: 28962 - protein, 708 aa, Neisseria meningitidis
MGQFMSVFRINMTAATVLAALSSSVFAAQTEGLETVHIKGQRSYNAIATEKNGDYSSFAATVGTKIPASLREIPQSVSIITNQQVKDRNVDTFDQLARKTPGLRVLSNDDGRSSVYARGYEYSEYNIDGLPAQMQSINGTLPNLFAFDRVEVMRGPSGLFDSSGEMGGIVNLVRKRPTKAFQGHAAAGFGTHKQYKAEADVSGSLNSDGSVRGRVMAQTVGASPRPAEKNNRRETFYAAADWDINPDTVLGAGYLYQQRRLAPYNGLPADANNKLPSLPQHVFVGADWNKFKMHSHDVFADLKHYFGNGGYGKVGMRYSDRKADSNYTFAGSKLNNTGQADVAGLGTDIKQKAFAVDASYSRPFALGNTANEFVIGADYNRLRSTNEQGRSTLSKSVALDGFRALPYNGILQNARAGNKGFNHSVTEENLDETGLYAKTVFRPLEGLSLIAGGRVGHHKIESGDGKTLHKASKTKFTSYAGAVYDIDGSNSLYASASQLYTPQTSIGTDGKLLKPREGNQFEIGYKGSYMDDRLNTRVSFYRMKDKNAAAPLDSNNKKTRYAALGKRVMEGVETEISGAMTPKWQIHAGYSYLHSQIKTASNSRDEGIFLLMPKHSANLWTTYQVTSGLTIGGGVNAMSGITSSAGIHAGGYATFDAMAAYRFTPKLKLQINADNIFNRHYYARVGSESTFNIPGSERSLTANLRYSF

SEQ ID NO: 28963 - protein, 313 aa, Neisseria meningitidis; identical to SEQ ID NO: 14846

SEQ ID NO: 28964 - protein, 225 aa, Neisseria meningitidis
MQADFNRPVLAIDTGTSHLSLALRADGETRLFHQEVGSRQSELILPEIRTLFRDAGITAADLGAVVYAQGPGAFTGLRIGIGVAQGLATPFDTPLIGVPSLDTAASLPPPQSCILAATDARMGEVFYAWFDTLNCRRLSDYQVGRAADIRLPEGCAFSDGIGSAFALEEAPPFSGRPDMPTAADFLALAAKGGYPAVHAAHAGLLYVRNKIALTAKEQAERRERP

SEQ ID NO: 28965 - protein, 143 aa, Neisseria meningitidis; identical to SEQ ID NO: 6042

SEQ ID NO: 28966 - protein, 205 aa, Neisseria meningitidis; identical to SEQ ID NO: 16871

SEQ ID NO: 28967 - protein, 230 aa, Neisseria meningitidis
MTAFVHTLSDGMELTVEIKRRAKKNLIIRPAGTHTVRISVPPCFSVSALNRWLYENEAVLRQTLAKTPPPQTAENRLPESILFHGRQLALTAHQDTQILLMPSEIRVPEGAPEKQLALLRDFLERQAHSYLIPRLERHARTTQLFPASSSLTSAKTFWGVCRKTTGIRLNWRLVGAPEYVADYVCIHELCHLAHADHSRAFWALTRRFAPYTPEAKQWLKIHGRELFALG

SEQ ID NO: 28968 - protein, 339 aa, Neisseria meningitidis
MKKILVTGGTGFIGSHTVVSLLKSGHQVVILDNLCNSSINILPRLKTITGQEIPFYQGDIRDREILRRIFAENRIDSVIHFAGLKAVGESVAEPMKYYDNNVSGSLVLAEEMARAGVFSIVFSSSATVYGDPGKVPYTEDMPLGDTTSPYGTSKSMVERILTDIQKADPRWSMILLRYFNPIGAHESGLIGEQPNGIPNNLLPYICQVAAGKLPQLAVFGDDYPTPDGTGMRDYIHVMDLAEGHVAAMQAKSNVAGTHLLNLGSGRASSVLEIIRAFEAASGLTIPYEVKPRRAGDLACFYADPSYTKAQIGWQTQRDLTQMMEDSWRWVSNNPNGYDD

SEQ ID NO: 28969 - protein, 718 aa, Neisseria meningitidis; identical to SEQ ID NO: 6011

SEQ ID NO: 28970 - protein, 433 aa, Neisseria meningitidis
MPSETARPLYADTCAAHTLVWFRQNLRIRDNAALCAAVAEGLPIIGIWIDDAETDNPRRAAFYRQSAAELAQGLAGRGIPLYTAASPAELVRLAVRLNIRAVIADESHTFADKLADNALWHELNKHGIALTFVNDRAVFGKTDLIPDGGTAHTDFDRYREVWLDRFSKQPPAGPDLFAAYRQPFPENLSAPPPAALSDGIFLPQNSGETAAWRQWRRFLEQADSYSVLKDFPSRKHTSLMGAYLSAGCISPRLLARESLERRLNAWADNIIRRDFFLQLALQHTDDDPSDGNPEHTLRLTLWQQGQTGIPIIDAAMRCLHKTGSLHPALRRLSADFFCHVLNLPRREGEIWFARQLTDFDAAINQGNWWLAASRHTCPDIAAAAHKTDPDGTFVRRHIPELAHLSADTVHTPWRFACSVDTHGYPAYPVAGIP

SEQ ID NO: 28971 - protein, 370 aa, Neisseria meningitidis; identical to SEQ ID NO: 7729

SEQ ID NO: 28972 - protein, 149 aa, Neisseria meningitidis; identical to SEQ ID NO: 4552

SEQ ID NO: 28973 - protein, 84 aa, Neisseria meningitidis; identical to SEQ ID NO: 3171

SEQ ID NO: 28974 - protein, 121 aa, Neisseria meningitidis; identical to SEQ ID NO: 14451

SEQ ID NO: 28975 - protein, 159 aa, Neisseria meningitidis; identical to SEQ ID NO: 6605

SEQ ID NO: 28976 - protein, 655 aa, Neisseria meningitidis; identical to SEQ ID NO: 15146

SEQ ID NO: 28977 - protein, 64 aa, Neisseria meningitidis; identical to SEQ ID NO: 905

SEQ ID NO: 28978 - protein, 230 aa, Neisseria meningitidis; identical to SEQ ID NO: 675

SEQ ID NO: 28979 - protein, 63 aa, Neisseria meningitidis
LPKFGEFHLPSPPPRGRGQVAADFAVAGGLRKNARNINSGNFSGSLYRKADVTNAASVFSDDL

SEQ ID NO: 28980 - protein, 107 aa, Neisseria meningitidis
MIIDEKSTSDVLKQYQELGFDLTKPMIIEFFIGGSQKNLQSIESQLISYRQDFQISIEQNEFGEMWTCYCSVNIVPSLENILAIETTLFGIAQKNDCNYEGFGSYGN

SEQ ID NO: 28981 - protein, 222 aa, Neisseria meningitidis; identical to SEQ ID NO: 7101

SEQ ID NO: 28982 - protein, 84 aa, Neisseria meningitidis; identical to SEQ ID NO: 15659

SEQ ID NO: 28983 - protein, 392 aa, Neisseria meningitidis; identical to SEQ ID NO: 4407

SEQ ID NO: 28984 - protein, 394 aa, Neisseria meningitidis; identical to SEQ ID NO: 19878

SEQ ID NO: 28985 - protein, 189 aa, Neisseria meningitidis; identical to SEQ ID NO: 2163

SEQ ID NO: 28986 - protein, 338 aa, Neisseria meningitidis; identical to SEQ ID NO: 18219

SEQ ID NO: 28987 - protein, 309 aa, Neisseria meningitidis; identical to SEQ ID NO: 22466

SEQ ID NO: 28988 - protein, 270 aa, Neisseria meningitidis; identical to SEQ ID NO: 3098

SEQ ID NO: 28989 - protein, 211 aa, Neisseria meningitidis; identical to SEQ ID NO: 6559

SEQ ID NO: 28990 - protein, 751 aa, Neisseria meningitidis
MGQYKKLWYLLFAVLAVCFTILGYMGSEVYKKAPPYPEQVVSASGKVLMTKDDILAGQSAWQSTGGMEVGSILGHGAYQAPDWTADWLHRELSAWLDLTAQQTYGKKFDEVSPEEQAVLKTRLADEYRNQSRIKEDGSVVISDTRVKAIESILPYYHGVYGDDPALQTTREHFAMKNNTLPSQEAREKLFDFFFWTSWSASTNRPDETFTYTNNWPHEPLINNVPTTENYMWSFTSVVLLLMGIGLLMWGYSFLTKHEEVEVPTEDPISKVQLTPSQKALGKYVFLTVALFVVQVLLGGLTAHYTVEGQGFYGIDEALGFEMSDWFPYALTRTWHIQSAIFWIATGFLTAGLFLAPIVNGGKDPKFQRAGVNFLYIALFIVVGGSYAGNFFALTHILPPEFNFWFGHQGYEYLDLGRFWQLLLMVGLLLWLFLMLRCTVSAFKEKGVDKNLLAIFVASMVGVGVFYAPGLFYGEKSPIAVMEYWRWWVVHLWVEGFFEVFATAAFAFVFYNMGFVRRSTATASTLAAAAIFMLGGVPGTLHHLYFSGSTSASMAIGACFSALEVVPLVLLGREAYEHWSYQHLSDWAKRLRWPLMCFVAVAFWNMIGAGVFGFLINPPISLFYIQGLNTSAVHAHAALFGVYGFLALGFVLLVARYLKPNAQFDDKLMTWGFWLLNGGLVGMIAISLLPVGAIQAYASITHGLWYARSEEFLQMEILDTLRWVRTAADLIFIGGAVCVAIQATKIVFGRDK

SEQ ID NO: 28991 - protein, 100 aa, Neisseria meningitidis; identical to SEQ ID NO: 448

SEQ ID NO: 28992 - protein, 380 aa, Neisseria meningitidis; identical to SEQ ID NO: 24041

SEQ ID NO: 28993 - protein, 140 aa, Neisseria meningitidis; identical to SEQ ID NO: 15282

SEQ ID NO: 28994 - protein, 921 aa, Neisseria meningitidis; identical to SEQ ID NO: 9329

SEQ ID NO: 28995 - protein, 101 aa, Neisseria meningitidis; identical to SEQ ID NO: 2399

SEQ ID NO: 28996 - protein, 219 aa, Neisseria meningitidis; identical to SEQ ID NO: 6969

SEQ ID NO: 28997 - protein, 213 aa, Neisseria meningitidis; identical to SEQ ID NO: 2136

SEQ ID NO: 28998 - protein, 49 aa, Neisseria meningitidis; identical to SEQ ID NO: 14370

SEQ ID NO: 28999 - protein, 96 aa, Neisseria meningitidis; identical to SEQ ID NO: 4744

SEQ ID NO: 29000 - protein, 500 aa, Neisseria meningitidis
MSREMLQLAEALASEKNVDAEVVFQALEFALSTAAKKKADREHMDVRVQINRDTGEYQTFRRWLIVADEDYTYPDVEKTIEEIQEEIPGTTIQIGEYYEEQLPNEGFGRQAAQTAKQIILQRIRDAEREQNLNEFLAVKEDIVSGTVKRVERHGIIVEVVAGKLDALIPRDQMIPRENFRSGDRIRALFLRVEEIGNTGRKQVILSRTSGDFLVKLYANEVPEIADGMLEIRAVARDPGQRAKVAVKANDQRIDPQGTCIGVRGSRVNAVSNELSGERIDVVLWSPEPAQFVMSALSPAEVSRIVIDEDKHAVDVIVAEDQLALAIGRGGQNVRLASELTGWQLNIMTSAEADERNAAEDAAIRRLFMDHLNVDEETADVLVQEGFATLEEVAYVPAAELLAIEGFDEEIVDMLRNRARDAILTMAIAAEEKLGEVSDDMRNLEGVDADMLRSLAEAGITTRDDLAELAVDELIEITGVNEETAKAVILTAREHWFTEDK

SEQ ID NO: 29001 - protein, 108 aa, Neisseria meningitidis
MNFKRLLLTAAATALMGISAPALAHHDGHGDDDHGHAAHQHNKQDKIISRAQAEKAALARVGGKITDIDLEHDNGRPHYDVEIVKNGQEYKVVVDARTGRVISSRRDD

SEQ ID NO: 29002 - protein, 451 aa, Neisseria meningitidis; identical to SEQ ID NO: 14552

SEQ ID NO: 29003 - protein, 530 aa, Neisseria meningitidis; identical to SEQ ID NO: 6645

SEQ ID NO: 29004 - protein, 522 aa, Neisseria meningitidis; identical to SEQ ID NO: 18279

SEQ ID NO: 29005 - protein, 150 aa, Neisseria meningitidis; identical to SEQ ID NO: 3757

SEQ ID NO: 29006 - protein, 887 aa, Neisseria meningitidis
MSTQLHDVDPIETQEWLDALSSVLEYEGGERAQYLLENLVKYCRDKGVRMPHGTTTPYLNTVSVENEKGIPGDQNIEHRIRAFVRWNAAAIVLRAGKKDLELGGHIASFQSAATMYEVGFNHFWKAKGEGEEGDLVFFQGHVAPGIYARAFVEGRLTEDQLNNFRQEVDGHGLPSYPHPHLLPDFWQFPTVSMGLGPIMAIYQARFLKYLESRGLAKTKGRKVWCFCGDGEMDEPESQGAIALAAREGLDNLIFVINCNLQRLDGPVRGNGKIIQELEGNFAGAGWNVVKVIWGRRWDRLLAKDKDGILRQRMEECLDGDYQTYKSKDGAYVREHFFNTPELKTLVADMTDEQLWALNRGGHDPQKVYNAYDRAANHADGKPTVILAKTIKGYGMGASGEGQNVAHQAKKMDKASLKQFRDRFDIPVTDEQIESGDLPYLTFAPDTEEYKYLHARRDALGGYLPQRKPTQEVLEVPELSAFDAQLKSSGEREFSTTMAFVRILSTLLKDKKIGKRVVPIVPDESRTFGMEGMFRQYGIWNPKGQQYTPQDKDQLMFYKESVDGQILQEGINEPGAMADWIAAATSYANSNFAMIPFYIYYSMFGFQRVGDLAWAAGDMHARGFLLGGTAGRTTLNGEGLQHEDGHSHIQADLIPNCVSYDPTFQYEVAVIVQDGLRRMYANNEDVFYYITLMNENYTHPDMPEGAEQDILKGMYLLKAGGKGDKKVQLMGSGTILQEVIAGAELLKADFGVEADIWSCPSFNLLHRDAVEVERFNRLHPLEAEKVPFVTSQLQGHDGPVIAATDYIRSYADRIRAYIPNDYHVLGTDGFGRSDSRANLRRFFEVDRYNVAVAALAALAEQGKVSKETVQQAIEKYGIKADSAPSWKR

SEQ ID NO: 29007 - protein, 229 aa, Neisseria meningitidis
LPGSRGIRANGTQFARVLHGTPNPSAGRMASVKEILMKHTVSASVILLLTACAQLPQNNENLWQPSEHTRSFTAEGRLAVKAEGKGSYANFDWTYQPLVETININTPLGSTLGQLCQDRDGALAVDGKGNVYQAESAEELSRQLVGFKLPIQYLHIWADGRRVAGAPYRILPDGILEQYGWTVGRTADSGGQVRTLQLNNGNLNIRLVFTEIGMPSETETPERCAARTR

SEQ ID NO: 29008 - protein, 93 aa, Neisseria meningitidis; identical to SEQ ID NO: 3660

SEQ ID NO: 29009 - protein, 488 aa, Neisseria meningitidis
MVIFYFCGKTFMPARNRWMLLLPLLASAAYAEETPREPDLRSRPEFRLHEAEVKPIDREKVPGQVREKGKVLQIDGETLLKNPELLSRAMYSAVVSNNIAGIRVILPIYLQQAQQDKMLALYAQGILAQTDGRVKEAISHYRELIAAQPDAPAVRMRLAAALFDNRQNEAAADQFDRLKAENLPPQLMEQVELYRKALRERDAWKVNGGFSVTREHNINQAPKRQQYGKWTFPKQVDGTAVNYRLGAEKKWSLKNGWYTTAGGDVSGRVYPGNKKFNDMTAGVSGGIGFADRRKDAGLAVFHERRTYGNDAYSYTNGARLYFNRWQTPKWQTLSSAEWGRLKNTRRARSDNTHLQISNSLVFYRNARQYWMGGLDFYRERNPADRGDNFNRYGLRFAWGQEWGGSGLSSLLRLGAAKRHYEKPGFFSGFKGERRRDKELNTSLSLWHRALHFKGITPRLTLSHRETRSNDVFNEYEKNRAFVEFNKTF

SEQ ID NO: 29010 - protein, 215 aa, Neisseria meningitidis; identical to SEQ ID NO: 1514

SEQ ID NO: 29011 - protein, 394 aa, Neisseria meningitidis; identical to SEQ ID NO: 6005

SEQ ID NO: 29012 - protein, 130 aa, Neisseria meningitidis; identical to SEQ ID NO: 7797

SEQ ID NO: 29013 - protein, 206 aa, Neisseria meningitidis
MAQFFAIHPDNPQERLIKQAVEIVNKGGVVVYPTDSCYALGCKLGDKAAMERILSIRKIDLKHHLTLMCADLSELGTYAKVDNVQFRQLKAATPGPYTFILQATKDVPARTLHPKRKTIGLRIPDNAIAQALLGELGEPLLSCTLMLPEDGEPLTDPYEIRERLEHAVDLVIDGGWCGTEPTTVVDMTDGTELVRRGCGDTAVFGL

SEQ ID NO: 29014 - protein, 431 aa, Neisseria meningitidis; identical to SEQ ID NO: 14882

SEQ ID NO: 29015 - protein, 94 aa, Neisseria meningitidis; identical to SEQ ID NO: 387

SEQ ID NO: 29016 - protein, 63 aa, Neisseria meningitidis; identical to SEQ ID NO: 980

SEQ ID NO: 29017 - protein, 250 aa, Neisseria meningitidis; identical to SEQ ID NO: 15559

SEQ ID NO: 29018 - protein, 390 aa, Neisseria meningitidis
MKQINQALQQKLVEFKEKSGMNQTQLARGIDTSPASISMYLNGTYADKGGNYETIETKIEAFLEMEDSKARREELVLGFVSTKTTRRIAEVMRDAHEGGETVVIYGQAGLGKTQSVKNYCEKNPAAILIEANPSFTALVLMRKLATAAKVSAMGSLNDLFESVSDRLRDSGRLIVVDEAENLPLRALEIIRRLHDETGCGLVLSGMPRLVANLRGKHGELVQLYSRVSVALNLGESLPDDELFEIAKAALPDAVKHLLPDSVQALITVIGFNETLELVRLMGGTTYPLRQGYTKNSQSRVAYLEEIIGSEAAGRLVEAMAPCNLFIPRCETALYELRNRKIRSQFDRQTAGGTPAYEAVNDLALAHRLSDRHVWRILKQADKEAEQENLF

SEQ ID NO: 29019 - protein, 91 aa, Neisseria meningitidis; identical to SEQ ID NO: 4054

SEQ ID NO: 29020 - protein, 416 aa, Neisseria meningitidis; identical to SEQ ID NO: 15180

SEQ ID NO: 29021 - protein, 283 aa, Neisseria meningitidis; identical to SEQ ID NO: 17266

SEQ ID NO: 29022 - protein, 303 aa, Neisseria meningitidis; identical to SEQ ID NO: 22215

SEQ ID NO: 29023 - protein, 157 aa, Neisseria meningitidis; identical to SEQ ID NO: 15356

SEQ ID NO: 29024 - protein, 296 aa, Neisseria meningitidis; identical to SEQ ID NO: 7062

SEQ ID NO: 29025 - protein, 154 aa, Neisseria meningitidis; identical to SEQ ID NO: 6562

SEQ ID NO: 29026 - protein, 284 aa, Neisseria meningitidis; identical to SEQ ID NO: 14194

SEQ ID NO: 29027 - protein, 258 aa, Neisseria meningitidis; identical to SEQ ID NO: 2774

SEQ ID NO: 29028 - protein, 498 aa, Neisseria meningitidis; identical to SEQ ID NO: 14135

SEQ ID NO: 29029 - protein, 90 aa, Neisseria meningitidis; identical to SEQ ID NO: 3546

SEQ ID NO: 29030 - protein, 109 aa, Neisseria meningitidis; identical to SEQ ID NO: 899

SEQ ID NO: 29031 - protein, 515 aa, Neisseria meningitidis; identical to SEQ ID NO: 654

SEQ ID NO: 29032 - protein, 728 aa, Neisseria meningitidis
LPRCLKQTVRHVMPSETGADAAKPSDGIACPLRPNNNHLWENLMPEQNRILCRELSLLAFNRRVLAQAEDKNVPLLERLRFLCIVSSNLDEFFEVRMAWLKRENKLHPRRRLDNGKMPSETIADVTEAARSLIRHQYDLFNNVLQPELARESIHFYRRRNWTGAQKKWIEDYFDRELLPILTPIGLDPSHPFPRPLNKSLNFAVELDGTDAFGRPSGMAIVQAPRILPRVVPLPSELCGGGHGFVFLSSILHAHVGKLFPGMNVKGCHQFRLTRDSDLTVDEEDLQNLRAAIQNELHDREYGDGVRLEVADTCPAYIRDFLLAQFKLTAAELYQVKGPVNLVRLNAVPDLVNRPDLKFPTHTPGRLKALGKTASIFDLVRQSPILLHHPYQSFDPVVEMMREAAADPDVLAVKMTIYRTGTRSELVRALMKAALAGKQVTVVVELMARFDEANNVNWAKQLEEAGAHVVYGVFGYKVHAKMALIIRREDGVLKRYAHLGTGNYHQGTSRIYTDFGIITADEQITADVNTLFMEITGLGKPGRLNKLYQSPFTLHKMVIDRIARETEHAKAGKPARITAKMNSLIEPTVIEALYRASAAGVQIDLIVRGMCTLRPGVKGLSENIRVRSIIGRQLEHARVYCFHNNGADDTFISSADWMGRNFFRRIETAAPIAAPELKKRVIREGLEMALADNTHAWLMQPDGGYIRAAPAEGESEADLQNDLWTLLGG

SEQ ID NO: 29033 - protein, 97 aa, Neisseria meningitidis; identical to SEQ ID NO: 910

SEQ ID NO: 29034 - protein, 462 aa, Neisseria meningitidis; identical to SEQ ID NO: 8923

SEQ ID NO: 29035 - protein, 86 aa, Neisseria meningitidis; identical to SEQ ID NO: 4508

SEQ ID NO: 29036 - protein, 344 aa, Neisseria meningitidis; identical to SEQ ID NO: 6064

SEQ ID NO: 29037 - protein, 395 aa, Neisseria meningitidis
MAEICLITGTPGSGKTLKMVSMMANDEMFKPDENGIRRKVFTNIKGLKIPHTYIETDAKKLPKSTDEQLSAHDMYEWIKKPENIGSIVIVDEAQDVWPARSAGSKIPENVQWLNTHRHQGIDIFVLTQGSKLLDQNLRTLVRKHYHIASNKMGMRTLLEWKICADDPVKMASSAFSSIYTLDKKVYDLYESAEVHTVNKVKRSKWFYTLPVIILLIPVFVGLSYKMLSSYGKKQEEPAAQESAATEHQAVFQDKTEGEPVNNGNLTADMFVPTLSEKPESKPIYNGVRQVRTFEYIAGCIEGGRTGCACYSHQGTALKEVTELMCKDYVKNGLPFNPYKEESQGRDVQQSEQHHSDRPQVATLGGKPWQNLMYDNWQERGKPFEGIGGGVVGSAN

SEQ ID NO: 29038 - protein, 54 aa, Neisseria meningitidis; identical to SEQ ID NO: 6606

SEQ ID NO: 29039 - protein, 233 aa, Neisseria meningitidis; identical to SEQ ID NO: 14629

SEQ ID NO: 29040 - protein, 218 aa, Neisseria meningitidis; identical to SEQ ID NO: 15615

SEQ ID NO: 29041 - protein, 399 aa, Neisseria meningitidis; identical to SEQ ID NO: 2328

SEQ ID NO: 29042 - protein, 41 aa, Neisseria meningitidis; identical to SEQ ID NO: 3182

SEQ ID NO: 29043 - protein, 162 aa, Neisseria meningitidis
MKKDIFYCEQWSYGYKRLHKPFSEKQAEEKHLKGELYTAVIGSATQPEYVITLREEVGFFSVNFFDKFGRDYLTHQFRKYSNSNYYFLSTAVWRDYITLESHDLAEGYTYFFNENTDDCYVLKQDFINNERYEKTELYPQKDKVILFPKFGEYDLVLNPDII

SEQ ID NO: 29044 - protein, 468 aa, Neisseria meningitidis; identical to SEQ ID NO: 1695

SEQ ID NO: 29045 - protein, 206 aa, Neisseria meningitidis
MTTHHVELRNVTKRFGAQKAVNQVDLVLKAGESVGLAGYNGAGKSTIMKLILGLITPTEGEVMLLGERTGSKAGARLRSQIGYLPETVALHPSLIGIETLDFYAKLKKQPLTQNRGLLERVGISQAAHRRVGTYSKGMRQRLALAQALLGEPKVLLFDEPTTGLDPASRQMFYEVVRELNGRGATVLLSTHALAELDGHADRIIVD

SEQ ID NO: 29046 - protein, 140 aa, Neisseria meningitidis
MSEQTALAVCADGVETALAEAASLLEEGCGSVLVLAADDPLPEGYAVSATRAPFAYALAMVLTKGTRYSLTLSASDDMPSEAGMLPEAYWSGLEWVRFLLNGSRECRRVYRNREWLWQPASCRLKISAISAPSTTWYRRY

SEQ ID NO: 29047 - protein, 81 aa, Neisseria meningitidis; identical to SEQ ID NO: 6821

SEQ ID NO: 29048 - protein, 164 aa, Neisseria meningitidis; identical to SEQ ID NO: 7401

SEQ ID NO: 29049 - protein, 332 aa, Neisseria meningitidis; identical to SEQ ID NO: 155

SEQ ID NO: 29050 - protein, 195 aa, Neisseria meningitidis; identical to SEQ ID NO: 1424

SEQ ID NO: 29051 - protein, 124 aa, Neisseria meningitidis; identical to SEQ ID NO: 4349

SEQ ID NO: 29052 - protein, 150 aa, Neisseria meningitidis; identical to SEQ ID NO: 5989

SEQ ID NO: 29053 - protein, 190 aa, Neisseria meningitidis; identical to SEQ ID NO: 917

SEQ ID NO: 29054 - protein, 107 aa, Neisseria meningitidis; identical to SEQ ID NO: 2314

SEQ ID NO: 29055 - protein, 233 aa, Neisseria meningitidis
MFRIVKWLIALPVGIFIFFNAYVYGNIITYRAVAPHRTAFMSMRMKQFEQEGRDVALDYRWMPYNRISVNLKKALIASEDARFAGHGGFDWGGIQNAIRRNRNSGKVKAGGSTISQQLAKNLFLNESRSYIRKGEEAAITAMMEAVTDKDRIFELYLNSIEWHYGVFGAEAASRYFYQIPAAKLTKQQAAKLTARVPAPLYYADHPKSKRLRNKTNIVLRRMGSAELPESDTD

SEQ ID NO: 29056 - protein, 491 aa, Neisseria meningitidis; identical to SEQ ID NO: 14704

SEQ ID NO: 29057 - protein, 131 aa, Neisseria meningitidis
VKLLANNWQPIAIIALVGTGLAVSHHQGYKSAFAKQQAVIDKMERDKAQALLLSAQNYARELELARAEAKKYEVKAHAVGMALAKKQAEVSRLKTERDLCKIPFPPDSRNPNTGFRLFSPQIPPNFTQIPP

SEQ ID NO: 29058 - protein, 145 aa, Neisseria meningitidis; identical to SEQ ID NO: 2822

SEQ ID NO: 29059 - protein, 248 aa, Neisseria meningitidis; identical to SEQ ID NO: 14732

SEQ ID NO: 29060 - protein, 404 aa, Neisseria meningitidis
MDKFPKSAKLDHVCYDIRGPVHKKALQLEEEGNKILKLNIGNPAPFGFEAPDEILVDVIRNLPTSQGYCDSKGLYSARKAIVHYYQTKGLRDITVNDVYIGNGVSELITMSMQALLNDGDEILIPAPDYPLWTAAATLAGGTVRHYLCDEENGWFPNLADMEAKITPKTKAIVVINPNNPTGAVYSREILLEIAELARKHGLIIFADEIYDKILYDGAVHHHIAALAPDLLTVTFNGLSKSYRVAGFRQGWMVLNGPKHHAKGYIEGLDMLSSMRLCANTPMQHAIQTALGGYQSINEFILPGGRLLEQRNRAWELVNQIPGVSCVKPMGAMYMFPKIDTEMYRIRDDMKFVYDLLVREKVLLVQGTGFNWIKPDHFRIVTLPYVYQIEEAMGRLARFLQTYRQ

SEQ ID NO: 29061 - protein, 74 aa, Neisseria meningitidis; identical to SEQ ID NO: 23555

SEQ ID NO: 29062 - protein, 47 aa, Neisseria meningitidis; identical to SEQ ID NO: 3740

SEQ ID NO: 29063 - protein, 349 aa, Neisseria meningitidis
MQNNNEFKIGNRSVGYNHEPLIICEIGINHEGSLKTAFEMVDAAYNAGAEVVKHQTHIVEDEMSDEAKQVIPGNADVSIYEIMERCALNEEDEIKLKEYVESKGMIFISTPFSRAAALRLQRMDIPAYKIGSGECNNYPLIKLVASFGKPIILSTGMNSIESIKKSVEIIREAGVPYALLHCTNIYPTPYEDVRLGGMNDLSEAFPDAIIGLSDHTLDNYACLGAVALGGSILERHFTDRMDRLGPDIVCSMNPDTFKELKQGAHALKLARGGKKDTIIAGEKPTKDFAFASVVADKDIKKGELLSGDNLWVKRPGNGDFSVNEYETLFGKVAACNIRKGAQIKKTDIE

SEQ ID NO: 29064 - protein, 812 aa, Neisseria meningitidis
MIEKSHKKTAKGRAGSPSPTSARNKKADNGARGNKVSERLKAVKELQKTETKKARPEHVVNLIGDALWLMGLAATLYLAISLISFDMGDPSWSHSSPVVEDVANWGGLFGAYVADVGYYLFGWSFWWWIAAACVVLYKNFRLHAKQTENEAYNHKIAAAALFVLTVFSPVLEYFVLGGKYADSLPVGAGGMVGIRVGAVFAWLLGKSGSLLIILVVLLLSLSLLVQISWLEFLNGAGRAVQNRLSALSGKVMALGKRRPNTKTDGVDTQNTRRMVKEAKNITAKPVALPEGSSSNRKSVAVSVAPPPKIQVSLFEDDEPRQAGEYHKPTLNLLRIPDSEPVSINPAELERTAELIESKLAEFGIGVQVVSATSGPVITRYEIEPAQGVKGSQIVALSKDLARSMSLQSVRIVETIAGKNTMGIELPNDKRQDVMLSEILSSPVFAEAKSKLTVALGKDIAGTPVVGDLAKMPHLLVAGMTGSGKSVGVNGMIMSMLFKATPDEVRFIMIDPKMLELSIYDGIPHLLCPVVTDMREAGQALNWCVAEMEKRYRLLSHAGVRNLEGFNQKVEAAKAAGKPLLNPFSLNPDEPEPLEKLPLIVVVIDELADLMMTERKAVEQQIARLAQKARAAGIHMIVATQRPSVDVVTGLIKANIPTRMAFTVQSKIDSRTILDQMGADELLKYGDSLFLQPGSAEPTRLQGAFVSDDEVHQVVNYVKSQAPADYIEGLLSGEAALETANIVNPNADSDELFDQAVAYVLESKKTSISSLQRQLRIGYNRAANLMEALENAGVVSSTDLNGSRKILAHKDHL

SEQ ID NO: 29065 - protein, 570 aa, Neisseria meningitidis
MKASQFFISTLKEAPAEAALASHKLMIRAGLIKANASGLYTWMPMGLRVLRKVENVVREEMARAGSVELLMPVVQPAELWQESGRWEFYGKELLRLKDRHDRDFCMGPTCEEVIADIVRKEINSYKQLPKNFYHIQTKFRDEVRPRFGVMRAREFVMKDAYSFHADYASLQTTYDAMYDAYCRIFTRLGLAFRPVAADTGSIGGTGSHEFQVLAESGEDVIAYSDTSDYAANVELAPTLPLKGERTAAQAELVKVHTPNVKTIESLVEFLNIPVEQTLKSIVVEGENEGEIVLLLLRGDHEFNDIKAEKLAGVKSPLTMASSAAIVEQFGANGGSLGPVGFAGKVYADFATEKGADWVIGANEDGYHYTGFNFGRDAAEPEFVDLRNVVEGDESPDGQGRLKLARGIEVGHVFQLRDKYTQAMNVSFLDNNGKSQVMEMGCYGIGITRVVAAAIEQNNDEKGIIWTKAMAPFEVVIVPMNYKKSDTVREAADKIYAELLAAGADVLLDDRDERAGVLLNDSELLGIPHRIVIGDRALKEGNVEYAERRNNEAQAVAIGEIVARVTASLNG

SEQ ID NO: 29066 - protein, 187 aa, Neisseria meningitidis; identical to SEQ ID NO: 784

SEQ ID NO: 29067 - protein, 221 aa, Neisseria meningitidis
MTVLDREQVLSAFKNRKSCRHYDAARKISAEDFQFILELGRLSPSSVGSEPWQFVVVQNPEIRQAIKPFSWGMADALDTASHLVVFLAKKNARFDSPFMLESLKRRGVTEPDAVAKSLVKYQAFQADDIKILDDSRALFDWCCRQTYIALGNMMTGAAMAGIDSCPVEGFNYADMERVLSGQFGLFDAAEWGVSVAATFGYRVQEIATKARRPLEETVIWA

SEQ ID NO: 29068 - protein, 414 aa, Neisseria meningitidis; identical to SEQ ID NO: 26787

SEQ ID NO: 29069 - protein, 68 aa, Neisseria meningitidis; identical to SEQ ID NO: 4044

SEQ ID NO: 29070 - protein, 144 aa, Neisseria meningitidis; identical to SEQ ID NO: 4260

SEQ ID NO: 29071 - protein, 203 aa, Neisseria meningitidis; identical to SEQ ID NO: 352

SEQ ID NO: 29072 - protein, 460 aa, Neisseria meningitidis
MANIARDIFKAYDIRGIVGKTLTDDAAYLIGRAIAAKAAEKGMTRIALGRDGRLSGPELMEHIQRGFTDSGIDVLNVGMVATPMLYFAAINECGGSGVMITGSHNPPDYNGFKMMLGGDTLAGEAIQELLAIIEKDGFVAADKQGNVTEKDISGEYHNHIVGHIKLKRPMKIAIDAGNGVGGAFAGKLYKGLGNEVTELFCDVDGTFPNHHPDPSKPKNLQDLIAALKNGDAEIGLAFDGDADRLGVVTKDGNIIYPDRQLMLFAQDVLSRNPKAKVIFDVKSTRLLAPWIKEHGGEPVMEKTGHSFIKSSMKKTGAPVAGEMSGHIFFKERWFGFDDGLYAGARLLEILSASDNPSEVLNNLPQSISTPELNIALPEGSNGHQVIDELAAKAEFEGATEIITIDGLRVEFPDGFGLMRASNTTPILVLRFEADTQEAIERIQNQFKAVIESNPNLIWPL

SEQ ID NO: 29073 - protein, 490 aa, Neisseria meningitidis
MNQTSRDLTRISHNTKIVATLGPGSNNVELLEDMIRVGGLNVVRFNFSHGTPEFHQENARIVREAAKRAGQEIAIIADLQGPKIRVGKIAGGGIELNKGETLVLDAALEGEGTREAVGLDYRDLPDDVAAGDVLWLDDGLLTLTVESVEGSRIITRVENSHVLKSNKGINKRGGGLSAGALTEKDFRDLKTAIAIGCDYLAISFVKSAEDLHIARAKVEEEMKGSTAVRPGLVSKIERVEAIENLDEIILAGDGIMVARGDLAVEVGHAAVPALQKRMIRRARELRRFSITATQMMESMITNPVPTRAEVSDVANAVLDGTDAVMCSAETAVGAYPFETVSQMAIICAAAEKEQDSLNGVAEQVEYPEAVSTNLAVAGGAVSVARAVHAKAIVALTESGSTAFEISRHNITLPIFALTPSVSAQRRMAMYRGVRPLILATSTDHDTALNEVETMLVEHNILHSGDQYIITSGSQMRESGSTNTLEVLRVK

SEQ ID NO: 29074 - protein, 484 aa, Neisseria meningitidis; identical to SEQ ID NO: 2793

SEQ ID NO: 29075 - protein, 128 aa, Neisseria meningitidis
MKNVQKGFTLLELMIAVAILGILTLITYPSYKTYIRRVRLSEVKSTLLMNAQNLERYYRQKGTFENYDQTKLKQNKYFKITLSKSPDHFTLQAAPDPTTNEGETCIVTLNDGGTLSAAGNGQSCPDFD

SEQ ID NO: 29076 - protein, 374 aa, Neisseria meningitidis; identical to SEQ ID NO: 16979

SEQ ID NO: 29077 - protein, 87 aa, Neisseria meningitidis; identical to SEQ ID NO: 205

SEQ ID NO: 29078 - protein, 160 aa, Neisseria meningitidis; identical to SEQ ID NO: 236

SEQ ID NO: 29079 - protein, 131 aa, Neisseria meningitidis; identical to SEQ ID NO: 1281

SEQ ID NO: 29080 - protein, 100 aa, Neisseria meningitidis; identical to SEQ ID NO: 1890

SEQ ID NO: 29081 - protein, 379 aa, Neisseria meningitidis
MKKTLVAAAILSLALTACGGGNDTAAQAPSAKPEAEQSGKLNIYNWSDYVDPETVAAFEKETGIKTRSDYYDSNETLEAKVLTGKSGYDLTAPSIANVGRQIKAGAYQKIDKAQIPHYSNIDKDLLKMMEAVDPGNEYAVPYFWGINTLAINTRQVQKALGTDKLPENEWDLVFNPEYTAKLKSCGISYFDSAIEQIPLALHYLGKDPNSENPEDIKAAVDMMKAVRGDVKRFSSSGYIDDMAAGNLCAAIGYGGDLNIAKTRAEEAANGVEIKVLTPKTGVGVWVDSFMIPRDAQNVANAHRYIDYTLLPEVAAKNGSFVTYAPASRPARELMDEKYTSDASIFPNKELMEKSFIVSPKSAESAKLGVKLWQGLKAGK

SEQ ID NO: 29082 - protein, 620 aa, Neisseria meningitidis; identical to SEQ ID NO: 23783

SEQ ID NO: 29083 - protein, 349 aa, Neisseria meningitidis; identical to SEQ ID NO: 261

SEQ ID NO: 29084 - protein, 259 aa, Neisseria meningitidis
MKEHKARKRFGQNFLQDTRIISDIVNAVRPQADDVVIEIGPGLAAITEPLAKKLNRLHVVEIDRDIVCRLKTLPFADKLVIHEGDVLQFDFNNIEGKKKIVGNLPYNISTPLLFKLAEVADDVVDMHFMLQKEVVERMVAAPKSNDYGRLGVMLQYFFDMEMLIDVPPESFDPAPKVDSAVVRMIPVKHRIGKADDFEHFAKLVKLAFHQRRKTIRNNLKELAGDDDLQAVGINPQDRAEHIAPEKYVALSNYLAGKAV

SEQ ID NO: 29085 - protein, 269 aa, Neisseria meningitidis; identical to SEQ ID NO: 17359

SEQ ID NO: 29086 - protein, 558 aa, Neisseria meningitidis; identical to SEQ ID NO: 1615

SEQ ID NO: 29087 - protein, 335 aa, Neisseria meningitidis; identical to SEQ ID NO: 15345

SEQ ID NO: 29088 - protein, 423 aa, Neisseria meningitidis; identical to SEQ ID NO: 7094

SEQ ID NO: 29089 - protein, 239 aa, Neisseria meningitidis
LTLTRKTLFLLTAAFGTHSLQTASADAVVKAEKLHASANRSYKVAGKRYTPKNQVAEFTQTGNASWYGGRFHGRKTSGGERYDMNAFTAAHKTLPIPSYVRVTNTKNGKSVIVRVNDRGPFHGNRIIDVSKAAAQKLGFVSQGTAHVKIEQIVPGKSAPVAENKDIFIDLKSFGTEHEAQAYLNQAAQNFAASTSSPNLAIEKRRYEYVVKMGPFASQERAAEAEAQARGMIQTVLTAG

SEQ ID NO: 29090 - protein, 92 aa, Neisseria meningitidis; identical to SEQ ID NO: 6203

SEQ ID NO: 29091 - protein, 96 aa, Neisseria meningitidis; identical to SEQ ID NO: 7305

SEQ ID NO: 29092 - protein, 89 aa, Neisseria meningitidis; identical to SEQ ID NO: 494

SEQ ID NO: 29093 - protein, 186 aa, Neisseria meningitidis; identical to SEQ ID NO: 1480

SEQ ID NO: 29094 - protein, 257 aa, Neisseria meningitidis
MRPYATTIYQLFILFIGSVFTMTSCEPVKEQTSFNNPEPMTGFEHTVTFDFQGIKMVIPYGYLARYTQDNATKWLSDTPGQDAYSINLIEISVYYKKTDQGWVLEPYNQQNKAHFIQFLRDGLDSVDDIVIRKDACSLSTTMGERLLTYGVKKMPSAYPEYEAYEDKRHIPENPYFHEFYYIKKGENPAIITHWNNRVNQAEEDNYSTSVGSCINGFTVQYYPFIREKQQLTQQELVGYHQQVEQLVQSFVNNSSKK

SEQ ID NO: 29095 - protein, 426 aa, Neisseria meningitidis; identical to SEQ ID NO: 16691

SEQ ID NO: 29096 - protein, 558 aa, Neisseria meningitidis
MSQQYVYSMLRVSKVVPPQKTIIKDISLSFFPGAKIGLLGLNGAGKSTVLRIMAGVDKEFEGEAVPMGGIKIGYLPQEPELDPEKTVREEVESGLGEVAAAQKRLEEVYAEYANPDADFDALAEEQGRLEAIIAAGSSTGGGAEHELEIAADALRLPEWDAKIDNLSGGEKRRVALCKLLLSKPDMLLLDEPTNHLDAESVEWLEQFLVRFPGTVVAVTHDRYFLDNAAEWILELDRGHGIPWKGNYSSWLEQKEKRLENEAKSEAARVKAMKQELEWVRQNAKGRQAKSKAHLARFEEMSNYEYQKRNETQEIFIPVAERLGNELIEFVNVSKSFGDKVLIDDLSFKVPAGAIVGIIGPNGAGKSTLFKMIAGKEQPDSGEVKIGQTVKMSLIDQSREGLQNDKTVFDNIAEGRDILQVGQFEIPARQYLGRFNFKGSDQSKIAGQLSGGERGRLHLAKTLLGGGNVLLLDEPSNDLDVETLRALEDALLEFAGSVMVISHDRWFLDRIATHILACEGDSKWVFFDGNYQEYEADKKRRLGEEGAKPKRIKYKPVTR

SEQ ID NO: 29097 - protein, 304 aa, Neisseria meningitidis; identical to SEQ ID NO: 3720

SEQ ID NO: 29098 - protein, 369 aa, Neisseria meningitidis; identical to SEQ ID NO: 8556

SEQ ID NO: 29099 - protein, 138 aa, Neisseria meningitidis; identical to SEQ ID NO: 774

SEQ ID NO: 29100 - protein, 307 aa, Neisseria meningitidis; identical to SEQ ID NO: 14708

SEQ ID NO: 29101 - protein, 427 aa, Neisseria meningitidis
MNRNEILFDRAKAIIPGGVNSPVRAFGSVGGVPRFIKKAEGAYVWDENGTRYTDYVGSWGPAIVGHAHPEVIEAVREAALGGLSFGAPTEGEIVIAEEIAKIMPSVERLRLVSSGTEATMTAIRLARGFTGRDKIIKFEGCYHGHSDSLLVKAGSGLLTFGNPSSAGVPADFTKHTLVLEYNNIAQLEEAFAQSGNEIACVIVEPFVGNMNLVRPTEAFVKALRGLTEKYGAVLIYDEVMTGFRVALGGAQSLHGITPDLTTMGKVIGGGMPLAAFGGRKDIMECISPLGGVYQAGTLSGNPIAVAAGLKTLEIIQREGFYENLTARTEQLVQGFRTAADAAGIEFTADSVGGMFGLYFAAHAPRNYADMARSNIEGFKQFFHGMLDRNVAFGPSAYEAGFVSAAHTPELIDETVAVAVEVFKAMAE

SEQ ID NO: 29102 - protein, 351 aa, Neisseria meningitidis; identical to SEQ ID NO: 22858

SEQ ID NO: 29103 - protein, 115 aa, Neisseria meningitidis; identical to SEQ ID NO: 7399

SEQ ID NO: 29104 - protein, 328 aa, Neisseria meningitidis; identical to SEQ ID NO: 6244

SEQ ID NO: 29105 - protein, 187 aa, Neisseria meningitidis; identical to SEQ ID NO: 23702

SEQ ID NO: 29106 - protein, 321 aa, Neisseria meningitidis; identical to SEQ ID NO: 2168

SEQ ID NO: 29107 - protein, 288 aa, Neisseria meningitidis; identical to SEQ ID NO: 2832

SEQ ID NO: 29108 - protein, 716 aa, Neisseria meningitidis
MKTPLLKPLLITSLPVFASVFTAASIVWQLGEPKLAMPFVLGIIAGGLVDLDNRLTGRLKNIIATVALFTLSSLTAQSTLGTGLPFILAMTLMTFGFTILGAVGLKYRTFAFGALAVATYTTLTYTPETYWLTNPFMILCGTVLYSTAIILFQIILPHRPVQESVANAYDALGGYLEAKADFFDPDEAEWIGNRHIDLAMSNTGVITAFNQCRSALFYRLRGKHRHPRTAKMLRYYFAAQDIHERISSAHVDYQEMSEKFKNTDIIFRIHRLLEMQGQACRNTAQALRASKDYVYSKRLGRAIEGCRQSLRLLSDSNDSPDIRHLRRLLDNLGSVDQQFRQLQHNGLQAENDRMGDTRIAALETGSLKNTWQAIRPQLNLESGVFRHAVRLSLVVAAACTIVEALNLNLGYWILLTALFVCQPNYTATKSRVRQRIAGTVLGVIVGSLVPYFTPSVETKLWIVIVSTTLFFMTRTYKYSFSTFFITIQALTSLSLAGLDVYAAMPVRIIDTIIGASLAWAAVSYLWPDWKYLTLERTAALAVCSNGAYLEKITERLKSGETGDDVEYRATRRRAHEHTAALSSTLSDMSSEPAKFADSLQPGFTLLKTGYALTGYISALGAYRSEMHEECSPDFTAQFHLAAEHTAHIFQHLPETEPDDFQTALDTLRGELDTLRTHSSGTQSHILLQQLQLIARQLEPYYRAYRQIPHRQPQNAA

SEQ ID NO: 29109 - protein, 185 aa, Neisseria meningitidis; identical to SEQ ID NO: 23945

SEQ ID NO: 29110 - protein, 104 aa, Neisseria meningitidis; identical to SEQ ID NO: 18463

SEQ ID NO: 29111 - protein, 178 aa, Neisseria meningitidis
MQAISPELQARAAKIKLLILDVDGVLTDGRIFIRDNGEEIKSFHTLDGHGLKMLQVSGVQTAIITGRDAPSVGIRVKQLGINYYFKGISDKRAAYEELRAQVGVEEAECAFVGDDVVDLPVMVRCGLPVAVPDAHWFTLQHAAYIAKRPCGAGAVREVCDLIMQAQGTLGAALNEYIK

SEQ ID NO: 29112 - protein, 158 aa, Neisseria meningitidis; identical to SEQ ID NO: 5652

SEQ ID NO: 29113 - protein, 2273 aa, Neisseria meningitidis; identical to SEQ ID NO: 7649

SEQ ID NO: 29114 - protein, 547 aa, Neisseria meningitidis; identical to SEQ ID NO: 3624

SEQ ID NO: 29115 - protein, 405 aa, Neisseria meningitidis
MTAPVPTCNMSGNPINLHKLTLIMPLPLPSPEARQFSLKLQTLIAEKIGKHGNWIPFSRFMELVLYAPQYGYYTGGSHKIGNTGDFITAPTLTSLFAQTLARQLQELLSQTAGNIYEFGAGTGQLAADLLGSISDGISRYYIIEISPELAARQKNLIQARAPEASQKVVHLTALPEAFDGIIIGNEVLDAMPVEIVRKNEGGSFEHVGVCLDNDRFTYSARPLHDLQLSALASLYFPQTDYPYTSELHPQQYAFIRTLASRLERGGMIFIDYGFDAAQYYHPQRNQGTLIGHYRHHVIHNPFDFIGLADLTAHVNFTDIAQAGTDAGLDLIGYLPQSHFLLNLGITELLAQTGKTDSAAYIREAAAVQKLIDQHEMGELFKVIAFGKNIGIDWAGFRFGDICHKL

SEQ ID NO: 29116 - protein, 417 aa, Neisseria meningitidis
MRKPRITYLDVWANDERIGTLEKGAMYRFAYDNPNSSLLGLHYQDRSKVYISNNMPHIFAQYFPEGFLDAHITSKYAFHDAPFEDNEMLRLAILCRETLGRIHVRCNDPLFNEWIDGLEMKNPRILTERDLLGINARQVFQQYMAEIFHHGRFVSVSGIQQKMSLEAIRRNTKQTASYIAKGFDASEYPCLAANEFLCMQTIKQAGIAVAQTSLSEDSSVLLVRRFDVSEQGYFLGMEDFTSLRQYSVEDKYKGSYAAIAQIIRQISGRPDEDLIHFFNQLAASCILKNGDAHLKNFSVLYHDEYDVRLAPVYDVLDTSIYRVGTQGIFDAYDDTLALNLTNHGKKTYPSKNTLLDFAEKYCDLGREDASFMIDTIVQAKEQVLVKYSDVLRENEWLAQKWHFIPDENEEGLPFTFR

SEQ ID NO: 29117 - protein, 583 aa, Neisseria meningitidis
MIHYKITPSPLDHEWHILLTFTQDDDLPIEISLPNWVPGSYLIRDFSRHITSIHASCNGTSMPLEQIAKNRWHAAAVRGEWQIRYTVYAFDLSVRGSFLTTERGFFDGSCLFLKVEGTETLPHRLELTGIPSEWRIATTLPETGRFVFQAASYAELIDRPVEMGLIEFLDFEAAGIPHTIALSGIYPDFDRNRLVSDIKKICETELAVFSSPAPFQKYLFLLHVGDHIYGGLEHTDSTALLADRHSLPPYGMTDADDTYTTLLGLFSHEYFHAWNVKSIKPAAFVPYDLDKENYTEQLWAFEGITSYYDDLFLARSRTISPESYLNLLAQGITRVQQTRGRLRQTLAESSFTAWNKFYKPDENSPNAIVSYYQKGALAALCLDLIIRNRSNGRHSLDTLMDKLYREWRDTHSGIPEKHWQIRCQEITGLDLEDFFQKALYSTEDLPLAECLATAGVGLTFLPLPRQHGGGYAEHICPVPSAGDFGARFKQNTDHIVLTHVFNGGSAESAALCPQDKIIALDGYACTDFTAQWARYHVNAKINIHFFRAGILRQTVLTVQAAAADTAILHITDRNLLDNWLFGT

SEQ ID NO: 29118 - protein, 573 aa, Neisseria meningitidis; identical to SEQ ID NO: 15087

SEQ ID NO: 29119 - protein, 250 aa, Neisseria meningitidis
MMGDSVIYYVEQADEPVNRAGERARKTFKYFWRELFWERRRIIPALDFAMVKAPFFQDGEICEHMWIDDIYFDGLYIYGVLNNKPGELTNIEQGESICVPVDDISDWMFVCNGIPYGGFTIQAMRGQMTEEERTEHDAAWGIDFGDPGQVLLVYEEKEHPENLEEHPMCRNCIDDFRQQLSQNPDFLHEQDEDGYTPLHHEAIAGNALMVQAMLEYGANPASKTSEGYTALDFARLTGWQNVADLLEPRH

SEQ ID NO: 29120 - protein, 354 aa, Neisseria meningitidis; identical to SEQ ID NO: 7532

SEQ ID NO: 29121 - protein, 77 aa, Neisseria meningitidis; identical to SEQ ID NO: 92

SEQ ID NO: 29122 - protein, 131 aa, Neisseria meningitidis; identical to SEQ ID NO: 14676

SEQ ID NO: 29123 - protein, 382 aa, Neisseria meningitidis; identical to SEQ ID NO: 14188

SEQ ID NO: 29124 - protein, 265 aa, Neisseria meningitidis
MLKQRVITAMWLLPLMLGMLFYAPQWLWAAFCGLIALIALWEYARMSGLCKIKTNHYLAATLVFGVVAYAGGWMLPNLVWYVVLAFWLAIMPLWLRFKWRLNGGWQVYAVGWLLVMPFWFALVSLRPHPDDALPLLAVMGLVWVADVCAYFSGKAFGKHKIAPAISPGKSWEGAIGGAVCVAVYMTSVRSAGWLAFDTGWFDTVLIGLVLTVVSVCGDLLESWLKRAAGIKDSSNLLPGHGGVFDRTDSLIAVISVYAAMMSVLN

SEQ ID NO: 29125 - protein, 226 aa, Neisseria meningitidis; identical to SEQ ID NO: 15274

SEQ ID NO: 29126 - protein, 257 aa, Neisseria meningitidis
MNAIADVQSSRDLRNLPINQVGIKDLRFPISLKSKEGEQSTVAHLTMTVFLPADQKGTHMSRFVALMEKQTEALDFDTLHKLTVDMVALLDSHSGKISVCFPFFRKKSAPVSGIQSLLDYDVTLTGEIKNGTYSHNLKVMVPVTSLCPCSKEISQYGAHNQRSHVTVSLIANADVGIEEIIDYVEAQASCQLYGLLKRPDEKYVTEKAYENPKFVEDMVRDVATSLIADKRIKSFVVESENFESIHNHSAYAYIAYP

SEQ ID NO: 29127 - protein, 284 aa, Neisseria meningitidis
MFYQILALIIWSSSFIAAKYVYGGIDPALMVGVRLLIAALPALPACRRHVGKIPREEWKPLLIVSFVNYVLTLLLQFVGLKYTSAASASVIVGLEPLLMVFVGHFFFNDKARAYHWICGAAAFAGVALLMAGGAEEGGEVGWFGCLLVLLAGAGFCAAMRPTQRLIARIGAPAFTSVSIAAASLMCLPFSLALAQSYTVDWSVGMVLSLLYLGVGCSWYAYWLWNKGMSRVPANVSGLLISLEPVVGVLLAVLILGEHLSPVSVLGVFVVIAATLVAGRLSHQK

SEQ ID NO: 29128 - protein, 176 aa, Neisseria meningitidis
MIQKICKLFVLIAFFSSSPAFALQSDSRQPIQIEADQGSLDQANQSTTFSGNVVIRQGTLNISAARVNVTRNGKGEQFMKADGSPVRFSQTLDGGKGTVRGQANNVAYSSAGSTVVLTGNAKVQRGGDVAEGAVITYNTKTEVYTISGSTKSGAKSASKSGRVSVIIQPSSTQKSE

SEQ ID NO: 29129 - protein, 186 aa, Neisseria meningitidis; identical to SEQ ID NO: 2093

SEQ ID NO: 29130 - protein, 149 aa, Neisseria meningitidis; identical to SEQ ID NO: 6422

SEQ ID NO: 29131 - protein, 120 aa, Neisseria meningitidis; identical to SEQ ID NO: 6845

SEQ ID NO: 29132 - protein, 185 aa, Neisseria meningitidis; identical to SEQ ID NO: 7784

SEQ ID NO: 29133 - protein, 284 aa, Neisseria meningitidis; identical to SEQ ID NO: 4138

SEQ ID NO: 29134 - protein, 202 aa, Neisseria meningitidis
VAEFFFDLRKEIDKEWVFIDGSYVRCHQHASGARRGFDRAIGQSRGGNTTKIHLCVDSHGNPLDFKVTGGNVHDGQVANDLIEVIQEAQYFIADKGYDSQEIRDKAIEHGMKAIIPKRKYDSQEIRDKAIEHGMKAIIPKRKNAKKPNPDFDSYLYKLRHLVENAFARLKQFRSIATRYEKLARNFKSMLYLACSIIHAKLN

SEQ ID NO: 29135 - protein, 407 aa, Neisseria meningitidis; identical to SEQ ID NO: 6500

SEQ ID NO: 29136 - protein, 1391 aa, Neisseria meningitidis; identical to SEQ ID NO: 14495

SEQ ID NO: 29137 - protein, 704 aa, Neisseria meningitidis
MFLFSDGLQSINNNNRRKRIVKNAYIPSRGIRKIPHLFTLLPEFHICKDGKGAEAVIGWGLRPTTHKARAFAAEHQLPFIALEDGFLRSLGLGVAGYPPYSIVYDDIGIYYDTTRPSRLEQLILAADTMPSETLAQAQQAMDFILQHHLSKYNHAPELSDDHPLRSPSKPETVLIIDQTFGDMAIQYGGADASTFELMFQTALNENPQADIWVKTHPDVLCGKKQGYLTQLVQQHRVHLLAEDINPISLLQNIDKVYCVTSQMGFEALLCGKPLTTFGLPWYAGWGVSDDRHPKIDSLVQTQRRAPRNLLQLFAAAYLQYSRYLNPNTGEAGSLFDVIDYLATVKRKNDKLRGELYCVGMSLWKRAVAKPFFNVPSCRLKFISSTQKLAGVKLSDDARILAWGNGKEAIVRFAEQHHIPLLRMEDGFIRSVGLGSNLVPPLSLVTDDMGIYFNAEAPSRLEHILQNQNFDDQDFQTALKLQKMLTENHISKYNVGSSDFTAPSTDKTVILVPGQVEDDASIRYGSPQIYRNLDLLRTVRERNPNAYIIYKPHPDVVSGNRIGHISPEDAARYADQTAEQADILTCLQYADEIHTMTSLTGFEALLRGKKVSCYGLPFYAGWGLTQDLLPIPRRSRRLELWQLIAGTLIHYPDYIHPETHQAINAETAAQILIRQKNMQKNNNGLHRGCFAKKLGKIKQLYRSFK

SEQ ID NO: 29138 - protein, 57 aa, Neisseria meningitidis; identical to SEQ ID NO: 14761

SEQ ID NO: 29139 - protein, 175 aa, Neisseria meningitidis
LGNFAKVSNCEFWDKINYNRAAQAAEQRAKQAQETPKEPPKQEEHFIAKLPNDKLMTIYRLFQKQLDDMRGLERDIERGDWYINARYRMNENRNKIRALEDDNKRLHHDYWAVQDQGENRFFGMGKIGAKLVKENEKQQHINERHGANVREIRRLKTERDLCKIPQNPLNSHQDI

SEQ ID NO: 29140 - protein, 456 aa, Neisseria meningitidis; identical to SEQ ID NO: 24957

SEQ ID NO: 29141 - protein, 167 aa, Neisseria meningitidis; identical to SEQ ID NO: 637

SEQ ID NO: 29142 - protein, 201 aa, Neisseria meningitidis; identical to SEQ ID NO: 3643

SEQ ID NO: 29143 - protein, 531 aa, Neisseria meningitidis; identical to SEQ ID NO: 3351

SEQ ID NO: 29144 - protein, 657 aa, Neisseria meningitidis; identical to SEQ ID NO: 5941

SEQ ID NO: 29145 - protein, 183 aa, Neisseria meningitidis; identical to SEQ ID NO: 8299

SEQ ID NO: 29146 - protein, 311 aa, Neisseria meningitidis
MGHNMMTTQKWYEHITNVIIGNTANFNSGCLDSIDYVDERKGVPLAAMQHIFMDVRAAASHAYLFEHDLKKFKQYAYVAGKLGVLLSVNSTDPEPFFFPCDMLNIQNPMFLMLMSDSPQLREFLVRNIDNIANDTEAFINRYDLNRHMIYNTLLMVEGKQLDRLKQRSEKVLAHPTPSKWLQKRLYDYRFFLAFAEQDAEAMKAALEPLFDKKTARMAAKETLSYFDFYLQPQIVTYAKIASMHGFDLGIDQEISPRDLIVYDPLPADEYQDIFDFMKQYDLSYPYEYLQDWIDYYTFKTDKLVFGNAKRE

SEQ ID NO: 29147 - protein, 333 aa, Neisseria meningitidis
MKRKIWLLPLLAVSAYLQAQTEVRLAVHKSFSLPKGLIARFERANDAKVSIIQAGGANEMLNKLILSRANPIADAVYGLDNANIGKAREMGILAAAQPESAPVAVGLPSALAVDYGYVSINYDKKWFEGKKLPLPQTLQDLTRPEYKNLLVVPSPATSSPGLGFLMANISGMGEEGAFKWWAQMRQNGVKVAKGWSEAYYTDFSHNGGAYPLVVGYAASPAAEVYFSKGKYSEPPTGNLFLKGGVFRQVEGAAVLKGAKQPKLAAKLVQWLQSREVQQAVPSEMWVYPAVKNTRLPDVFRFAQAPTHTTAPAQRDIDANQRGWVSRWIRTVLK

SEQ ID NO: 29148 - protein, 157 aa, Neisseria meningitidis
MSRNNEELQGISLLGNQKTQYPTGYAPEILEAFDNKHPDNDYFVKFVCPEFTSLCPMTGQPDFATIYIRYIPHIKMVESKSLKLYLFSFRNHGDFHEDCVNIIMKDLIALMDPKYIEVFGEFTPRGGIAIHPFANYGKAGTEFEALARKRLFEHDAQ

SEQ ID NO: 29149 - protein, 760 aa, Neisseria meningitidis; identical to SEQ ID NO: 4734

SEQ ID NO: 29150 - protein, 76 aa, Neisseria meningitidis; identical to SEQ ID NO: 374

SEQ ID NO: 29151 - protein, 332 aa, Neisseria meningitidis; identical to SEQ ID NO: 2762

SEQ ID NO: 29152 - protein, 363 aa, Neisseria meningitidis; identical to SEQ ID NO: 22177

SEQ ID NO: 29153 - protein, 392 aa, Neisseria meningitidis
MTGRTGGNGSTQAQPERVMLVGVMLDKDGTGSSAARLNGFQTALAEAVELVKAAGGNPVIVETAKRDRPHTALFVGTGKAAELSEAVAADGIDLVVFNHELTPTQERNLEKILQCRVLDRVGLILAIFARRARTQEGRLQVELAQLSHLAGRLIRGYGHLQSQRGGIGMKGPGETKLETDRRLIAHRINALKKQLANLKKQRALRRKSRESGTIKTFALVGYTNVGKSSLFNRLTKSGIYAKDQLFATLDTTARRLYISPECSIILTDTVGFVSDLPHKLISAFSATLEETAQADVLLHVVDAAASNSGQQIEDVENVLQEIHAGDIPCIKVYNKIDLLPSEEQNTGIWRDAAGKIAAVRISVAENTGIDALREAIAEYCATAPNTDETEMP

SEQ ID NO: 29154 - protein, 263 aa, Neisseria meningitidis
MNVYFLGGGNMAAAVAGGLVKQGGYRIHIANRGAEKRERLQKELGVETSETLPELHSDDVLILAVKPQDMEAACKNIRTNGALVLSVAAGLSVDTLSRYLGGTRRIVRVMPNTPGKIGLGVSGMFAEAEVSETDRRIADRIMKSVGLTVWLEDEAQMHSITGISGSGPAYVFYLLDALQNAAIRQGFDMAEARALSLATFKGAVALAEQTGEDFEKLQKNVTSKGGTTHEAVEAFRRHRVAEAISEGVCACVRRSQEMERQYQ

SEQ ID NO: 29155 - protein, 642 aa, Neisseria meningitidis; identical to SEQ ID NO: 7398

SEQ ID NO: 29156 - protein, 588 aa, Neisseria meningitidis
MNKIYRIIWNSALNAWVAVSELTRNHTKRASATVATAVLATLLFATVQASTTDEDEEEELEPVVRSALVLQFMIDKEGNGENESTGNIGWSIYYDNHNTLHGATVTLKAGDNLKIKQNGTNFTYSLKKALTGLTSVGTEELSFGANGKKVNITSDTKGLNFAKETAGTNGDTTVHLNGIGSTLTDTLAGSSASHVDAGNQSTHYTRAASIKDVLNAGWNIKGVKTGSTTGQSENVDFVRTYDTVEFLSADTKTTTVNVESKDNGKRTEVKIGAKTSVIKEKDGKLVTGKGKGENGSSTDEGEGLVTAKEVIDAVNKAGWRMKTTTANGQTGQADKFETVTSGTNVTFASGKGTTATVSKDAQGNITVKYDVNVGDALNVNQLQNSGWNLDSKAVAGSSGKVISGNVSPSKGKMDETVNINAGNNIEITRNGKNIDIATSMTPQFSSVSLGAGADAPTLSVDGDALNVGSKKDNKPVRITNVAPGVKEGDVTNVAQLKGVAQNLNNRIDNVDGNARAGIAQAIATAGLVQAYLPGKSMMAIGGGTYRGEAGYAIGYSSISDGGNWIIKGTASGNSRGHFGASASVGYQW

SEQ ID NO: 29157 - protein, 488 aa, Neisseria meningitidis; identical to SEQ ID NO: 2117

SEQ ID NO: 29158 - protein, 365 aa, Neisseria meningitidis
LDKWEITIMAKIITPLSANQVKNAKPRDKLYKLSDGGGLALWVYPTGGRSWKLSFVQDGRQQTISLGRYPDFSLADAREWREEVRRKRAHGENVVNKKVRADFAFEKVARDWFVRWSKGRSEKYAGQVMRNFERWVFPAIGNLDIRQIRTADVVGCLRVMEARGIVDTLRKTKNSLKMVFAFAVGSGMMEINPVAQIGSGVFERAKTGNMAALSPSELPRLIDFLEQRNEFAVYAGRVRIHPVTRLCIYWLLLTMTRIQEAALMEWSELDGEVWRIPAERKKERRGHDVPLSRAMQWVLDQARALNVNGRFVFESVNFQGHINKESPRVAMQRAGLDTTAHGLRSLARTYLREVLKVDSIMRKRK

SEQ ID NO: 29159 - protein, 251 aa, Neisseria meningitidis; identical to SEQ ID NO: 9216

SEQ ID NO: 29160 - protein, 38 aa, Neisseria meningitidis; identical to SEQ ID NO: 15032

SEQ ID NO: 29161 - protein, 307 aa, Neisseria meningitidis
MKKRNNPLPLLNGVKPSYLVLPHEKQFYGLPLLHFLCIRFPFVGADDWRRRLNSGFVVGSDGAALDEHTLFEPGKVMFYYRETSSEDEPRIPFEEKILHIDEHLIVVDKPHFLPVIPSGRFLRETLLTRLRLRPELQHLNVEDITPLHRLDKDTAGVMLLSHNPATRGAYQTMFQNKTVWKTYEALALTRTDLPYPLDVVSRLVRGEKFFTTQEVEGVPNAHTTVELIENRGEFSLYRLTPHTGKKHQLRVHMMGLGMPLLNDALYPVPSEAGSEDYRKPLKLLAKKIAFADPLSGLERVFCSRFCL

SEQ ID NO: 29162 - protein, 242 aa, Neisseria meningitidis; identical to SEQ ID NO: 9676

SEQ ID NO: 29163 - protein, 441 aa, Neisseria meningitidis
MKKYLFRAALYGIAAAILAACQSKSIQTFPQPDTSVINGPDRPVGIPDLAGTTVGGGGAVYTVVPHLSLPHWAAQDFAKSLQSFRLGCANLKNRQGWQDVCAQAFQTPVHSFQAKQFFERYFTPWQVAGNGSLAGTVTGYYEPVLKGDDRRTAQARFPIYGIPDDFISVPLPAGLRSGKALVRIRQTGKNSGTIDNTGGTHTADLSRFPITARTTAIKGRFEGSRFLPYHTRNQINGGALDGKAPILGYAEDPVELFFMHIQGSGRLKTPSGKYIRIGYADKNEHPYVSIGRYMADKGYLKLGQTSMQGIKSYMRQNPQRLAEVLGQNPSYIFFRELAGSSNDGPVGALGTPLMGEYAGAVDRHYITLGAPLFVATAHPVTRKALNRLIMAQDTGSAIKGAVRVDYFWGYGDEAGELAGKQKTTGYVWQLLPNGMKPEYRP

SEQ ID NO: 29164 - protein, 299 aa, Neisseria meningitidis; identical to SEQ ID NO: 14164

SEQ ID NO: 29165 - protein, 242 aa, Neisseria meningitidis; identical to SEQ ID NO: 9679

SEQ ID NO: 29166 - protein, 145 aa, Neisseria meningitidis; identical to SEQ ID NO: 1775

SEQ ID NO: 29167 - protein, 313 aa, Neisseria meningitidis; identical to SEQ ID NO: 21751

SEQ ID NO: 29168 - protein, 197 aa, Neisseria meningitidis; identical to SEQ ID NO: 15365

SEQ ID NO: 29169 - protein, 221 aa, Neisseria meningitidis; identical to SEQ ID NO: 15068

SEQ ID NO: 29170 - protein, 366 aa, Neisseria meningitidis; identical to SEQ ID NO: 6349

SEQ ID NO: 29171 - protein, 205 aa, Neisseria meningitidis; identical to SEQ ID NO: 2641

SEQ ID NO: 29172 - protein, 316 aa, Neisseria meningitidis; identical to SEQ ID NO: 5301

SEQ ID NO: 29173 - protein, 263 aa, Neisseria meningitidis
MARHPYRRLRPAKSSFPEVGISEEGNIRSLHLGSDTVQSSMNLDHPSELVLSYSRAMMGWLLFTDALPQHITQIGLGGGSFARWIDTYLPDTRQTAVDINPQVIAIARNLFELPFEGEKFEIIEADGAEYIKVFRHNTDVILVDGFDGEQIIDALVEEPFFRDCRNALSSDGIFVTNWWSGDKRYQRFIERLLSVFEGRVLELPAESHGNVAVMAFQSSPKEQNIDKLKKRADKLSNAYGLDFHRMLAGLKASNPNNGKHFYL

SEQ ID NO: 29174 - protein, 226 aa, Neisseria meningitidis; identical to SEQ ID NO: 7580

SEQ ID NO: 29175 - protein, 106 aa, Neisseria meningitidis; identical to SEQ ID NO: 2510

SEQ ID NO: 29176 - protein, 123 aa, Neisseria meningitidis
MRFYIDNKECDYIFFRKAVNISDDFIQSGFITPEGLITKNSNPKLFNQYSKMVSKNKCQYEMVTFLSDEMKNIIELLSNDDAYIEFAYSEDFYVLPEIEIDKRTLKSLNFYIDFGVKYIINKI

SEQ ID NO: 29177 - protein, 280 aa, Neisseria meningitidis
MCQLLGMNCNTPTDIMFSFEGFRRRGGITDHHADGFGIGFFEGKGVRLFHDDKPSANSPVADLVRAYQIKSENVIAHIRKASQGQTSLANTHPFMREMWGGYWLFAHNGHLIDFFPEQGEFFHPVGTTDSERAFCHILNRLRTRFAARPDDDTLFDAIAGLTHEIRKFGLFNFMLSDGIALFAHASTLLHYIVRQAPFGKARLLDDDVMVDFAEVTTPSDRVAVIATLPLTRDESWSQLAVDELVMFREGKIILNDRPRHPVYMSVEEGLETARAAGVAV

SEQ ID NO: 29178 - protein, 264 aa, Neisseria meningitidis; identical to SEQ ID NO: 7645

SEQ ID NO: 29179 - protein, 66 aa, Neisseria meningitidis; identical to SEQ ID NO: 2062

SEQ ID NO: 29180 - protein, 436 aa, Neisseria meningitidis; identical to SEQ ID NO: 6841

SEQ ID NO: 29181 - protein, 241 aa, Neisseria meningitidis; identical to SEQ ID NO: 6741

SEQ ID NO: 29182 - protein, 461 aa, Neisseria meningitidis
MDGWTQTLSAQTLLGISAAAIILILILIVKFRIHALLTLVIVSLLTALATGLPTGSIVNDVLVKNFGGTLGGVALLVGLGAMLGRLVETSGGAQSLADALIRMFGEKRAPFALGVASLIFGFPIFFDAGLIVMLPIVFATARRMKQDVLPFALASIGAFSVMHVFLPPHPGPIAASEFYGANIGQVLILGLPTAFITWYFSGYMLGKVLGRTIHVPVPELLSGGTQDNDLPKEPAKAGTVVAIMLIPMLLIFLNTGVSALISEKLVSADETWVQTAKIIGSTPIALLISVLVALFVLGRKRGESGSALEKTVDGALAPVCSVILITGAGGMFGGVLRASGIGKALADSMADLGIPVLLGCFLVALALRIAQGSATVALTTTAALMAPAVAAAGFTDWQLACIVLATAAGSVGCSHFNDSGFWLVGRLLDMDVPTTLKTWTVNQTLIALIGFALSALLFSIV

SEQ ID NO: 29183 - protein, 291 aa, Neisseria meningitidis; identical to SEQ ID NO: 17525

SEQ ID NO: 29184 - protein, 43 aa, Neisseria meningitidis; identical to SEQ ID NO: 3165

SEQ ID NO: 29185 - protein, 249 aa, Neisseria meningitidis; identical to SEQ ID NO: 6142

SEQ ID NO: 29186 - protein, 71 aa, Neisseria meningitidis; identical to SEQ ID NO: 14434

SEQ ID NO: 29187 - protein, 307 aa, Neisseria meningitidis; identical to SEQ ID NO: 526

SEQ ID NO: 29188 - protein, 275 aa, Neisseria meningitidis; identical to SEQ ID NO: 12127

SEQ ID NO: 29189 - protein, 498 aa, Neisseria meningitidis
MSLALVYSRALSGMNAPLVEVEAHLANGLPHFNIVGLPDTEVKESRDRVRAAIIQSGFEFPAKKITVNLAPADLPKESGRFDLPIAIGILAASGQVAPEKLAEYEFAGELALSGLLRPVRGALAMAWQGMQAKRAFVLPEENAGQAAVMRGITVYGARSLGEVAAHLNGIEPLVQTDCQVPQMPSENTKLLDLVDVKGQHTARLALEIAAAGGHSLLMMGPPGTGKSMLSQRLPGILPPLTEDELVEVWALRSLLPNHQQQLDSNRPFRSPHHSASAAAMVGGGSDPRPGEISLAHHGVLFLDELPEFDRKVLEVLREPLENGEIHISRAARQAVYPAKFQLVAAMNPCPCGYLGHPVKPCRCTPESVARYRSKISGPLLDRIDLTIEVPSLSAAELMQQEAGESSASVLERVIAARDKQYARQGKVNAALSVSELDSQARIQKEAQEALGSLLEKLSLSARSFHRIMRVARTLADLAGDEEVGRSHVMKAIGFRRAL

SEQ ID NO: 29190 - protein, 163 aa, Neisseria meningitidis; identical to SEQ ID NO: 5302

SEQ ID NO: 29191 - protein, 187 aa, Neisseria meningitidis; identical to SEQ ID NO: 18399

SEQ ID NO: 29192 - protein, 105 aa, Neisseria meningitidis
MGNKLTPPAKLPDEQDLRAVLAYNMRLFRVNKGWSQEELARQCGLDRTYVSAVERKRWNIALSNIEKMAAALGVAAYQLLLPPQERLKLMTNSADTRQMPSESGI

SEQ ID NO: 29193 - protein, 590 aa, Neisseria meningitidis
MIPSDFIDELLAKTDIVDIIDEQVPLKKGGANYMACCPFHKEKTPSFSVSPTKQFYHCFSCGAHGSAIGFVMEHQGLSFPEAVQFLADRVGMIVPKVRGQNDNPEVRAERKKKQQTLEETTAAAADFYAQQLKFNPAAKAYLDKRGLSAEVIAHYGLGYAPDGWQPLAQVFQLYPNTALVDTGMVIDNEGRYYDRFRHRIMFPIRNPRGQVIGFGGRVLDDSKPKYLNSPDTPLFDKGKNLYGLYEGRAAVKEAERILVVEGYMDVVALAQFGVGYGVAALGTATTAEHVKILMRQADSIYFCFDGDSAGRKAAWRALENALPQLKDDKSLHFLFLPEEHDPDSYIRAYGKAQFEDALLNQSKPLSEYFWEHLSDGIHLNTQEGKAELVKTSSPLLAQITASALAYLLKQRLSELVGIDPDNLAQLLGQEAPKRHVKQKNYKLPPISVKQPVMPTLVQRQIRSLLINPDWAAYIDLPDYLALDGDFACLANLAETIKNHPSVPATAQVLEHMRGSPYEETINRIFRSALQSEEMEGGGEEDCENFQIGIKKLLNELKYSQIETLKQKSLQSGLNESEKKLLLSLLTAKQN

SEQ ID NO: 29194 - protein, 475 aa, Neisseria meningitidis; identical to SEQ ID NO: 14755

SEQ ID NO: 29195 - protein, 164 aa, Neisseria meningitidis; identical to SEQ ID NO: 7379

SEQ ID NO: 29196 - protein, 135 aa, Neisseria meningitidis
MTVWFVAAVAVLIIELLTGTVYLLVVSAALAGSGIAYGLTGSTPAAVLTAALLSALGIWFVHAKTAVGKVETDSYQDLDAGQYAEILRHAGGNRYEVFYRGTHWQAQNTGQEELEPGTRALIVRKEGNLLIIAKP

SEQ ID NO: 29197 - protein, 255 aa, Neisseria meningitidis
MQTRILSAVLLTFSTAAFAGGAFTLQFDNPSEDGGFTQNQILSAPYGFGCSGGNAPPALSWKNPPAGTKSFVLTVYDKDAPTGLGWMHWVVADIPADVRRRNAASLQLSRCANIADRTGLDALGGRRHSRRCPPPQRGLAAIKPLRQHRRRPVRSHIGGNQFADLPHQVDAFVHGKTDAVMLQPRQHAAKRGLRHIVRHFFIRQHRSRIIKRRAHPPGVRQLHRIAHCLRRPVLCGEPFYGFLFESNPLRLIEAV

SEQ ID NO: 29198 - protein, 89 aa, Neisseria meningitidis; identical to SEQ ID NO: 19801

SEQ ID NO: 29199 - protein, 65 aa, Neisseria meningitidis; identical to SEQ ID NO: 1389

SEQ ID NO: 29200 - protein, 115 aa, Neisseria meningitidis; identical to SEQ ID NO: 3528

SEQ ID NO: 29201 - protein, 261 aa, Neisseria meningitidis
MGFLQGKKILITGMISERSIAYGIAKACREQGAELAFTYVVDKLEERVRKMAAELGSELVFRCDVASDDEINQVFADLGKHWDGLDGLVHSIGFAPKEALSGDFLDSISREAFNTAHEISAYSLPALAKAARPMMRGRNSAIVALSYLGAVRAIPNYNVMGMAKASLEAGIRFTAACLGKEGIRCNGISAGPIKTLAASGIADFGKLLGHVAAHNPLRRNVTIEEVGNTAAFLLSDLSSGITGEITYVDGGYSINALSTEG

SEQ ID NO: 29202 - protein, 138 aa, Neisseria meningitidis; identical to SEQ ID NO: 489

SEQ ID NO: 29203 - protein, 169 aa, Neisseria meningitidis; identical to SEQ ID NO: 6257

SEQ ID NO: 29204 - protein, 274 aa, Neisseria meningitidis; identical to SEQ ID NO: 22917

SEQ ID NO: 29205 - protein, 318 aa, Neisseria meningitidis; identical to SEQ ID NO: 19132

SEQ ID NO: 29206 - protein, 422 aa, Neisseria meningitidis
VKPLRRLTNLLAACAVAAAAFGQPALAADLAQDPFITDNAQRQHYEPGGKYHLFGDPRGSVSDRTGKINVIQDYTHQMGNLLIQQAAIQGNLGYTVRFSGHGHEEHAPFDNHAADSASKEQGNVDEGFTVYRLNWEGHEHHPADAYDGPKGGNYPKPTGARDEYTYHVNGTARSIKLNPTDTRSIRQRISDNYSNLGSNFSDRADEANRKMFEHNAKLDRWGNSMEFINGVAAGALNPFISAGEAVDQWMQENPNAAETVEALVNVLPFAKVKNLTKAAKPGKAAVSGDFSDSYKHNTASRLSQSVDGEMFQTRNVDFKAKSIGTKIHDGAQGKHISGHRNYIEGKSTLNQNINPQELLNGIHSGAYPVISKGARGNPVVDFGYPIGSDGKSGLSTNFGTIHSGKNGVHIVPANPKTIKKVQ

SEQ ID NO: 29207 - protein, 242 aa, Neisseria meningitidis; identical to SEQ ID NO: 1952

SEQ ID NO: 29208 - protein, 107 aa, Neisseria meningitidis; identical to SEQ ID NO: 15908

SEQ ID NO: 29209 - protein, 260 aa, Neisseria meningitidis
MESLTAINKSRIRQAFQKALNDYDRHALIQQKMTINLMAHLQDYLPDMPLENVLELGCGSGMLSALLQKQISANYWLFNDLCDVQPQLAEKLPQSFDFYCGDAENFPFQRQFDLIASASAVQWFHQPDAFIAHCKTGLKANGLLAVATFGKDNLKEVRQITNIGLNYPTLSQWQTWLAKDFELLWCEDFKVILDFDTPLDVLKHLKYTGVTATNQKNWTRKNLNGFIGDYLSAFGMPSGKVHLTYHPLFFIARYSAAGRQ

SEQ ID NO: 29210 - protein, 400 aa, Neisseria meningitidis; identical to SEQ ID NO: 8056

SEQ ID NO: 29211 - protein, 581 aa, Neisseria meningitidis; identical to SEQ ID NO: 2972

SEQ ID NO: 29212 - protein, 413 aa, Neisseria meningitidis; identical to SEQ ID NO: 15377

SEQ ID NO: 29213 - protein, 166 aa, Neisseria meningitidis; identical to SEQ ID NO: 1704

SEQ ID NO: 29214 - protein, 99 aa, Neisseria meningitidis
MTASMYILLVLALIFANVPFLTTRLFGVAALKRKHFGHHLIELAAGFALTAVLAYILESRVGAVHNQGWEFYATVVCLYLIFAFPCFVWRYFWHTRNRE

SEQ ID NO: 29215 - protein, 160 aa, Neisseria meningitidis; identical to SEQ ID NO: 70

SEQ ID NO: 29216 - protein, 383 aa, Neisseria meningitidis; identical to SEQ ID NO: 15307

SEQ ID NO: 29217 - protein, 123 aa, Neisseria meningitidis; identical to SEQ ID NO: 1296

SEQ ID NO: 29218 - protein, 267 aa, Neisseria meningitidis; identical to SEQ ID NO: 14317

SEQ ID NO: 29219 - protein, 314 aa, Neisseria meningitidis; identical to SEQ ID NO: 15538

SEQ ID NO: 29220 - protein, 693 aa, Neisseria meningitidis
MIYGSMPSEKLTIFQTAFVMQVNIQIPCMLYRRGSVKPPLFEAPRLLPSFTDPVVPKLSAPGGYIVDIPKGNLKTEIEKLAKQPEYAYLKQLQTAKNVDWKQVQLAYDKWDYKQEGLTGAGAAIVVIIVTALTYGYGAAAAGSVTAAGSSTAAAATTTAAATTTVSTAAAMQTAALASLYSQAAVAIINNKGDVGKALKDLGTSDTVKQIVTSALTAGALNQMGADIAQLNSKVRTELFSSTGNQTIANLGGRLATNLSNAGISAGINTAVNGGSLKDNLGNAALGALVNSFQGEAASKIKTTFSDDYVAKQFAHALAGCVSGLVQGKCKDGAIGAAVGEIVAESILGGRNPATLSDAEKHKVISYSKIIAGSVAALNGGDVNTAANAAEVAVVNNALNFDSTPTNAKKHQPQKPDKTALEKIIQSIMPAHAAGAMTNPQDKDAAIWISNIRNGITGPIVITSYGVYAAGWTAPLIGTAGKAAISTCMANPSGCTVMVTQAAEAGAGIVTGAVTVGNAWEAPVGALSKAKAAKQAAPKETINNLANLAKAEQQILFRIAQRDTQLDAWKTGFNNRVRKGAGLLDASNIPITINGKTIKPVQAISLKGAPVYSGVSEQEIFALYRQMTGQNPNFRVLPDGRLANGIISTGEWAGTKIALRNFSKTENSTQARWTLDLQNPPSFIKGTKLELKFQ

SEQ ID NO: 29221 - protein, 96 aa, Neisseria meningitidis; identical to SEQ ID NO: 5466

SEQ ID NO: 29222 - protein, 193 aa, Neisseria meningitidis; identical to SEQ ID NO: 1600

SEQ ID NO: 29223 - protein, 139 aa, Neisseria meningitidis
MKKPLMITLTGMLAACATGVNVGRLMVEMPQGERSVVVQVPATNNPLSDTVAVGMIKTSGSPSASNMIEMLGADNINVGVVGSSQMLNKATALYSLNHAKKVGNNVSVYMMGDSESDKADLENAANAKNIKLHYFFNQK

SEQ ID NO: 29224 - protein, 212 aa, Neisseria meningitidis; identical to SEQ ID NO: 14185

SEQ ID NO: 29225 - protein, 516 aa, Neisseria meningitidis; identical to SEQ ID NO: 23879

SEQ ID NO: 29226 - protein, 938 aa, Neisseria meningitidis
MSNRPTLLLVDGSSYLYRAYHAMGQNLTAPDGAPTGALYGVLNMLRRLRSEYPHDYCAVVFDAKGKNFRHQMFEEYKATRPPMPDDLRPQAEALPDLVRLTGWPVLVIGQVEADDVIGTLAKQGAEHGLRVIVSTGDKDMAQLVDERVTLVNTMSSETLDIEGVKAKFGVRPDQIRDYLALMGDKVDNVPGVEKCGPKTAVKWLEAYGSLAGVMEHASEIKGKVGENLQAALPQLPLSYDLVTIKTDVDLHAELSDGIESLRRTTPKWAQLVVDFKRWGFRTWLKEAESNMNTGSTDDLFGSDSIGEQAALNAEMPFEKQAEKATAPEKLDYQAVTTEAQFAALLDKLSRADTIGIDTETTSLDAMNASLVGISIAFQAGEAVYIPVGHSLTAAPEQLDLQDVLGRLKPHLENPALKKIGQNLKYDQHVFANYGIALNGIAGDSMLASYIIESHLGHGLDELSGRWLGLETITYESLCGKGAKQIGFADVAIGQATEYAAQDADFALRLEAHLRAQMDEKQLEMYEKMELPVAQVLFEMERNGVQIDRAELARQSAELGAELMKLEQEAYAAAGQPFNLNSPKQLQEILFDKMGIPTKGLKKTAKGGISTNEAVLEQLAPDYPLPKIILQNRSLAKLKSTYTDKLPEMISPKDGRVHTTYAQAVAITGRLASNNPNLQNIPIRTEEGRKVRRAFTAPQGSVIVSADYSQIELRIMAHLSGDKTLIAAFQNGEDVHRRTAAEVFGTAPENVSSEQRRYAKTINFGLIYGMGQYGLAKSLGIDNLSAKNFIDRYFDRYPGVAEYMQRTKEQAAAQGYVETLFGRRLYLPDIRNKNANARAGAERAAINAPMQGTASDLIKRAMIDVSRWLSECEASPWDELLQSKLIMQVHDELVLEVVETELDFVKEKLPQIMAKVDGGLLDVPLVAEVGVGENWEEAH

SEQ ID NO: 29227 - protein, 318 aa, Neisseria meningitidis; identical to SEQ ID NO: 12498

SEQ ID NO: 29228 - protein, 187 aa, Neisseria meningitidis; identical to SEQ ID NO: 17392

SEQ ID NO: 29229 - protein, 580 aa, Neisseria meningitidis
MKFFPAPCLLVILAVIPLKTLAADENDAELIRSMQRQQHIDAELLTDANVRFEQPLEKNNYVLSEDETPCTRVNYISLDDKTARKFSFLPSVLMKETAFKTGMCLGSNNLSRLQKAAQQILIVRGYLTSQAIIQPQNMDSGILKLRVSAGEIGDIRYEEKRDGKSAEGSISTFNNKFPLYRNKILNLRDVEQGLENLRRLSSVKTDIQIIPSEEEGKSDLQIKWQQNKPIRFSIGIDDAGGKTTGKYQGNVALSFDNPLGLSDLFYVSYGRGLVHKTDLTDATGTETESGSRSYSVHYSVPVKKWLFSFNHNGHRYHEATEGYSVNYDYNGKQYQSSLAAERMLWRNRLHKTSVGMKLWTRQTYKYIDDAEIEVQRRRSAGWEAELRHRAYLNRWQLDGKLSYKRGTGMRQSMPAPEENGGDILPGTSRMKIITAGLDAAAPFILGKQQFFYATAIQAQWNKTPLVAQDKLSIGSRYTVRGFDGEQSLFGERGFYWQNTLTWYFHPNHQFYLGADYGRVSGESAQYVSGKQLMGAVVGFRGGHKVGGMFAYDLFAGKPLHKPKGFQTTNTVYGFNLNYSF

SEQ ID NO: 29230 - protein, 153 aa, Neisseria meningitidis; identical to SEQ ID NO: 750

SEQ ID NO: 29231 - protein, 245 aa, Neisseria meningitidis; identical to SEQ ID NO: 6094

SEQ ID NO: 29232 - protein, 332 aa, Neisseria meningitidis; identical to SEQ ID NO: 16068

SEQ ID NO: 29233 - protein, 144 aa, Neisseria meningitidis; identical to SEQ ID NO: 3606

SEQ ID NO: 29234 - protein, 44 aa, Neisseria meningitidis; identical to SEQ ID NO: 6328

SEQ ID NO: 29235 - protein, 340 aa, Neisseria meningitidis
LAADRTIPEPSKTRYLRDYRGRPAYPLLSMFKAVLLGQWHSLSDPELEHSLITRIDFNLFCRFDELSIPDYSTLCRYRNRLAQDNTLSELLELINRQLTEKGLKIEKASAAVVDATIIQTAGSKQRQAIEVDEEGQISGQTTPSKDKDARWIKKNGLYKLGYKQHTRTDEEGYIKKLHITPANAHECKHLSPLLEGLPKGTTVYADKGYDSAENRQHLEEHQLLDGIMRKACRNRPLTETQTKRNRYLSKTRYSGLNLNQDKATKQQTVQIVRQGEATPYWFKFNPLYVVEQSFGTLHRKFRYARAAYFGLIKVSAQSHLKAMCLNLLKAANRLSAPAAA

SEQ ID NO: 29236 - protein, 363 aa, Neisseria meningitidis; identical to SEQ ID NO: 15367

SEQ ID NO: 29237 - protein, 312 aa, Neisseria meningitidis; identical to SEQ ID NO: 8892

SEQ ID NO: 29238 - protein, 338 aa, Neisseria meningitidis
MNTRPFYFGLIFIAIIAILANYLGNTDFSHHYHISALIIAILLGMAIGNTIYPQFSTQVEKGVLFAKGALLRTGIVLYGFRLTFGDIADVGLNAVVTDAIMLISTFFFTVLLGIRYLKMDKQLVYLTGAGCSICGAAAVMAAESVTKAESHKASVAIAIVVIFGTLAIFTYPLFYTWSQDLINAHQFGIYVGSSVHEVAQVYAIGENIDPIVANTAVISKMIRVMMLAPFLLMLSWLLTRSNGVSENTSHKITIPWFAVLFIGVAIFNSFDLLPKELVKLFVEIDSFLLISSMAALGLTTQASAIKKAGLKPFVLGILTYLWLVVGGFLVNYGISKLI

SEQ ID NO: 29239 - protein, 87 aa, Neisseria meningitidis; identical to SEQ ID NO: 11737

SEQ ID NO: 29240 - protein, 208 aa, Neisseria meningitidis
MTQERLPEFFDRAPTLTVQDPLAAFLGAAENGILTYRYADAVRLCGHSCPTVAGAYLMVIKGLKALYGEELPERGGIEAAMQGARDEGTVGVTASVVQLLTGAAPETGFGGIGIQGRFARRNLLSFGAGEINGTLALRRRDTGKTVAVSLNAALQPFAPQMRDIMPKAVSGSASTDELKHFGQLWQARVKAFLTESADDPQFVIVREV

SEQ ID NO: 29241 - protein, 387 aa, Neisseria meningitidis
MRKKLTALVLSALPLAAVADVSLYGEIKAGVEGRNFQLQLTEPPSKSQSQVKVTKAKSRIRTKISDFGSFIGFKGSEDLGEGLKAVWQLEQDVSVAGGGATQWGNRESFVGLAGEFGTLRAGRVANQFDDASQAIDPWDSNNDVASQLGIFKRHDDMPVSVRYDSPDFSGFSGSVQFVPIQNSKSAYTPAHYTRQNNIDVFVPAVVGKPGSDVYYAGLNYKNGGFAGSYAFKYARHANVGRDAFELFLLGSTSDEAKGTDPLKNHQVHRLTGGYEEGGLNLALAAQLDLSENGDKAKTKNSTTEIAATASYRFGNAVPRISYAHGFDLIERGKKGENTSYDQIIAGVDYDFSKRTSAIVSGAWLKRNTGIGNYTQINAASVGLRHKF

SEQ ID NO: 29242 - protein, 90 aa, Neisseria meningitidis; identical to SEQ ID NO: 1115

SEQ ID NO: 29243 - protein, 383 aa, Neisseria meningitidis
MSNRDQLFKAPPFENHSPLTWYQAASQLPNFIRDDAQAAAIEHLDRLWTELMMFKRKRNRFLGRSLRSPQVPKGLYFYGGVGRGKSFLMDAFFGCLPYRRKRRVHFHAFMAEIHQRLKTLKSESNPLKSVAAEIAKETRVLCFDEFHVSDIADAMILGRLLENLLNEGVVLVATSNYAPSELYPQGQNRSSFLPTIALIESSLTVLNVDGGEDYRLRTLRPAEIFFTPANEENEAKLAKLFKEMTGITDLNPGISTIHGREIPHKAESGRAIWFDFRALCFGPRSQSDYLYLTEHYEMVFISGLEQLSPQEKAEARRLTWLIDVLYDFRVKLCATGAVDVNHIYTEGDFAEEFTRTASRMVEMQSEVYLEQPHLTLSPKASGG

SEQ ID NO: 29244 - protein, 79 aa, Neisseria meningitidis; identical to SEQ ID NO: 14448

SEQ ID NO: 29245 - protein, 259 aa, Neisseria meningitidis; identical to SEQ ID NO: 588

SEQ ID NO: 29246 - protein, 63 aa, Neisseria meningitidis; identical to SEQ ID NO: 7354

SEQ ID NO: 29247 - protein, 111 aa, Neisseria meningitidis; identical to SEQ ID NO: 7149

SEQ ID NO: 29248 - protein, 949 aa, Neisseria meningitidis; identical to SEQ ID NO: 17258

SEQ ID NO: 29249 - protein, 101 aa, Neisseria meningitidis; identical to SEQ ID NO: 1118

SEQ ID NO: 29250 - protein, 299 aa, Neisseria meningitidis; identical to SEQ ID NO: 14953

SEQ ID NO: 29251 - protein, 215 aa, Neisseria meningitidis
MKGVYFVSGIDTDIGKTVATGVLAKQLLQQGKSVITQKPVQTGCQNIADDIAVHRKIMGKPMQEADKQGLTMPEIFSYPASPHLAARLDGRALDLDKIRTATQELAAQYEVVLVEGAGGLMVPLTENLLTIDYIRQQGYPVILVTSGRLGSINHTLLSFAALKQYGIRLYSLVFNHIHDSRDAHIAQYSLSYLKCRLKADFSEAEWMELAKTDAV

SEQ ID NO: 29252 - protein, 290 aa, Neisseria meningitidis; identical to SEQ ID NO: 8768

SEQ ID NO: 29253 - protein, 140 aa, Neisseria meningitidis; identical to SEQ ID NO: 4408

SEQ ID NO: 29254 - protein, 480 aa, Neisseria meningitidis
MHPTYSAVQARLLEANRLSPELLAKSLCIIGAHHVDYADIYCQRTAYESWHLEEGIVKSGSFQINQGVGVRAVSGDKTAFAYADSLCIDSINRSARAVRAIGAAGGKVSAKMPSETRGKPVCSASDPIAGLDSAAKVALLNKVEAIAKAADPRIVQVMAGLTCEYDMVYLARLDGKHAADIRPMVRLNVTVIAKQGERREQGSAGGGGRYDLAYFDENLVRQFVDAAVKQALTNLESRPAPAGEMTVVLGNGWPGVLLHEAVGHGLEGDFNRKGTSVFSGRIGERVAAKGVTVVDQGDIAGRRGSLNIDDEGNETRRTVLIEDGILTGYMQDETNARLTGTQSTGNGRRESYASVPMPRMTNTFMENGSYEPEEIIASIDKGIYAVNFGGGQVDITSGKFVFSASEAWWVEGGRLQYPVKGATIIGNGPEVLKHVSMIGNDTALDSGVGVCGKEGQSVPVGVGQPTLRIDAGLTVGGSAI

SEQ ID NO: 29255 - protein, 133 aa, Neisseria meningitidis; identical to SEQ ID NO: 8

SEQ ID NO: 29256 - protein, 188 aa, Neisseria meningitidis; identical to SEQ ID NO: 6079

SEQ ID NO: 29257 - protein, 136 aa, Neisseria meningitidis; identical to SEQ ID NO: 17837

SEQ ID NO: 29258 - protein, 221 aa, Neisseria meningitidis; identical to SEQ ID NO: 3662

SEQ ID NO: 29259 - protein, 92 aa, Neisseria meningitidis; identical to SEQ ID NO: 600

SEQ ID NO: 29260 - protein, 475 aa, Neisseria meningitidis; identical to SEQ ID NO: 15100

SEQ ID NO: 29261 - protein, 60 aa, Neisseria meningitidis; identical to SEQ ID NO: 4635

SEQ ID NO: 29262 - protein, 381 aa, Neisseria meningitidis; identical to SEQ ID NO: 15574

SEQ ID NO: 29263 - protein, 332 aa, Neisseria meningitidis
VIASRLSGNISSAIQEHKDGKVNINRFQNILADLYSLGGLGSTLIEKNGNMQSWGIPLAIAGDIIAATAIATGDTGTISTEEFYNFDNWKGFGYELFEDWSRWVYDWLPDGWNLWKELDRNRSGQYHIYDPLALDLDGDGIETVAAKGFSGSLFDHNGNGIRTATGWVSADDGLLVRDLNGNGIIDNGAELFGDNTKLADGSFAKHGYAALAELDSNGDNIINAADAAFQSLRVWQDLNQDGISQTNELRTLEELGIQSLDLAYKDVNKNLGNGNTLAQQGSYTKTDGTTAKMGDLLLAADNLHSRFTNKMLSISHVRENTISPFVLGCLNK

SEQ ID NO: 29264 - protein, 370 aa, Neisseria meningitidis; identical to SEQ ID NO: 6893

SEQ ID NO: 29265 - protein, 51 aa, Neisseria meningitidis; identical to SEQ ID NO: 1536

SEQ ID NO: 29266 - protein, 196 aa, Neisseria meningitidis; identical to SEQ ID NO: 6860

SEQ ID NO: 29267 - protein, 255 aa, Neisseria meningitidis; identical to SEQ ID NO: 23840

SEQ ID NO: 29268 - protein, 322 aa, Neisseria meningitidis; identical to SEQ ID NO: 7028

SEQ ID NO: 29269 - protein, 110 aa, Neisseria meningitidis; identical to SEQ ID NO: 7667

SEQ ID NO: 29270 - protein, 145 aa, Neisseria meningitidis; identical to SEQ ID NO: 2729

SEQ ID NO: 29271 - protein, 179 aa, Neisseria meningitidis; identical to SEQ ID NO: 403

SEQ ID NO: 29272 - protein, 1032 aa, Neisseria meningitidis
MNLETKPIAETPNFIVLDQYEKIEQSGSYQSENRLEAELIADLQNQGYEYRKDLNSQSRLLENLRAQLQRLNNVAFSDGEWARFLTEYLDRPSENITDKTRKIHDDHIYDFAFDDGRLKNIYLLDKKNLARNHVQVINQFEQTGTHANRYDVTVLVNGLPLVQIELKKRGVAVREAFNQVHRYSKESFNSENSLFKFLQIFVISNGTDTRYFANTTKRDKNSFDFTMNWARSDNHLIKDLKDFTATFLQKSVLLSVLLHYSVFDANDTLLIMRPYQIAAAERILWKINSSAQAKNWSKPESGGYVWHTTGSGKTLTSFKAARLATESAFIDKVFFVVDRKDLDYQTMKEYQRFSTDSVNGSESTAGLKRNLEKDDNKIIVTTIQKLNNLMKSEDNLPVYHQRVVFIFDECHRSQFGEAQKNLKKKFKKFCQFGFTGTPIFPENALGAETTAGVFGRELHSYVITDAIRDEKVLKFKVDYNDVRPQFKAVEAEQDEKKLSAAENRQALLHPERIREITQYILNQFRQKTHRLNAGGKGFNAMFAVSSVDAAKCYYEAFKTQQAGSLHPLKVATIFSFAANEEQNAVGEIVDETFEPEAMDSSAKEFLQAAINDYNACFKTNFGTDSKSFQNYYRDLAKRVKNQEVDLLIVVGMFLTGFDAPTLNTLFVDKNLRYHGLMQAFSRTNRIYDATKTFGNIVCFRDLEQATIDAITLFGDKNTKNVVLEKSYEEYMNGYIDDRTGEVRRGYLDVAKELRERFPDPDEIETEKDKKDFAKLFGEYLRAENVLQNYDEFAALRELQNVDAADEDAMKAFQEKYYLSDEDVQEMRQVPMPSERAVQDYRSAYNDIRDWLSRQKAGEQKEQSKIDWDDVVFEVDLLKSQEINLDYILQLVFEHHKKIKGKAELVEEIRRIIRASIGHRAKEGLIVDFINDTDLDKVPDVPAILETFYTYAQEVMRHEAAGLIAAEGLNETAAKRYLISSLKRGYASENGTELTETLPKMSPLNPQYLTKKQSVFQKIAAFVEKFAGIGTDI

SEQ ID NO: 29273 - protein, 527 aa, Neisseria meningitidis; identical to SEQ ID NO: 14198

SEQ ID NO: 29274 - protein, 723 aa, Neisseria meningitidis
MNTPLFRLSLLSLTLAAGFAHAAENNAKVVLDTVTVKGDRQGSKIRTNIVTLQQKDESTATDMRELLKEEPSIDFGGGNGTSQFLTLRGMGQNSVDIKVDNAYSDSQILYHQGRFIVDPALVKVVSVQKGAGSASAGIGATNGAIIAKTVDAQDLLKGLDKNWGVRLNSGFASNEGVSYGASVFGKEGNFDGLFSYNRNDEKEYEAGKGFRNFNGGKTVPYSALDKRSYLAKIGTTFGDGDHRIVLSHMKDQHRGIRTVREEFTVGDASSRTNITRQAPSYRETTQSNTNLAYTGKDLGFVEKLDANAYVLEKKRYSADDKDNGYAGNVVGPNHTRITTRGMNFNFDSRLAEQTLLKYGINYRHQEIKPQAFLNGEFEISGKKKDPKDPKKEIDKTDEEKAKDKKDMDLVHSYKLSNPTKTDTGAYIEAIHEIDGFTLTGGLRYDRFKVKTHDGKTVSSSNLNPSFGVIWQPHEHWSFSSSHNYASRSPRLYDALQTHGKRGIISIADGTKAERARNTEIGFNYNDGTFAANGSYFWQTIKDALANPQNRHVSAAVREAVNAGYIKNHGYELGASYRTGGLTAKVGVSHSKPRFYDTHPKKLLSANPEFGAQVGRTWTASLAYRFQNPNLEIGWRGRYVQKAVGSILVAGQKDRNGKLENVVRKGFGVNDVFANWKPLGKDTLNVNLSVNNVFNTFYYPHSQRWTNTLPGVGRDVRLGVNYKF

SEQ ID NO: 29275 - protein, 1201 aa, Neisseria meningitidis
MFHFAFPAQTALRQAITDAYRRNEIEAVQDMLQRAQMSDEERNAASELARRLVTQVRAGRTKAGGVDALMHEFSLSSEEGIALMCLAEALLRIPDNATRDRLIADKISDGNWKSHLNNSPSLFVNAAAWGLLITGKLTATNDRQMSSALSRLISKGGAPLIRQGVNYAMRLLGKQFVTGQTIEEALQNGKEREKMGYRFSFDMLGEAAYTQADADRYYRDYVEAIHAIGKDAAGQGVYEGNGISVKLSAIHPRYSRAQHGRVMGELLPRLKELFLLGKKYDIGINIDAEEANRLELSLDLMEALVSDPDLAGYKGIGFVVQAYQKRCPFVIDYLIDLARRNNQKLMIRLVKGAYWDSEIKWAQVDGLNGYPTYTRKVHTDISYLACARKLLSAQDAVFPQFATHNAYTLGAIYQMGKGKDFEHQCLHGMGETLYDQVVGPQNLGRRVRVYAPVGTHETLLAYLVRRLLENGANSSFVNQIVDENISIDTLIRSPFDTIAEQGIHLHNALPLPRDLYGKGRLNSQGVDFSNETVLQQLQEQMNKAAAQDFHAASIVNGKARDVGEAQPIKNPADHGDVVGTVSFADAALAQEAVGAAVAAFPEWSATPAAERAACLRRFADLLEQHTPALMMLAVREAGKTLNNAIAEVREAVDFCRYYANEAEHTLPQDAKAVGAIVAISPWNFPLAIFTGEVVSALAAGNTVIAKPAEQTSLIAGYAVSLMHEAGIPTSALQLVLGAGDVGAALTNDARIGGVIFTGSTEVARLINKALAKRNDNPVLIAETGGQNAMIVDSTALAEQVCADVLNSAFDSAGQRCSALRILCVQEDVADRMLDMIKGAMDELVVGKPIQLTTDVGPVIDAEAQQNLLNHINKMKGVAKSYHEVKTAADVDSEKSTFVRPILFELNNLNELQREVFGPVLHVVRYRADELDSVIDQINSKGYALTHGVHSRIEGTVRHIRSRIEAGNVYVNRNIVGAVVGVQPFGGHGLSGTGPKAGGSFYLQKLTRIPEWVAPTLSQIGQADEAALKRLEALVHKLPFNAEEKKAAAAALGHARIRTLRRAETVLTGPTGERNSISWHAPKRVWIHGGSTVQAFAALTELAASGVQAVVEPDSPLASYTADLEGLLLVNGKPETVGISHVAALSPLDSARKQELAAHDGALIRILPSENGLDILQVFEEISCSVNTTAAGGNASLMAVAD

SEQ ID NO: 29276 - protein, 453 aa, Neisseria meningitidis; identical to SEQ ID NO: 6561

SEQ ID NO: 29277 - protein, 415 aa, Neisseria meningitidis
MLKQTTLLAACTAVAALLGGCATQQPAPVIAGNSGMQDAPSSAVYNNPYGATPYSPAPAGDAPYVPPVQSAPVYTPPAYVPPSAPAVSGTYVPSYAPVDINAATHTIVRGDTVYNISKRYHISQDDFRAWNGMTDNTLSIGQIVKVKPAGYAAPKAAAVKSRPAVPAAAQPLVQSAPVDINAATHTIVRGDTVYNISKRYHISQDDFRAWNGMTDNMLSIGQIVKVKPAGYAAPKTAAVESRPAVPAAVQTPVKPAAQPPVQSAPQPAAPAAENKAVPAPAPQSPAASPSGTRSVGGIVWQRPTQGKVVADFGGNNKGVDIAGNAGQPVLAAADGKVVYAGSGLRGYGNLVIIQHNSSFLTAYGHNQKLLVGEGQQVKRGQQVALMGNTDASRTQLHFEVRQNGKPVNPNSYIAF

SEQ ID NO: 29278 - protein, 335 aa, Neisseria meningitidis; identical to SEQ ID NO: 14611

SEQ ID NO: 29279 - protein, 234 aa, Neisseria meningitidis
MTVLQERYCEVSDRIGKLVLQVGRDPHSVSLIAVGKTFPSDGIREVYAAGQRDFGENYIQEWYGKTEELADLTDIVWHVIGDVQSNKTKFVAERAHWVHTICRLKTAVRLSGQRPSSMPPLQVCIEVNIAGEAAKHGVAPEEAVVLAVEVAKLPNIVVRGLMCVAKANSSETELKVQFQTMRKLLADLNTAGVKADVLSMGMSDDMPAAIACGATHVRIGSAIFGKRSRLECVQ

SEQ ID NO: 29280 - protein, 321 aa, Neisseria meningitidis; identical to SEQ ID NO: 6981

SEQ ID NO: 29281 - protein, 293 aa, Neisseria meningitidis; identical to SEQ ID NO: 9178

SEQ ID NO: 29282 - protein, 144 aa, Neisseria meningitidis; identical to SEQ ID NO: 9512

SEQ ID NO: 29283 - protein, 442 aa, Neisseria meningitidis
MNTTSQFTSNFWNIYIAVIVLLSFIALAWLLLSQNVVKRPKKGEEVQTTGHEWDGIAEYDNPLPRWWFWLCVLTWLFGIGYLVMYPGVGDYKGLLKWTSHNQYEKEVKKADEQYGKLYAKFADMPIEKVAKDPQAKQIAQNLFNTYCIQCHGSDAKGSKGFPNLTDSDWLWGGDPDKIHETIEKGRVATMPAWGPALGEEGVKDVAHYVMSLSKPEGQYDEERAARGQALFSGPPANCFTCHGDKGQGIQGLGPNLTDDVWLWGGTQKSIIETITNGRSSQMPAWGHFLDKDKLHIMTAYVWGLSDKDGKAPVKKAEPAPTPAPAAEPAASAPAEAAQAASEAKPAAAEPKAEETAAPAAKADGKVYETVCAACHGNAIPGIPHVGIKADWADRIKKGKDTLHKHAIEGFNTMPAKGGRGDLSDDEVKAAVDYMVNQSGGKF

SEQ ID NO: 29284 - protein, 191 aa, Neisseria meningitidis
LLCTQTDGDNAQKKTTTYKEQDPAKVTHYLTQPAEFSDYQRVYLDETGFDRYLFRPYTRSLKGQIVKAQISGKRYQRLSLVSAQVGNRLIAPMVYQNTMIGVFFEAWFQQCLLPALTQKSVIILDNARFHRMGVLREMAEKLGHKVLPLAPYLPELNPIEKVWANIKRYLRTVLSDYARFDDALLSYFDFN

SEQ ID NO: 29285 - protein, 271 aa, Neisseria meningitidis; identical to SEQ ID NO: 1333

SEQ ID NO: 29286 - protein, 385 aa, Neisseria meningitidis
MKFATKAIHSSYDCDEHNRALMPPIYQNSMFALHEIGENVPYRYSRLSNPTRQVLEDTVADLEHGAAGFAFSSGMAGIDAVWRTFLRPGDTIVAVADIYGGAYDLLVDVYQKWGVNVVFADLGNPDNLDELLKAHNVKLVWLETPSNPLLRLVDIKALAAKAKAAGALVGIDNTFATPYLQQPLDMGCDFVFHSATKYLCGHSDVLMGVVVAKTKELAQPLHDMMVHTGAIAGPMDCWLVLRGIKTLALRMNAHCQNALEIARRLEAHPAIEKVFYPGLPSHEHYELAQAQMPKGIGGVVTVYLKNDTREAANSVIKNMKLVKMASSLGGVESLVNHCYSQSHSGVPHDVKMEMGIRVGLLRFSVGIEDVDDIWNDISAALDTTV

SEQ ID NO: 29287 - protein, 152 aa, Neisseria meningitidis; identical to SEQ ID NO: 1697

SEQ ID NO: 29288 - protein, 268 aa, Neisseria meningitidis
MPTVFIFLTAVYAGLGAFAWHCQQQGRGRDYPWKRELPVLGAALTVHGAALLMPVIQDKIIIMGFGYSGSLIVWMMLFIYFAGSFFYPLRGVQLLLYPCAALMLLSGLVFPGKFSGYEITDFPFMLHIGTSLLAYGLFGIATLLSVLTLLLNRSLHRRSFSKLAGFLPSLLSLEKLMFQAMWAGFILLTYSVVSGTFFAEAVFGKPMTFTHKTVFGILSWLIYGGLLLKHSMTAWRGKKAAVWTIIGFVSLMIAYMGSKFVLEIILKR

SEQ ID NO: 29289 - protein, 259 aa, Neisseria meningitidis; identical to SEQ ID NO: 18496

SEQ ID NO: 29290 - protein, 183 aa, Neisseria meningitidis; identical to SEQ ID NO: 1316

SEQ ID NO: 29291 - protein, 37 aa, Neisseria meningitidis; identical to SEQ ID NO: 6771

SEQ ID NO: 29292 - protein, 161 aa, Neisseria meningitidis; identical to SEQ ID NO: 14179

SEQ ID NO: 29293 - protein, 408 aa, Neisseria meningitidis; identical to SEQ ID NO: 2386

SEQ ID NO: 29294 - protein, 185 aa, Neisseria meningitidis; identical to SEQ ID NO: 7373

SEQ ID NO: 29295 - protein, 429 aa, Neisseria meningitidis; identical to SEQ ID NO: 2821

SEQ ID NO: 29296 - protein, 91 aa, Neisseria meningitidis; identical to SEQ ID NO: 9295

SEQ ID NO: 29297 - protein, 397 aa, Neisseria meningitidis; identical to SEQ ID NO: 14453

SEQ ID NO: 29298 - protein, 262 aa, Neisseria meningitidis
MEDLYIILALGLVAMIAGFIDAIAGGGGLITLPALLLAGIPPVSAIATNKLQAAAATFSATVSFARKGLIDWKKGLPIAAASFVGGVAGALSVSLVSKDILLAVVPVLLIFVALYFVFSPKLDGSKEGKARMSFFLFGLTVASLLGFYDGVFGPGVGSFFLIAFIVLLGCKLLNAMSYTKLANVACNLGSLSVFLLHGSIIFPIAATMAVGAFVGANLGARFAVCFGSKLIKPLLIVISISMAVKLLIDERNPLYQMIVSMF

SEQ ID NO: 29299 - protein, 217 aa, Neisseria meningitidis
MKITHCKLKKKVQKELLRFFVLEVTAHSAADILGIHPNSAALFYRKIRTVINHHLALAADEVFEGPVEPDESDFGGRRKGRRGRGAAGKVVVFGILKRNGRGYTVVVDNAKSETLLPVIKKKIMPDSIVYTDSLSSCDKLDVSGFIHYRINHSKEFADRQNHINGIENFWNQAKRVLRKYNGIDRKSFPLFLKECEFRFNFGTPSQQLKILRDWCGI

SEQ ID NO: 29300 - protein, 373 aa, Neisseria meningitidis; identical to SEQ ID NO: 20438

SEQ ID NO: 29301 - protein, 177 aa, Neisseria meningitidis
MFPPDKPLFLCLSALLLASCGTTSGKHRQPKPKQTVRQIQAVRISHIDRTQGSQELMLHSLGLIGTPYKWGGSSTATGFDCSGMIQFVYKNALNVKLPRTARDMAAASRKIPDSRLKAGDLVFFNTGGAHRYSHVGLYIGNGEFIHAPSSGKTIKTEKLSTPFYAKNYLGAHTFFTE

SEQ ID NO: 29302 - protein, 327 aa, Neisseria meningitidis
VLLTLHGTDKFCIVNNFHTNRNTAYKALKDACNNLFERQFSFIEKTPKGEKVVRTRWVSQVAYIEQQATVELVFAPNVAPLITMLEKNFTSYELDQVSSLSSKYAVRLYEIIISWRAAGKTPMFSTMELRERLGMMPDEYQKMELFKRKVLDFAVKQINDKTDISITYEQHKEGRKIVGFTFSILHKIGSKDIPLENQSELFAGMTDLEAGTIRVRAEAYIASLIAKGQNVTKAHRLNILKKAVEERWGFEDVAKDNGAKNPENKNAKVVLNEWEKISNGTRFKDKDGTIWVKDSGMLRTEGTNRWIADSQIAKLFPMLTVMVEEGI

SEQ ID NO: 29303 - protein, 377 aa, Neisseria meningitidis; identical to SEQ ID NO: 23460

SEQ ID NO: 29304 - protein, 85 aa, Neisseria meningitidis; identical to SEQ ID NO: 3676

SEQ ID NO: 29305 - protein, 186 aa, Neisseria meningitidis; identical to SEQ ID NO: 482

SEQ ID NO: 29306 - protein, 113 aa, Neisseria meningitidis; identical to SEQ ID NO: 6827

SEQ ID NO: 29307 - protein, 146 aa, Neisseria meningitidis; identical to SEQ ID NO: 6527

SEQ ID NO: 29308 - protein, 468 aa, Neisseria meningitidis; identical to SEQ ID NO: 23202

SEQ ID NO: 29309 - protein, 618 aa, Neisseria meningitidis
MLNKIFSWFESRIDPYPEAAPKTPEKGLWRFVWSSMAGVRKWIAALAALTAGIGIMEALVFQFMGKIVEWLGKYAPAELFAEKGWELAAMAAMMVFSVAWAFAASNVRLQTLQGVFPMRLRWNFHRLMLNQSLGFYQDEFAGRVSAKVMQTALALRDAVMTVADMVVYVSVYFITSGVILASLDSWLLLPFIGWIVGFASVMRLLIPKLGQTAAWQADARSMMTGRITDAYSNIATVKLFSHGAREAAYAKQSMEEFMVTVRAQMRLATLLHSCSFIVNTSLTLSTAALGIWLWHNGQVGVGAVATATAMALRVNGLSQYIMWESARLFENIGTVGDGMATLSKPHTILDKPNALPLKVSQGEIKFEHVDFSYEAGKPLLNGFNLTIRPGEKVGLIGRSGAGKSTIVNLLLRFYEPQSGTVSIDGQDISGVTQESLRAQIGLVTQDTSLLHRSVRDNIIYGRPDATDAEMVSAAERAEAAGFIPELSDAKGRRGYDAHVGERGVKLSGGQRQRIAIARVMLKDAPILLLDEATSALDSEVEAAIQESLDKMMDGKTVIAIAHRLSTIAAMDRLVVLDKGRIIEEGTHAELLEKRGLYAKLWAHQSGGFLNEHVEWQHD

SEQ ID NO: 29310 - protein, 318 aa, Neisseria meningitidis
MILTPPDTPFFLRNGNADTIAAKFLQRPAPTYRRELLPDSTGKTKVAYDFSDGISPDAPLVVLFHGLEGSSRSHYAVELMLAVRSRGWHGAVVHFRSCGGIANTAPVFYHLGDTAEIAFTLDTLAARYREIYAVGVSLGGNALAKYLGERGENALPQAAAAVSAPVDAEAAGRRFDSGITRLLYTRYFLRTLIPKARSLHGFQTAFAAGCKTLGEFDDRFTAPLHGFADRHDYYRQTSCKPLLKHVAKPLLLLNAANDPFLPPEALPTPDEVSEAVTLFQPAHGGHAGFVGSTGGRLHLQWLPQTVLSYFDSFRTNRR

SEQ ID NO: 29311 - protein, 306 aa, Neisseria meningitidis; identical to SEQ ID NO: 15373

SEQ ID NO: 29312 - protein, 979 aa, Neisseria meningitidis; identical to SEQ ID NO: 7212

SEQ ID NO: 29313 - protein, 352 aa, Neisseria meningitidis; identical to SEQ ID NO: 15871

SEQ ID NO: 29314 - protein, 169 aa, Neisseria meningitidis; identical to SEQ ID NO: 4575

SEQ ID NO: 29315 - protein, 100 aa, Neisseria meningitidis; identical to SEQ ID NO: 1023

SEQ ID NO: 29316 - protein, 687 aa, Neisseria meningitidis
MMTQTLLIELLTEELPPKALNNLGNHFAASVAEGLEKAQLIAGAAEFTAYASPRRLAVQVKNVKAVQADQKIVKKGPAVANAVKDGAPTKALEGFARGAGAKIEDLTIVHDGKQDVYAYEYVQTGKPLGELLEDIINAAVKKLPIPKVMRWGSSTFTFVRPVHGLIVLHGGDIVNVSVLGLQSGNQTLGHRFLSDGEITIENADSYAEQMRGQGKVVASFAERKAAIQTALEGQARRLNATVAADEALLDKVTALVEYPVVLEAGFEEHFLAVPQECLILTMQQNQKYFPLLDQNGKLMNRFLLVSNLQTADPSHIIQGNERVLRARLSDAEFFYKQDQKATLESRLPKLANVVYHNKIGSQAERIERLQSIAAHIAKALGADAAAAERAARLAKADLVTEMVGEFPELQGTMGKYYARLDGETEEIAEAIEQHYQPRFAGDNLPNGKVATAVALADKLETLVGIWGIGLIPTGDKDPYALRRAALGILRMLMQYGLDVNELIQTAFDSFPKGLLNEKTPSETADFMQARLAVLLQNDYPQDIVAAVLAKQPRRLDDVVAKLQAVAAFKQLPEAAALAAANKRVQNLLKKADAELGAVNESLLQQDEEKALFAAAQGLQPKIAAAVAEGNFQTALSELASVKPQVDAFFDGVMVMAEDAAVKQNRLNLLNRLAEQMNAVADIALLGE

SEQ ID NO: 29317 - protein, 136 aa, Neisseria meningitidis
MPVYFRIPSRKRLHKMNRRQHKKLHLGEFQTLIFGVQGSLHQAEDDAEAFGRFMDELIAYLAANGLEMAGGGDCGDFSCLFQKSGARSLGETEKKAIISWLAGREDVATLHATPLVDGFYGDDGWESYSETYKQAD

SEQ ID NO: 29318 - protein, 379 aa, Neisseria meningitidis
MIKLTAQQIFDKLLDEEKILSANGQIRFFLGDVDIIVKQKDVVGNIIQEWLGGLRKREIEFDVSTNTQMPPDFFLNKKDRSRELLEVKAFNRNAGPGFDIADFKMYSDKIIHKPYMLDVDYLIFGYDMDDNGNVTIKDLWLKKVWQITRSMDGWAINLQVKKGVVHKIRLGVWYSINKKNMPMFECLEDFVSAREIEFDVSTNTQMPPDFFLNKKDRSRELLEVKAFNRNAGPGFDIADFKMYSDKIIHKPYMLDVDYLIFGYDMDDNGNVTIKDLWLKKVWQITRSMDGWAINLQVKKGVVHKIRLGVWYSINKKNMPMFECLEDFVSAIEETVYQNPATRHNASLWKKKFEEAYKKHYNRSISIPRWHEIAHKYKKK

SEQ ID NO: 29319 - protein, 293 aa, Neisseria meningitidis; identical to SEQ ID NO: 23921

SEQ ID NO: 29320 - protein, 405 aa, Neisseria meningitidis; identical to SEQ ID NO: 8083

SEQ ID NO: 29321 - protein, 287 aa, Neisseria meningitidis; identical to SEQ ID NO: 14486

SEQ ID NO: 29322 - protein, 303 aa, Neisseria meningitidis; identical to SEQ ID NO: 26497

SEQ ID NO: 29323 - protein, 861 aa, Neisseria meningitidis; identical to SEQ ID NO: 7392

SEQ ID NO: 29324 - protein, 66 aa, Neisseria meningitidis; identical to SEQ ID NO: 3561

SEQ ID NO: 29325 - protein, 177 aa, Neisseria meningitidis
MGIYDFQMKDAEGNAVDLSGYRDKVLLIVNTATRCGLTPQYEALQKLYAQYTAEGLEILDFPCNQFREQAPESSGEIAQVCMMKFGTKFKIFDKIEVNGANTAPLYAYLKSVKPQDKGNHLFKDFVLKLAALGEKRDEGDIKWNFTKFLVNRDGEVVERFAPSVTPEEIEADIRALL

SEQ ID NO: 29326 - protein, 113 aa, Neisseria meningitidis; identical to SEQ ID NO: 1729

SEQ ID NO: 29327 - protein, 531 aa, Neisseria meningitidis; identical to SEQ ID NO: 6044

SEQ ID NO: 29328 - protein, 334 aa, Neisseria meningitidis
MSIKVAINGFGRIGRLALRQIEKAHDIEVVAVNDLTPAEMLLHLFKYDSTQGRFQGTAELKDDAIVVNGKEIKVFANPNPEELPWGELGVDVVLECTGFFTNKTKAEAHIRAGARKVVISAPGGNDVKTVVYGVNQDILDGSETVISAASCTTNCLAPMAAVLQKEFGVVEGLMTTIHAYTGDQNTLDTPHRKGDLRRARAAALNIVPNSTGAAKAIGLVIPELNGKLDGSAQRVPVATGSLTELVSILERPVTKEEINAAMKAAASESYGYNEDQIVSSDVVGIEYGSLFDATQTRVMTVGGKQLVKTVAWYDNEMSYTCQLVRTLEYFAGKI

SEQ ID NO: 29329 - protein, 121 aa, Neisseria meningitidis; identical to SEQ ID NO: 6632

SEQ ID NO: 29330 - protein, 163 aa, Neisseria meningitidis
MKYRRFYRNGGTYFFTVVTNKRQKILTDDAVRLALRQAVMAVRERYPFEILAWVLMPDHLHTIWRLPDNDSAYSERWRQIKRHSKYLIGGNLRLWQKRFWEHTIRDEADFSCHFDYLHFNPVKHGYVGQISDWRFSTFHRYVKQGMYPHNWGGGNADFSIGYD

SEQ ID NO: 29331 - protein, 282 aa, Neisseria meningitidis
VNRTTFCCLSLTAALILTACSSGGGGSGGGGVAADIGAGLADALTAPLDHKDKGLKSLTLEDSISQNGTLTLSAQGAERTFKAGDKDNSLNTGKLKNDKISRFDFIRQIEVDGQLITLESGEFQVYKQSHSALTALQTEQVQDSEHSGKMVAKRQFRIGDIVGEHTSFGKLPKDVMATYRGTAFGSDDAGGKLTYTIDFAAKQGHGKIEHLKSPELNVDLAAADIKPDEKHHAVISGSVLYNQAEKGSYSLGIFGGQAQEVAGSAEVETANGIRHIGLAAKQ

SEQ ID NO: 29332 - protein, 216 aa, Neisseria meningitidis; identical to SEQ ID NO: 1681

SEQ ID NO: 29333 - protein, 426 aa, Neisseria meningitidis; identical to SEQ ID NO: 85

SEQ ID NO: 29334 - protein, 733 aa, Neisseria meningitidis; identical to SEQ ID NO: 6260

SEQ ID NO: 29335 - protein, 447 aa, Neisseria meningitidis
MSQNHTILQSLPVGQKVGIAFSGGLDTSAALLWMKLKGALPYAYTANLGQPDEDDYNAIPKKAMEYGAENARLIDCRAQLAHEGIAAIQCGAFHVSTGGIAYFNTTPLGRAVTGTMLVSAMKEDDVNIWGDGSTYKGNDIERFYRYGLLTNPALKIYKPWLDQQFIDELGGRHEMSEFLIANGFNYKMSVEKAYSTDSNMLGATHEAKDLEFLNSGIKIVKPIMGVAFWDENVEVKPEEVSVRFEEGVPVALNGKEYADPVELFLEANRIGGRHGLGMSDQIENRIIEAKSRGIYEAPGMALFHIAYERLVTGIHNEDTIEQYRINGLRLGRLLYQGRWFDSQALMLRETAQRWVAKAVTGEVTLELRRGNDYSILNTESPNLTYQPERLSMEKVEGAAFTPLDRIGQLTMRNLDITDTRAKLGIYSQSGLLSLGEGSVLPQLGNKK

SEQ ID NO: 29336 - protein, 129 aa, Neisseria meningitidis; identical to SEQ ID NO: 13910

SEQ ID NO: 29337 - protein, 246 aa, Neisseria meningitidis; identical to SEQ ID NO: 3525

SEQ ID NO: 29338 - protein, 480 aa, Neisseria meningitidis
MNWSDLNLMPALPEVALLSLLVLLLLADLWVSDDKRRWTHYGALATVAVTAAVQLAVWEQGSTSSFNGMYIADGMSRLAKMVLYALMFTLFVYAKPYNQVRGIFKGEFYTLSLFALLGMSVMVSAGHFLTAYIGLELLSLALYALIALRRDSGFAAEAALKYFVLGALASGLLLYGISMVYGATGSLEFAGVLASSFNEEANEWLLKLGLVFIVVAVAFKLGAVPFHMWVPDVYHGAPTSVTALVGTAPKIAAVVFAFRILVTGLGTVHHDWSLMFALLAAASLLVGNLAAIMQTNIKRMLAYSTVSHMGFILLAFMAGAVGFAAGLYYAITYALMAAAGFGVLMVLSDGDNECENISDLAGLNQHRVWLAFLMLLVMFSMAGIPPLMGFYAKFGVIMALLKQGHVWLSVFAVIMSLIGAFYYLRVVKVIYFDVPDHDQPVGSNYAAKFVLTVNAFLLLLWGIMPQTVIDWCAKALENTL

SEQ ID NO: 29339 - protein, 95 aa, Neisseria meningitidis; identical to SEQ ID NO: 4938

SEQ ID NO: 29340 - protein, 71 aa, Neisseria meningitidis; identical to SEQ ID NO: 1003

SEQ ID NO: 29341 - protein, 227 aa, Neisseria meningitidis; identical to SEQ ID NO: 13966

SEQ ID NO: 29342 - protein, 128 aa, Neisseria meningitidis; identical to SEQ ID NO: 605

SEQ ID NO: 29343 - protein, 458 aa, Neisseria meningitidis; identical to SEQ ID NO: 22232

SEQ ID NO: 29344 - protein, 328 aa, Neisseria meningitidis
MKNFLSLFASILMSALIAVWFSQNPINAYWQQTYHRNSPLEPLAAYGWWRSGAALQENAYTLSDGIKAFLSGETPPTPQDGGSADMPPEAAASEAAPQTGEIQEWKQDTDTAAVRSGDKVFFVGDSLMQGVAPFVQKSLKQQYGIESVNLSKQSTGLSYPSFFDWPKTIEETLQKHPEISVLAVFLGPNDPWDFPVGKRYLKFASDEWAQEYLKRVDRILEAAHTHRVQVVWLGIPYMKKAKLDGQMRYLDKLLSEHLKGKIILIPTAHTLSGGKDRYTDSVNVNGKPVRYRSKDGIHFTAEGQKLLAAKIMEKIVFEPSTQPSSTQP

SEQ ID NO: 29345 - protein, 291 aa, Neisseria meningitidis; identical to SEQ ID NO: 122

SEQ ID NO: 29346 - protein, 436 aa, Neisseria meningitidis
MNTPHPRPKIAVIGAGWAGLSAAVTLTRHADVTLFEAGRQAGGRARTLAGNTDGFGFLDNGQHILLGAYRGVLRLMKTIGSDPRAAFLRVPLHWHMHGGLQFRALPLPAPLHILGGVLLARRVPSAFKAKLLADMSDLQKSARLGQPDTTVAQWLKQRNVPRAAVMQFWQPLVWGALNTPLETASLRVLCNVLSDGVLTKKSGSDYLLPKQDLGAIVAEPALAELQRLGADIRLETRVCRLNPLPDGKVLVNGEAFDAAVPATAPYHAAALLPEGTPEHVQTAYQNLRYHAITTVYLRYAEPVRLPAPLTGLADGTVQWLLCRGRLGLPENEVSAVISVSDRVGAFANRAWADKAHADLKRILPHLGEPEAVRVITEKRATTAADAPPPDLSWLHRHRIFPAGDYLHPYYPATLEAAVQSGFASAEACLQSLNDAV

SEQ ID NO: 29347 - protein, 449 aa, Neisseria meningitidis; identical to SEQ ID NO: 481

SEQ ID NO: 29348 - protein, 471 aa, Neisseria meningitidis; identical to SEQ ID NO: 7428

SEQ ID NO: 29349 - protein, 381 aa, Neisseria meningitidis
MTETQSLELAKELISRPSVTPDDQNCQKLLAERLHKIGFAAEELHFGDTKNIWLRRGTKAPVVCFAGHTDVVPTGPVEKWDSPPFEPAERDGRLYGRGAADMKTSIACFVTACERFVAEHPDHQGSIALLITSDEEGDALDGTTKVVDVLKARDELIDYCIVGEPTAVDKLGDMIKNGRRGSLSGNLTVKGKQGHIAYPHLAINPVHTFAPALLELTQEVWDEGNKYFPPTSFQISNINGGTGATNVIPGELSVKFNFRFSTESTEAGLKQRVHAILDKHGVQYDLQWSCSGQPFLTHAGKLTDVARAAIAEICGVETELSTTGGTSDGRFIKAIAKELIELGPSNATIHQINENVRLNDIPKLSAVYEGILARLLAGNAV

SEQ ID NO: 29350 - protein, 548 aa, Neisseria meningitidis; identical to SEQ ID NO: 14641

SEQ ID NO: 29351 - protein, 427 aa, Neisseria meningitidis
MTVSKSGFIGQIFSRNMLVCIFTGFTSGLPLYFLINLIPAWLRSEQVDLKSIGLMALIGLPFTWKFLWSPLMDAVRVPILGRRRGWMLLTQAGLLAALAAYAFLNPRNHLPLIAGLSVLVAFFSASQDIVLDAFRREILSDEELGLGNSVHVNAYRIAALIPGSLSLVLADRMPWSEVFVITSLFMLPGLLMTLFLAREPVLPPSVPKTLKQTVVEPFKEFFTRKGIASAVCVLLFIFLYKLGDSMATALATPFYLDMGFSKTDIGLIAKNAGLWPAVAAGILGGVWMLKIGVNKALWIFGAVQAVTVLGFVWLAGFGHFDTVGTGERLMLAAVIGAEAVGVGLGTAAFVSYMARETNPAFTATQLALFTSLSAVPRTVINSFAGYLIEWLGYVPFFQLCFALALPGMLLLLKVAPWNGEKTQDAGR

SEQ ID NO: 29352 - protein, 162 aa, Neisseria meningitidis; identical to SEQ ID NO: 7842

SEQ ID NO: 29353 - protein, 226 aa, Neisseria meningitidis; identical to SEQ ID NO: 9347

SEQ ID NO: 29354 - protein, 107 aa, Neisseria meningitidis; identical to SEQ ID NO: 15201

SEQ ID NO: 29355 - protein, 591 aa, Neisseria meningitidis; identical to SEQ ID NO: 22531

SEQ ID NO: 29356 - protein, 472 aa, Neisseria meningitidis; identical to SEQ ID NO: 15980

SEQ ID NO: 29357 - protein, 97 aa, Neisseria meningitidis; identical to SEQ ID NO: 1875

SEQ ID NO: 29358 - protein, 283 aa, Neisseria meningitidis; identical to SEQ ID NO: 22994

SEQ ID NO: 29359 - protein, 174 aa, Neisseria meningitidis; identical to SEQ ID NO: 14426

SEQ ID NO: 29360 - protein, 867 aa, Neisseria meningitidis; identical to SEQ ID NO: 22700

SEQ ID NO: 29361 - protein, 358 aa, Neisseria meningitidis; identical to SEQ ID NO: 96

SEQ ID NO: 29362 - protein, 417 aa, Neisseria meningitidis; identical to SEQ ID NO: 22477

SEQ ID NO: 29363 - protein, 154 aa, Neisseria meningitidis; identical to SEQ ID NO: 2010

SEQ ID NO: 29364 - protein, 603 aa, Neisseria meningitidis; identical to SEQ ID NO: 8911

SEQ ID NO: 29365 - protein, 452 aa, Neisseria meningitidis
MKPLDLNFICQALKLPMPSESKPVSRIVTDSRDIRAGDVFFALAGGRFDAHDFVEDVLAAGAAAVVVSREDCVAMDGALKVDDTLTALQMLAKAWRENVNPFVFGITGSGGKTTVKEMLAAVLRRRFGDNAVLATAGNFNNHIGLPLTLLKLNEKHRYAVIEMGMNHFGELAVLTQIAKPDAALINNALRAHVGCGFDGVGDIAKAKSEIYQGLCSDGMALIPQEDANMAVFKTATLNLNTRTFGVDSGDVHAENIVLKPLSCEFDLVCGDERAAVVLPVPGRHNVHNAAAAAALALAAGLSLNDVAEGLQGFSNIKGRLNVKSGIKGATLIDDTYNANPDSMKAAIDVLARMPAPRIFVMGDMGELGEDEAAAMHAEVGAYARDQGIEAAYFVGDNSVEAAEKFGADGLWFAAKDPLIQVLRHDLPERATVLVKGSRFMQMEEVVEALEDK

SEQ ID NO: 29366 - protein, 228 aa, Neisseria meningitidis; identical to SEQ ID NO: 445

SEQ ID NO: 29367 - protein, 467 aa, Neisseria meningitidis
MNNPDLPYRQALECLSQKQYNFTEVRRLLTEAFSAGHPAAAFELAKHLMDADSPYQDREQGMEMLRIAAEQGHPYARYNLAYIQELEGAPPETLIPLYRPLAEERLPEAQVRLMYLLYASRHFEEALEWAKTSTKNNNPHGQYLLAQYCRYGTPPDFETAHLLYRKAAAQGLPEAHWQLGLQYRFGQGTKADTAQAVNHLRAAAQQGYIPAYTPLAELILPTAPDEAVYRFQQAAQENDPDAHAALADIYLQGKYQERNHKLALHHAEAAAAERHPEGLRILGDICRYGLGIAPDTEKARHYYRQAAEAGSLSAYQKLISDSALNHPDQYGGIKDSAIRRQRAEQLYQKAQALHYGLQCAPEYAAALKLYTEAAELGHSKAQTNLGSMYYFGQGIAADYGKARKWFEQAAAQKDSMAFYNLACIHYSGHGVGPDKEKACRYLQEAINNGYGQKSVLQELLQQWQNAV

SEQ ID NO: 29368 - protein, 166 aa, Neisseria meningitidis; identical to SEQ ID NO: 6804

SEQ ID NO: 29369 - protein, 92 aa, Neisseria meningitidis; identical to SEQ ID NO: 600

SEQ ID NO: 29370 - protein, 189 aa, Neisseria meningitidis; identical to SEQ ID NO: 8960

SEQ ID NO: 29371 - protein, 431 aa, Neisseria meningitidis; identical to SEQ ID NO: 15037

SEQ ID NO: 29372 - protein, 112 aa, Neisseria meningitidis; identical to SEQ ID NO: 3481

SEQ ID NO: 29373 - protein, 710 aa, Neisseria meningitidis; identical to SEQ ID NO: 9774

SEQ ID NO: 29374 - protein, 408 aa, Neisseria meningitidis; identical to SEQ ID NO: 1777

SEQ ID NO: 29375 - protein, 83 aa, Neisseria meningitidis; identical to SEQ ID NO: 925

SEQ ID NO: 29376 - protein, 193 aa, Neisseria meningitidis; identical to SEQ ID NO: 14782

SEQ ID NO: 29377 - protein, 528 aa, Neisseria meningitidis; identical to SEQ ID NO: 4033

SEQ ID NO: 29378 - protein, 357 aa, Neisseria meningitidis
MSITIQNLNKHFGNFHALKNINLNVPTGKLVSLLGPSGCGKTTLLRIIAGLENADGGQILFDGQDVTAKHVRERKVGFVFQHYALFRHMNVFDNVAFGLTVLPKSERPSKEQICTKVEELLKLVQLSHLAKSYPHQLSGGQRQRIALARALAVEPKLLLLDEPFGALDAKVRKELRTWLRDIHHNLGVTSILVTHDQEEALEVSDEIVVMNHGKIEQTGSAEAIYRKPENAFVTEFLGETDAFEGRIEKGFWHYNGFAWKLDAQYKWQEQTATGYIRPHEWQIAAEHETPMICAEIEKVHAVGALTHILVKHGKQDVHITLAGSDAARYPIAEGKELKLIPKQVYVFSQNELIEYSI

SEQ ID NO: 29379 - protein, 503 aa, Neisseria meningitidis; identical to SEQ ID NO: 3463

SEQ ID NO: 29380 - protein, 388 aa, Neisseria meningitidis; identical to SEQ ID NO: 15700

SEQ ID NO: 29381 - protein, 321 aa, Neisseria meningitidis; identical to SEQ ID NO: 3510

SEQ ID NO: 29382 - protein, 161 aa, Neisseria meningitidis; identical to SEQ ID NO: 7269

SEQ ID NO: 29383 - protein, 96 aa, Neisseria meningitidis
MDDLILYFLSGIFGNQVAEYIIKNNRDIKVPFIVLYTIFFTLIYTVALLFLSLIYWVNGAEIAWKGIGIFSMSVSFCIVFCLYLIDKAGRCKDKKQ

SEQ ID NO: 29384 - protein, 291 aa, Neisseria meningitidis
MNPYDLLITPFAEFDFMRYALASVFCLSLSAAPVGVFLVMRRMSLIGDALSHAVLPGAAVGYMFAGLSLPAMGLGGVAAGMLMALLAGLVSRFTTLKEDANFAAFYLSSLAIGVVLVSKNGSSVDLLHLLFGSVLAVDIPALQLIAAVSTLTLLTLAVIYRPLVLESIDPLFLKSVGGKGGLWHVLFLVLVVMNLVSGFQALGTLMSVGLMMLPAITARLWAKHMGALILLSVLTALLCGLSGLLISYHIEIPSGPAIILCCSVLYLFSVILGKEGGILTKWLKNHRHHTT

SEQ ID NO: 29385 - protein, 287 aa, Neisseria meningitidis; identical to SEQ ID NO: 15851

SEQ ID NO: 29386 - protein, 261 aa, Neisseria meningitidis; identical to SEQ ID NO: 15410

SEQ ID NO: 29387 - protein, 139 aa, Neisseria meningitidis
MAQLPLYLTSEIKDFTVGTPEVLQSFFEHVPYGVVFEDDGDTGYFYAASQDGILDALHIYNVEDVSDKHIPNHVLILWDDACTIAALCINDYIHAVYDFVEQAGYCRNGFPEAGGEWVKVENRILDDELLDKILSRKST

SEQ ID NO: 29388 - protein, 407 aa, Neisseria meningitidis
MKTVVWIVVLFAAAVGLALASGIYTGDVYIVLGQTMLRINLHAFVLGSLIAVVVWYFLFKFIIGVFNIPEKMQRFGSARKGRKAALALNKAGLAYFEGRFEKAELEASRVLGNKEAGDNRTLALMLGAHAAGQMENIELRDRYLAEIAKLPEKQQLSRYLLLAESALNRRDYEAAEANLHAAAKMNANLTRLVRLQLRYAFDRGDALQVLAKTEKLSKAGALGKSEMERYQNWAYRRQLADAADAAALKTCLKRIPDSLKNGELSVSVAEKYERLGLYADAVKWVKQHYPQSRRPELLEAFVESVRFLGERDQQKAIDFADAWLKEQPDNALLLMYLGRLAYGRKLWGKAKGYLEASIALKPSISARLVLAKVFDETGEPQKAEAQRNLVLEAVSDDERHAALEQHS

SEQ ID NO: 29389 - protein, 161 aa, Neisseria meningitidis
MPIEKQKEKSMVDTVVKTPEFLPFTSVGIFRFGADITEYKNILETFMYEPPDEFRTEYYESPDSNLLIAVKKNKIISIFCYQELYFMGVNLIGLNFEDFKQLFHHPKSYGVDEYYLSNESYPTYVYEFDEIGVQAWEAKGKVVTIIAGGKDNYSTEPYYDE

SEQ ID NO: 29390 - protein, 377 aa, Neisseria meningitidis
MFKKFKLVLLSFFALVFAFWLGTGIAYEINPRWFLSDTATEVPENPNAFVAKLARLFRNADRAVVIVKESMRTEESLAGAVDDGPLQSEKDYLALAVRLSRLKEKAKWFHVTEQEHGEEVWLDYHIGEGGLVAVSLSQRSPEAFVNAEYLYRNDRPFSVNVYGGTAHGENYETTGEYRVVWQPDGSVFDAAGRGKIGEDVYEHCLGCYQMAQVYLAKYRDVANDEQKVWDFREESNRIASDSRDYVFYQNMRELMPRGMKANSLVVGYDADGLPQKVYWSFDNGKKRQSFEYYLKNGNLFIAQSSTVALKADGVTADIQTYHAQQTWYLDGGRIIREEKQGDRLPDFPLNLENLEKEVRRYAEAAARRSGGRRDLSH

SEQ ID NO: 29391 - protein, 208 aa, Neisseria meningitidis; identical to SEQ ID NO: 9498

SEQ ID NO: 29392 - protein, 355 aa, Neisseria meningitidis; identical to SEQ ID NO: 6342

SEQ ID NO: 29393 - protein, 522 aa, Neisseria meningitidis; identical to SEQ ID NO: 968

SEQ ID NO: 29394 - protein, 592 aa, Neisseria meningitidis; identical to SEQ ID NO: 14458

SEQ ID NO: 29395 - protein, 461 aa, Neisseria meningitidis; identical to SEQ ID NO: 7704

SEQ ID NO: 29396 - protein, 1392 aa, Neisseria meningitidis; identical to SEQ ID NO: 8821

SEQ ID NO: 29397 - protein, 304 aa, Neisseria meningitidis
MEKAEHLNSSRFVNLVKSGGGSYVEGSYRFDTLSNGISIHGGTVTARCDFCSSRLAEPYVSFVLLLEGSLSFGINRSRFQIDADGGKVILISVGEEVLFSRYLYRGGKTVKMTIKGMEQWLLRPEYARFAPLLYREPVRIDLPPNLRGLAASCLQAVPKGHLGKTLRREADVLRLLSDLWDTVSDGIGPAVGQTAEADAMPSEDFSRTLNAAFDGGAHQVNRLTDALNISERTLQRRMRDHFGITASEWLHHKQMQHALYLLQNGGKSIGETAYLCGYRHVSSFTQAFRQYFGSTPAETKKENR

SEQ ID NO: 29398 - protein, 348 aa, Neisseria meningitidis
MKMQAVVVNKNVAGDVEIVEREVRPLEYGEALVEVEYCGVCHTDLHVAAGDYGEKPGRVLGHEGIGLVKEVADGVKNLKVGDRVSIAWLFQSCGSCEYCNTGRETLCRSVLNAGYTADGGMATHCIVSADYAVKVPEGLDPAQASSITCAGVTTYKAIKVSSVRPGQWIAIYGAGGLGNLGVQYAKKVFGAHVVAIDINDEKLAFAKETGADLVVNAAKEDAAKVIQEKTGGAHAAVVTAVSAAAFNSAVNCVRAGGRVVAIGLPPESMDLSIPRLVLDGIEVVGSLVGTRKDLEEAFQFGAEGLVVPKVQLRALDEAPAIFQEMREGKITGRMVIDMKKECGCGHHH

SEQ ID NO: 29399 - protein, 508 aa, Neisseria meningitidis; identical to SEQ ID NO: 13204

SEQ ID NO: 29400 - protein, 129 aa, Neisseria meningitidis; identical to SEQ ID NO: 14100

SEQ ID NO: 29401 - protein, 397 aa, Neisseria meningitidis; identical to SEQ ID NO: 15002

SEQ ID NO: 29402 - protein, 397 aa, Neisseria meningitidis; identical to SEQ ID NO: 14032

SEQ ID NO: 29403 - protein, 200 aa, Neisseria meningitidis; identical to SEQ ID NO: 321

SEQ ID NO: 29404 - protein, 320 aa, Neisseria meningitidis; identical to SEQ ID NO: 17581

SEQ ID NO: 29405 - protein, 39 aa, Neisseria meningitidis; identical to SEQ ID NO: 7406

SEQ ID NO: 29406 - protein, 96 aa, Neisseria meningitidis; identical to SEQ ID NO: 4410

SEQ ID NO: 29407 - protein, 335 aa, Neisseria meningitidis; identical to SEQ ID NO: 14485

SEQ ID NO: 29408 - protein, 365 aa, Neisseria meningitidis; identical to SEQ ID NO: 8102

SEQ ID NO: 29409 - protein, 41 aa, Neisseria meningitidis; identical to SEQ ID NO: 6310

SEQ ID NO: 29410 - protein, 122 aa, Neisseria meningitidis; identical to SEQ ID NO: 848

SEQ ID NO: 29411 - protein, 154 aa, Neisseria meningitidis
MKCPFCTHPDTRVADSRLMEERNAVRRRRHCPNCGKRFGTLETAELKMPAVIGPDKKRSPFNAQRLRNDLTAAARKSALTPEQIDETVRLTEHRLYTSGLRDIPSAELADMVLKELLEHNTEAAVRFAALHKRFDNPADFASWLAQAVKTGGKA

SEQ ID NO: 29412 - protein, 120 aa, Neisseria meningitidis; identical to SEQ ID NO: 7043

SEQ ID NO: 29413 - protein, 517 aa, Neisseria meningitidis
MTQANRVIIFDTTLRDGEQSPGAAMTKEEKIRVARQLEKLGVDIIEAGFAAASPGDFEAVNAIAKTITKSTVCSLSRAIERDIRQAGEAVAPAPKKLIHTFIATSPIHMEYKLKMKPKQVIEAAVKAVKIAREYTDDVEFSCEDALRSEIDFLAEICGAVIEAGATTINIPDTVGYSIPYKTEEFFRELIAKTPNGGKVVWSAHCHNDLGLAVANSLAALKGGARQVECTVNGLGERAGNASVEEIVMALKVRHDLFGLETGIDTTQIVPSSKLVSTITGYPVQPNKAIVGANAFSHESGIHQDGVLKHRETYEIMSAESVGWATNRLSLGKLSGRNAFKTKLADLGIELESEEALNAAFARFKELADKKREIFDEDLHALVSDEMGSMNAESYKFISQKISTETGEEPRADIVFSIKGEEKRASATGSGPVDAIFKAIESVAQSGATLQIYSVNAVTQGTESQGETSVRLARGNRVVNGQGADTDVLVATAKAYLSALSKLEFSAAKPKAQGSGTI

SEQ ID NO: 29414 - protein, 61 aa, Neisseria meningitidis; identical to SEQ ID NO: 965

SEQ ID NO: 29415 - protein, 430 aa, Neisseria meningitidis
MQFSAFGEKFTQHSGILQLMDDLGDALKSDKPVNMLGGGNPARIPEIDQAFADIFSKLAAEHAVENIGNYSNPQGDAVLIDALTAFLNREYSWNLTADNIALTNGSQNAFFYLFNLFGGKFNLSDGTSAEKAILLPLAPEYIGYADVHVEGQHFVSVKPKIENVEHEGEAGFFKYRVDFDALENLPELKAGKIGAICCSRPTNPTGNVLTDGEMARLDALAREHGIPLIIDNAYGMPFPNIIYSDVTLNWHENIILCFSLSKVGLPGVRTGIIVAAPEVVKAVSSLNAIVNLAPTRFGAAIAAPLLESGEMKRLADQVIRPFYRNQAQTAVSLLKRELGAYPMKIHKPEGAIFLWLWFENLPVSSQTLYEMLKAEGTLIIPGEHFFVGIDTQDYPHAGECIRMSIAQDAQTLGKGIAAIGKTVRKLYDNV

SEQ ID NO: 29416 - protein, 112 aa, Neisseria meningitidis; identical to SEQ ID NO: 7736

SEQ ID NO: 29417 - protein, 42 aa, Neisseria meningitidis; identical to SEQ ID NO: 9053

SEQ ID NO: 29418 - protein, 96 aa, Neisseria meningitidis; identical to SEQ ID NO: 6139

SEQ ID NO: 29419 - protein, 512 aa, Neisseria meningitidis
MNMLGALAKVGSLTMVSRVLGFVRDTVIARAFGAGMATDAFFVAFKLPNLLRRVFAEGAFAQAFVPILAEYKETRSKEATEAFIRHVAGMLSFVLVIVTALGILAAPWVIYVSAPGFAKDADKFQLSIDLLRITFPYILLISLSSFVGSVLNSYHKFSIPAFTPTFLNVSFIVFALFFVPYFDPPVTALAWAVFVGGILQLGFQLPWLAKLGFLKLPKLNFKDAAVNRVMKQMAPAILGVSVAQVSLVINTIFASYLQSGSVSWMYYADRMMELPSGVLGAALGTILLPTLSKHSANQDTEQFSALLDWGLRLCMLLTLPAAVGLAVLSFPLVATLFMYREFTLFDAQMTQHALIAYSFGLIGLIMIKVLAPGFYARQNIKTPVKIAIFTLICTQLMNLAFIGPLKHVGLSLAIGLGACINAGLLFYLLRRHGIYQPGKGWAAFLAKMLLSLAVMGGGLWAAQACLPFEWVRAGGMRKAGQLCILIAVGGGLYFASLAALGFRPRHFKRVEN

SEQ ID NO: 29420 - protein, 266 aa, Neisseria meningitidis; identical to SEQ ID NO: 8747

SEQ ID NO: 29421 - protein, 637 aa, Neisseria meningitidis; identical to SEQ ID NO: 15124

SEQ ID NO: 29422 - protein, 115 aa, Neisseria meningitidis; identical to SEQ ID NO: 15103

SEQ ID NO: 29423 - protein, 278 aa, Neisseria meningitidis
MQIIHTIQELRAWRKNAGKVAFVPTMGNLHEGHLALVREAKKRADNVVVSIFVNRLQFGQGEDFDKYPRTLQQDADKLEAEGVAVVFAPDEKELYPNVEQRYNVEPPNLQNELCGKFRPGHFRGVATVVSKLFNIVAPDVACFGKKDYQQLAVIKGLTEDLNFDVEIVPVDTGRAEDGLALSSRNQYLSAAERDEAPRLYRELKAVAESLAQGSLDYAGLEKRAVQSLTEYGWVVDYVEIRRADTLEVARAGDKKLVVLAAARLGTTRLIDNLEIKLP

SEQ ID NO: 29424 - protein, 428 aa, Neisseria meningitidis
MTAQHQTPLRFITAGSVDDGKSTLIGRLLYDSKALLSDQIKTLESGKSKGLKETIDFSILTDGLEAEREQGITIDVAYRYFSTAKRKFIIADTPGHEQYTRNMVTGASTASAAVVLVDASQLDFGAQPLQLLPQTKRHSAILRQLNCPHIVVAVNKMDLLDYSEDKFNAIVEAYRRLAEQLGLKDVHFVPVSALLGDNLVYPGGNMPWYRGEPLLVILENLPGADETGRSAADFYFPVQLVVRQDADKADDFRGYQGRIERGSVAVGQTVRIEPNGLTAEVSEIITPKGEVAQAFAGEAATLRLDRDIDVSRGDLFVDKNSPLAPQKHLEATLCWFDERPLNTARKYLLKHGTQTVPAKVGEIESVLDVRTLEQEAGAESLKMNDIAKVRINLQKPVTATPYAENTAAGSFILIDEATYGTVAAGMIL

SEQ ID NO: 29425 - protein, 242 aa, Neisseria meningitidis; identical to SEQ ID NO: 5281

SEQ ID NO: 29426 - protein, 421 aa, Neisseria meningitidis
MSKNQPAQPTKRTLFKTAIAAGAVGAIGGYLGGKKRGETAERTAESQHSPQAYPCYGEHQAGIVTPQQAFSIMCAFDVTAQSAKQLENLFRTLTARIEFLTQGGEYQDGDDKLPPAGSGILGKAFNPDGLTVTVGVGSSLFDGRFGLKDKKPIHLQEMRDFSNDKLQKSWCDGDLSLQICAFTPETCQAALRDIIKHTVQTAVIRWSIDGWQPKSEPGAMAARNLLGFRDGTGNPKVSDPKTADEVLWTGVAANSLDEPEWAKNGSYQAVRLIRHFVEFWDRTPLQEQTDIFGRRKYSGAPMDGKKEADQPDFAKDPEGNTTPKDSHIRLANPRDPEFLKKHRLFRRAYSYSRGLASSGQLDVGLVFVCYQANLADGFIFVQNLLNGEPLEEYISPFGGGYFFVLPGVEKGGFLGQGLLGV

SEQ ID NO: 29427 - protein, 273 aa, Neisseria meningitidis; identical to SEQ ID NO: 14267

SEQ ID NO: 29428 - protein, 455 aa, Neisseria meningitidis; identical to SEQ ID NO: 15464

SEQ ID NO: 29429 - protein, 218 aa, Neisseria meningitidis; identical to SEQ ID NO: 22765

SEQ ID NO: 29430 - protein, 282 aa, Neisseria meningitidis; identical to SEQ ID NO: 1323

SEQ ID NO: 29431 - protein, 1204 aa, Neisseria meningitidis
MSASIQAFDPLTVPIAGTNLIEASAGTGKTYGIAALFTRLIVLEQKNVERVLVVTFTKAATAELKTRLRARLDDVLQVLESKEIAKLGDGALSDGIAAYCAEHHKGDTFLPALLKQALQKEGRTRLIVRLKAAIGQFDNAAIYTIHGFCQRILRDYAFLCQAPFDVELTEEDGDRLLIPAQDFWRERVSNDPVLAALAFKRKAVPQTVLAQISRYLSRPYLNFRRPQADLKQAQRNAETSWQTICRLLPELEAGFWRIHPDLNGNSYRKNSFGNLFKELAQKSAAGQLPFLDKDTHDRLLKLASDKLEAALKKGKTPDAAAFAELQKLADFGRDLNALEEAEEATMIRLQLDLIGYLNRSLAEMKKSRRERGFDDLLLDVHTALTDNPHAETLARAVAENWETALIDEFQDTDPLQYEIFQKIFIAQNRPLFLVGDPKQAIYSFRGADIYAYLQAAGDARHRYTLATNYRSHAALIGSIGALFRLKERPFVLENIGYSEVGAARAESRLSPERPAVQVRWLHENDNEKANKDVLRRRAADYCADEIAHALNEAAGGRLNFKGCPLQSGDIAVLVRTHNEAVMVSAALKKRQVQSVLLSRESVFASPEAAALSALIGFWLEPRRAGTLRFVLTSGIFGYDAQQLHDFNQNESEILHWAESARTALDNWNQYGIFAAMQQFSQTHGIETRLLSRNNGRSLTNYFQLLELLAAEDAQNRNPAALHKWLRDQISLAGNNSGDNRAIRLESDEDLVKIVTMHASKGLQYPLVYCPFAWDAQDTGPSDWQILHQSANRTELLAKAQLSEDEQKQYADEEMAERLRLLYVALTRAEEQLNIYAAYSTNTADNPLAYLIEGSPQDSRETVRRAYACEKDGIAMLKRNWRRVADNAPSGTNFAFTENAPPPAAYRSNAGQTAEFAANSIPERGFRFVRHTSFTALSRHTQTPDGGEEDACPSLDAAETSVPAMPSETPTASDGISIHDFPKGTQAGLCLHEILEDFKFGQAAAGQETLIADKLKKYGFEEIWLPAVAEMAEACRKTPLTGAYDLSDISPECRCPEMGFTLHTEDFSLKRLRDWFARDDIRLPEVCRAAAETLDFHTVNGFLNGFVDMVCQDPDGNICVIDYKSNHLGTDASAYTQQAMDEAVAHHHYYLQALIYAVAAARYFKLRGQPPAAVSVRYLFLRGLDGKGGGVWRWDIDAAALEQIK

SEQ ID NO: 29432 - protein, 228 aa, Neisseria meningitidis; identical to SEQ ID NO: 15885

SEQ ID NO: 29433 - protein, 139 aa, Neisseria meningitidis; identical to SEQ ID NO: 2531

SEQ ID NO: 29434 - protein, 412 aa, Neisseria meningitidis; identical to SEQ ID NO: 2406

SEQ ID NO: 29435 - protein, 887 aa, Neisseria meningitidis; identical to SEQ ID NO: 15395

SEQ ID NO: 29436 - protein, 94 aa, Neisseria meningitidis; identical to SEQ ID NO: 15967

SEQ ID NO: 29437 - protein, 206 aa, Neisseria meningitidis
MKNNDCFRLKNPQSGMALIEVLVAMLVLTIGILALLSVQLRTVASVREAETQTIVSQITQNLMEGMLMNPTIDSDSNKKNYSLYMGNHTLPHTLSAVDGDFAIDAMKTKTQLAEAQLKRFSYELKNALPDAAAIHYAVCKDSSGNAPTLSGNAFSSNCDNKANGDTLIKVLWVNDSAGDSDIARTNLETNGNNIVYTYQARVGGRE

SEQ ID NO: 29438 - protein, 188 aa, Neisseria meningitidis; identical to SEQ ID NO: 15418

SEQ ID NO: 29439 - protein, 241 aa, Neisseria meningitidis
MDFLSCWRRIADAPTIRRCVLCHGSSGVSDGICAGCNTDLASFRTDAANSCPLCFMHVQGGAVCGGCQKKPPAFDRMWASLHYEPPVSNMIRALKHLADLGMVQPLADLMMQNPPDRLADECFDFVLPVPLSRERLLQRGFNQSEGIVGLLAQRYGWRILPRHTVFRHHRPPQSTLKGSERRRNIKNAFEIRTPIPENCNILLIDDVFTTGATLDELAKTLKKSGANRICCWTLARTPMKK

SEQ ID NO: 29440 - protein, 281 aa, Neisseria meningitidis
MLSYRHAFHAGNHADILKHFTLFLVLQYFNRKDKPYWYIDTHGGAGVYNLEGSEAQKVGEYRQGIALLRQAQNLPAELSDFAAHIQKILPSPELYCGSPWLAQSLTRVGDKLRLFELHPTDFVHLQNNMGEAGLGKRGQVLREDGYKELISLLPPPPRRATVLIDPPYEEKQDYRRVTETLKAALKRFESGCYLIWYPCLSREESRKLPEELKKLLPDNYLHAELHVHAPKADGFGMHGSGMFVINPPYLLAEQLAANLPALTRLLAQDEGARYLLDSKIR

SEQ ID NO: 29441 - protein, 169 aa, Neisseria meningitidis; identical to SEQ ID NO: 219

SEQ ID NO: 29442 - protein, 351 aa, Neisseria meningitidis
MTILSDVKALGQQIWLDNLSRSLVQSGELAQMLKQGVCGVTSNPAIFQKAFAGDALYADEVAALKQQDLTPKQRYETMAVADVRAACGVCLAEHESTGGKTGFVSLEVSPELSKDAQGTVEEARRLYAAIGCKNAMIKVPATDAGIDALETLVSDGISVNLTLLFSRAQTLKAYAAYARGIAKRLAAGQSVAHIHVVASFFISRVDGALDTTLPDHLKGKIAIALAKAAYQDWEQYFTAPEFAALEAQGANRVQLLWASTGVKNPAYPDTLYVDSLIGAHTVNTVPDATLKAFIDHGTAKATLTEGVEEAQAQLAETAALGIDVETLATRLQEDGLKQFEEAFEKLLAPLV

SEQ ID NO: 29443 - protein, 312 aa, Neisseria meningitidis; identical to SEQ ID NO: 6959

SEQ ID NO: 29444 - protein, 365 aa, Neisseria meningitidis; identical to SEQ ID NO: 14497

SEQ ID NO: 29445 - protein, 701 aa, Neisseria meningitidis; identical to SEQ ID NO: 6719

SEQ ID NO: 29446 - protein, 208 aa, Neisseria meningitidis; identical to SEQ ID NO: 17482

SEQ ID NO: 29447 - protein, 79 aa, Neisseria meningitidis; identical to SEQ ID NO: 14714

SEQ ID NO: 29448 - protein, 193 aa, Neisseria meningitidis; identical to SEQ ID NO: 14766

SEQ ID NO: 29449 - protein, 237 aa, Neisseria meningitidis; identical to SEQ ID NO: 14709

SEQ ID NO: 29450 - protein, 636 aa, Neisseria meningitidis; identical to SEQ ID NO: 15487

SEQ ID NO: 29451 - protein, 311 aa, Neisseria meningitidis; identical to SEQ ID NO: 5677

SEQ ID NO: 29452 - protein, 553 aa, Neisseria meningitidis
MLTYTPPDARPPAKTHEKPWLLLLMAFAWLWPGVFSHDLWNPAEPAVYTAVEALAGSPTPLVAHLFGQTDFGIPPVYLWVAAAFKHLLSPWAADPYDAARFAGVFFAVVGLTSCGFAGFNFLGSHHGRSVVLILIGCIGLIPVAHFLNPTAAAFAAAGLVLHGYSLARRRVIAASFLLGTGWTLMSLAAAYPAAFALMLPLPVLMFFRPWQSRRLMLTAVASLAFALPLMTVYPLLLAKTQPALFAQWLDDHVFGTFGGVRHVQTAFSLFYYLKNLLWFALPALPLAVWTVCRTRLFSTDWGILGVVWMLAVLVLLAVNPQRFQDNLVWLLPPLALFGAAQLDSLRRGAAAFVNWFGIMAFGLFAVFLWTGFFAMNYGWPAKLAERAAYFSPYYVPDIDPIPMAVAVLFTPLWLWAITRKNIRGRQAVTNWAAGVTLTWALLMTLFLPWLDAAKSHAPVVRSMEASLSPELKRELSDGIECIDIGGGDLHTRIVWTQYGTLPHRVGDVQCRYRIVRLPQNADASQGWQTVWQGARPRNKDSKFALIRKIGENI

SEQ ID NO: 29453 - protein, 427 aa, Neisseria meningitidis
MFERSVIAMACIFALSACGGGGGGSPDVKSADTLSKPAAPVVAEKETEVKEDAPQAGSQGQGAPSTQGSQDMAAVSAENTGNGGAATTDKPKNEDEGPQNDMLQNSAESANQTGNNQPADSSDSAPASNPAPANGGSNFGRVDLANGVLIDGPSQNITLTHCKGDSCNGDNLLDEEAPSKSEFENLNESERIEKYKKDGKSDKFTNLVATAVQANGTNKYVIIYKDKSASSSFARFRRSARSRRSLPAEMPLIPVNQADTLIVDGEAVSLTGHSGNIFAPEGNYRYLTYGAEKLPGGSYALRVQGEPAKGEMLAGTAVYNGEVLHFHTENGRPYPTRGRFAAKVDFGSKSVDGIIDSGDDLHMGTQKFKAAIDGNGFKGTWTENGGGDVSGRFYGPAGEEVAGKYSYRPTDAEKGGFGVFAGKKEQD

SEQ ID NO: 29454 - protein, 402 aa, Neisseria meningitidis; identical to SEQ ID NO: 2438

SEQ ID NO: 29455 - protein, 281 aa, Neisseria meningitidis; identical to SEQ ID NO: 3768

SEQ ID NO: 29456 - protein, 234 aa, Neisseria meningitidis; identical to SEQ ID NO: 23288

SEQ ID NO: 29457 - protein, 260 aa, Neisseria meningitidis
MTDILNKILTAKAQEVAAQKAAVNAEHIRALAAEAAPVRSFIGSIRGKHRLNLPAVIAEIKKASPSKGLIRPDFRPAEIARAYENAGVACLSVLTDEPYFQGSPEYLKQAREAVSLPVLRKDFIIDEYQVYQARAWGADAVLLIAAALEQEQLERFEAVAHELGMTVLLELHDETELEKCRNLTTPLWGVNNRNLRTFEVSLDQTLSLLPALEGKTVVTESGITGKADVEFMQSRGVHTFLIGETFMRADDIEAEVGKLF

SEQ ID NO: 29458 - protein, 45 aa, Neisseria meningitidis; identical to SEQ ID NO: 7562

SEQ ID NO: 29459 - protein, 315 aa, Neisseria meningitidis; identical to SEQ ID NO: 15264

SEQ ID NO: 29460 - protein, 512 aa, Neisseria meningitidis; identical to SEQ ID NO: 15584

SEQ ID NO: 29461 - protein, 327 aa, Neisseria meningitidis; identical to SEQ ID NO: 294

SEQ ID NO: 29462 - protein, 109 aa, Neisseria meningitidis; identical to SEQ ID NO: 6762

SEQ ID NO: 29463 - protein, 134 aa, Neisseria meningitidis; identical to SEQ ID NO: 23009

SEQ ID NO: 29464 - protein, 305 aa, Neisseria meningitidis; identical to SEQ ID NO: 10870

SEQ ID NO: 29465 - protein, 200 aa, Neisseria meningitidis; identical to SEQ ID NO: 7230

SEQ ID NO: 29466 - protein, 147 aa, Neisseria meningitidis
MKKQITAAVMMLSMIAPAMANGLDNQAFEDQVFHTRADAPMQLAELSQKEMKETEGAAAPLVAIGILHAGRFLAQRWVTQRVAAQALSRGANVYARTSQQARAVANQAWGRQNVIRHGQKEIHSNYSHFQNSSQKIRGHAFYGNKHR

SEQ ID NO: 29467 - protein, 204 aa, Neisseria meningitidis; identical to SEQ ID NO: 13454

SEQ ID NO: 29468 - protein, 477 aa, Neisseria meningitidis; identical to SEQ ID NO: 8039

SEQ ID NO: 29469 - protein, 167 aa, Neisseria meningitidis; identical to SEQ ID NO: 26839

SEQ ID NO: 29470 - protein, 321 aa, Neisseria meningitidis; identical to SEQ ID NO: 4494

SEQ ID NO: 29471 - protein, 841 aa, Neisseria meningitidis; identical to SEQ ID NO: 14601

SEQ ID NO: 29472 - protein, 217 aa, Neisseria meningitidis; identical to SEQ ID NO: 15323

SEQ ID NO: 29473 - protein, 304 aa, Neisseria meningitidis; identical to SEQ ID NO: 3139

SEQ ID NO: 29474 - protein, 449 aa, Neisseria meningitidis; identical to SEQ ID NO: 5514

SEQ ID NO: 29475 - protein, 180 aa, Neisseria meningitidis; identical to SEQ ID NO: 9654

SEQ ID NO: 29476 - protein, 82 aa, Neisseria meningitidis; identical to SEQ ID NO: 2338

SEQ ID NO: 29477 - protein, 314 aa, Neisseria meningitidis; identical to SEQ ID NO: 22094

SEQ ID NO: 29478 - protein, 290 aa, Neisseria meningitidis; identical to SEQ ID NO: 16705

SEQ ID NO: 29479 - protein, 215 aa, Neisseria meningitidis; identical to SEQ ID NO: 4487

SEQ ID NO: 29480 - protein, 171 aa, Neisseria meningitidis
MYTCTSCGEKHEDMPAIGFTAPYPYNQLSEEERIAYQAECGGDFCIIRYPDQTDRFIRAVLLIPIIGHEETLEYGVWVSVSEKSFNDYQSHFHDNPENVVYFGMICNRLPPYESDTFGLHCNVVTQPDGQRPLLQLHQSGGHPLVRDFYHGIEYAEAQARIGAVSESDCSG

SEQ ID NO: 29481 - protein, 133 aa, Neisseria meningitidis; identical to SEQ ID NO: 15506

SEQ ID NO: 29482 - protein, 192 aa, Neisseria meningitidis; identical to SEQ ID NO: 24970

SEQ ID NO: 29483 - protein, 621 aa, Neisseria meningitidis; identical to SEQ ID NO: 15215

SEQ ID NO: 29484 - protein, 114 aa, Neisseria meningitidis; identical to SEQ ID NO: 6153

SEQ ID NO: 29485 - protein, 222 aa, Neisseria meningitidis; identical to SEQ ID NO: 14210

SEQ ID NO: 29486 - protein, 145 aa, Neisseria meningitidis; identical to SEQ ID NO: 7320

SEQ ID NO: 29487 - protein, 214 aa, Neisseria meningitidis; identical to SEQ ID NO: 2541

SEQ ID NO: 29488 - protein, 344 aa, Neisseria meningitidis; identical to SEQ ID NO: 6064

SEQ ID NO: 29489 - protein, 333 aa, Neisseria meningitidis; identical to SEQ ID NO: 14685

SEQ ID NO: 29490 - protein, 198 aa, Neisseria meningitidis
MKITHCKLKKKVQKELLRFFVLEVTAHSAADILGIHPNSAALFYRKIRTVINHHLALAADEVFEGPVEPDESDFGGRRKGRRGRGAAGKVVVFGILKRNGRVYTVVVDNAKSETLLPVIKKKIMPDSIVYTDSLSSCDKLDVSGFIHYRINHSKEFADRQNHINGIENFWNQAKRVLRKYSGLARTFPRIGSATGCAD

SEQ ID NO: 29491 - protein, 141 aa, Neisseria meningitidis; identical to SEQ ID NO: 6006

SEQ ID NO: 29492 - protein, 630 aa, Neisseria meningitidis; identical to SEQ ID NO: 5130

SEQ ID NO: 29493 - protein, 389 aa, Neisseria meningitidis
MPQIKIPAVYYRGGTSKGVFFKRSDLPEAAREAGSARDKILLRVLGSPDPYGKQIDGLGNASSSTSKAVILDKSERADHDVDYLFGQVSIDKPFVDWSGNCGNLTAAVGAFAIEQGLVDKGKIPSDGICTVKIWQKNIGKTIIAHVPMQNGAVLETGDFELDGVTFPAAEVQIEFLDPADGEGSMFPTGNLVDEIDVPNIGRLKATLINAGIPTVFLNAADLGYTGKELQDDINNDAAALEKFEKIRAYGALKMGLISDVSEAAARAHTPKVAFVASAADYTASSGKTVNAADIDLLVRALSMGKLHHAMMGTASVAIATAAAVPGTLVNLAAGGGTRKEVRFGHPSGTLRVGAAAECQDGQWTATKAVMSRSARVMMEGWVRVPEDCF

SEQ ID NO: 29494 - protein, 102 aa, Neisseria meningitidis; identical to SEQ ID NO: 22709

SEQ ID NO: 29495 - protein, 91 aa, Neisseria meningitidis; identical to SEQ ID NO: 5612

SEQ ID NO: 29496 - protein, 259 aa, Neisseria meningitidis; identical to SEQ ID NO: 1423

SEQ ID NO: 29497 - protein, 275 aa, Neisseria meningitidis
MDGEGMSVGHYENFPVGSLILPRRLRKPVHAVYAFARTADDMADEGSMPSEARLAGLEGLRRELDVLASGGRSAHPLIARLDAEAVVPFGLDLQPFYDLLSAFSQDVVKTRYGNFGELADYCRRSANPVGRIMLALYGKTDAVCVAQSDGICTALQLVNFWQDVAVDWQKGRVYIPQDDLLKFGVSEGQIAEGRADAAFQRLMAYECRCAFRMLKAGSPLARELKGRIGLELRMIVLGAQLILQKLDACRYDVFAQRPVLDKKDWLIMLKRALWK

SEQ ID NO: 29498 - protein, 468 aa, Neisseria meningitidis; identical to SEQ ID NO: 23058

SEQ ID NO: 29499 - protein, 467 aa, Neisseria meningitidis; identical to SEQ ID NO: 687

SEQ ID NO: 29500 - protein, 371 aa, Neisseria meningitidis
MKIVIAPDSFKESLTAQQVAEAIKRGFQQSIADVECLLCPVGDGGEGTVDAIRHSLDLEEKCLQVTGPFGQKEVMRYFQKEQLALFEVADLVGLGKIPLEKRNPLQIQTRGIGELIRHLISQEIKEIYIGVGGTASNDGGIGIAAGLGYQFYDEDGNALPACGQSLLNLASVSTENRYKIPEDVHIRILADVVSPLCGHQGATYTFGKQKGLDSTMFEVVDQAIQDFYEKVSPATLKLKGAGAGGGIAGGLCAFAQASIVSGIDTCLDLIDFDKKVSDVDLVIVGEGRLDRQSLAGKAPIGVAKRTPVGVPVVAICGSLVEDLPSLPFENIQAAFSILEKSEPLEDSLKNASLYLEHTASNIGHLLNMPKI

SEQ ID NO: 29501 - protein, 166 aa, Neisseria meningitidis; identical to SEQ ID NO: 14323

SEQ ID NO: 29502 - protein, 594 aa, Neisseria meningitidis; identical to SEQ ID NO: 14919

SEQ ID NO: 29503 - protein, 252 aa, Neisseria meningitidis; identical to SEQ ID NO: 2885

SEQ ID NO: 29504 - protein, 752 aa, Neisseria meningitidis
MYTRIMEISPWTLRSAKLEKEHKRLQESLTSLGNGYMGMRGSFEETYSADSHLGTYIAGVWFPDKTRVGWWKNGYPKYFGKAINALNFSKVKIFVDGQEVDLAKNDVAGFSVELDMQHGVLRRLFTVFGVRFDVCKFLSVAQKELAVIRWEAVSVDGKTHQVRIDSIIDADVKNEDSNYEEKFWQVLDKGVSDGLSYIAAQTVANPFGVEQFIVNAEQTFAGSFKALGGSQTDWQVSNSFEAEVGGTPKTFEKRVIVTTSRDYQGLEAVKAAGRALSEKVAGVAFETLLDAHKAGWLHRWEIADVVIEGSDEAQQGIRFNLFQLFSTYYGEDARLNIGPKGFTGEKYGGATYWDTEAYAVPLYLALAEPEVTRNLLQYRRNQLPQAQHNAREQGLAGALYPMVTFTGIECHNEWEITFEEIHRNGAIPYAIYDYTNYTGDEGYLAKEGLEVLVEVSRFWADRVHFSKRNGKYMIHGVTGPNEYENNINNNWYTNTLAAWVLDYTREALAKYPRPDLNVRAAELEKWADISANMYRPHDEELGVFVQHDGFLDKDIRPVSALSPDDLPLNQKWSWDKILRSPFIKQADVLQGIYFFGDRFNIDEKRRNFDFYEPMTVHESSLSPCIHSILAAELGKEEKAVEMYRRTARLDLDNYNNDTEDGLHITSMTGSWLAIVQGFAQMKTWGGKLSFAPFLPGAWTGYAFHINYRGRLIKVAVGKENVVFTLLKGEPLDLQVYGKDITLDGSHAAALEK

SEQ ID NO: 29505 - protein, 225 aa, Neisseria meningitidis; identical to SEQ ID NO: 6348

SEQ ID NO: 29506 - protein, 514 aa, Neisseria meningitidis; identical to SEQ ID NO: 23953

SEQ ID NO: 29507 - protein, 1318 aa, Neisseria meningitidis
MSVVLPLRGVTALSDFRVEKLLQKAAALGLPEVKLSSEFWYFAGSEKALDAATVEKLQALLAAQSVEQTPKAREGLHLFLVTPRLGTISPWASKATNIAENCGLAGIERIERGMAVWLEGALTDEQKQQWAALLHDRMTESVLPDFQTASKLFHHLESETFSSVDILGGGKEALVKANTEMGLALSADEIDYLVENYQALQRNPSDVELMMFAQANSEHCRHKIFNADFILNGEKQPKSLFGMIRDTHNAHPEGTVVAYKDNSSVIEGAKIERFYPNAAENQGYRFHEEDTHIIMKVETHNHPTAIAPFAGAATGAGGEIRDEGATGKGSRPKAGLTGFTVSNLNIPGLKQPWEQDYGKPEHISSPLDIMIEGPIGGAAFNNEFGRPNLLGYFRTFEEKFDGQVRGYHKPIMIAGGLGSIQAQQTHKDEIPEGALLIQLGGPGMLIGLGGGAASSMDTGTNDASLDFNSVQRGNPEIERRAQEVIDRCWQLGDKNPIISIHDVGAGGLSNAFPELVNDAGRGAVFELREVPLEEHGLTPLQIWCNESQERYVLSILEKDLDTFRAICERERCPFAVVGTATDDGHLKVRDDLFANNPVDLPLNVLLGKPPKTTRTDKTVAPSKKPFHAGDIDITKAAYRVLRLPTVAAKNFLITIGDRSVGGMTHRDQMVGKYQTPVADCAVTMMGFNTYRGEAMSMGEKPAAALFDAPASGRMCVGEAITNIAAANIGDIGNIKLSANWMAACGNEGEDEKLYRTVEAVSKACQALDLSIPVGKDSLSMKTVWQDGEEKKSVVSPLSLIISAFAPVKDVRKTVTPELKNVEDSVLLFVDLGFGKARMGGSAFGQVYNNMTGDAPDLDDTGRLKAFYNVIQQLVAEDKLLAYHDRSDGGLFATLAEMAFAARCGISADIDCLMDKFLPIHYPDFQGDPAEDLSDELYNHAAIKILFNEELGAVIQIRQQDRDYVDAAFKAADLTDAVSRIGSPDFDNEFISFFGYGYFLEQNRADLQRAWQETSHAIQKLRDNPACADSEFALIGDNDRSALFADVKFDVNEDIAAPFINSGAKPKIAILREQGVNGQIEMAAAFTRAGFDAYDVHMSDLMAGRFRLADFKMLAACGGFSYGDVLGAGEGWAKSILFHPALRDQFAAFFADPDTLTLGVCNGCQMVSNLAEIIPGTAGWSKFKRNLSEQFEARLSMVHVPKSASLILNEMQGSSLPVVVSHGEGRADFALHGGNISADLGIALQYVDGQNQVTQTYPLNPNGSPQGIAGITNADGRVTIMMPHPERVYRAAQMSWKPEGWTELSGWYRLFAGARKALG

SEQ ID NO: 29508 - protein, 165 aa, Neisseria meningitidis; identical to SEQ ID NO: 8999

SEQ ID NO: 29509 - protein, 82 aa, Neisseria meningitidis; identical to SEQ ID NO: 1744

SEQ ID NO: 29510 - protein, 360 aa, Neisseria meningitidis; identical to SEQ ID NO: 7308

SEQ ID NO: 29511 - protein, 72 aa, Neisseria meningitidis; identical to SEQ ID NO: 113

SEQ ID NO: 29512 - protein, 310 aa, Neisseria meningitidis
MKQNRTFTFPDFRTVYSYAPLYRLQHLKYTLRKFFGKKEIYAFEQFVNASPIRQGLFLHCPQNAYPLLREFVDRRFNCKRRLDAMTADFLMAEKLFGTDILHQMEDYRFHLVLAHLSDGISLWLNRNDNCVEEGAWSLSLRDEAGNRLYMATFAFVGTHLLTASVQGPAGEEAKDTVRRITKQLHGLRPQQLMVTALQYFAAVLGLDGAMGIAQKHQVKLRWKLKKRVKMNYDAFWQEYGASLERDGYWHLPQTPARKDLTDIESKKRSMYRKRYEMLDNMVAEMKDGLKTEARGISDGIQTEKPLRQTA

SEQ ID NO: 29513 - protein, 929 aa, Neisseria meningitidis; identical to SEQ ID NO: 23362

SEQ ID NO: 29514 - protein, 254 aa, Neisseria meningitidis
MCSCLVVKNTVIGSGRTKIAVPLVARDAAELSAVLDQIKNLPFDIVEFRADFLECAGSIGEVLRHTQTVRDALPDKPLLFTFRRHGEGGAFPCSDDYYFKLLDALIESRLPDIIDIELFAGETAVRRAVADAQKNGIAALLCNHEFHRTPPQEEIVCRLKQMEDCGADICKIAVMPQSAEDVLTLLSATLEAKRLAAKPVVTMSMGQTGAVSRLAGQVFGSSITFGSGTQNSAPGQIGVSALRAALDCLESGAD

SEQ ID NO: 29515 - protein, 464 aa, Neisseria meningitidis; identical to SEQ ID NO: 4310

SEQ ID NO: 29516 - protein, 136 aa, Neisseria meningitidis; identical to SEQ ID NO: 14101

SEQ ID NO: 29517 - protein, 210 aa, Neisseria meningitidis
MRKTKTEALKTKEHLMLAALETFYRKGIARTSLNEIAQAAGVTRGALYWHFKNKEDLFDALFQRICDDIENCIAQDAKDAEGESWTVFRHTLLHFFERLQSNDIYYKFHNILFLKCEHTEQNAAVIAIARKHQAIWREKITAVLTEAVENQDLADDLDKETAVIFIKSTLDGLIWRWFSSCERFDLGKTAPRIIGIMMDNLENHPDLRRK

SEQ ID NO: 29518 - protein, 635 aa, Neisseria meningitidis; identical to SEQ ID NO: 23904

SEQ ID NO: 29519 - protein, 103 aa, Neisseria meningitidis; identical to SEQ ID NO: 1510

SEQ ID NO: 29520 - protein, 469 aa, Neisseria meningitidis; identical to SEQ ID NO: 6096

SEQ ID NO: 29521 - protein, 69 aa, Neisseria meningitidis; identical to SEQ ID NO: 4226

SEQ ID NO: 29522 - protein, 613 aa, Neisseria meningitidis; identical to SEQ ID NO: 779

SEQ ID NO: 29523 - protein, 434 aa, Neisseria meningitidis; identical to SEQ ID NO: 7859

SEQ ID NO: 29524 - protein, 274 aa, Neisseria meningitidis; identical to SEQ ID NO: 9480

SEQ ID NO: 29525 - protein, 141 aa, Neisseria meningitidis; identical to SEQ ID NO: 7081

SEQ ID NO: 29526 - protein, 122 aa, Neisseria meningitidis; identical to SEQ ID NO: 18664

SEQ ID NO: 29527 - protein, 218 aa, Neisseria meningitidis
MEKSGIVYLMKTVIKGVYKIGISEVSNFEGRMRHLENNGYANVAGLERILAVKTDNYKEKENLLHEIFSKSRIGDTELFAVDENLVKRLFLSLRGEIVFPKNETAESEFEKSVHERRQEGNAGSGRKQLLDLVRRGHREYPYALPRLLAGAASYKPRKSKIRLFKEAYFGKSGTRLTDEIADGIHIYTCFSRADLEKAYSEYLELFKSESDAEGRKPR

SEQ ID NO: 29528 - protein, 321 aa, Neisseria meningitidis; identical to SEQ ID NO: 6649

SEQ ID NO: 29529 - protein, 1010 aa, Neisseria meningitidis; identical to SEQ ID NO: 11657

SEQ ID NO: 29530 - protein, 222 aa, Neisseria meningitidis; identical to SEQ ID NO: 6339

SEQ ID NO: 29531 - protein, 167 aa, Neisseria meningitidis; identical to SEQ ID NO: 14758

SEQ ID NO: 29532 - protein, 231 aa, Neisseria meningitidis; identical to SEQ ID NO: 2473

SEQ ID NO: 29533 - protein, 94 aa, Neisseria meningitidis; identical to SEQ ID NO: 6698

SEQ ID NO: 29534 - protein, 171 aa, Neisseria meningitidis; identical to SEQ ID NO: 15179

SEQ ID NO: 29535 - protein, 457 aa, Neisseria meningitidis; identical to SEQ ID NO: 15320

SEQ ID NO: 29536 - protein, 107 aa, Neisseria meningitidis; identical to SEQ ID NO: 23266

SEQ ID NO: 29537 - protein, 148 aa, Neisseria meningitidis; identical to SEQ ID NO: 14724

SEQ ID NO: 29538 - protein, 252 aa, Neisseria meningitidis
MITIRNVSYRIGTRPILDNVSLDIPEGGITALVGPNGVGKSTLFSFMARLRPLESGSIAYRGKNLAGTPTAELAKTLSILTQENSIMSRITVRDLLMFGRYPYHQGRPTAECRRIVNGAIEEFHLQDLSDRYLTELSGGQRQRAMIAMVFCQSTDYVLLDEPLNNLDMYHARSLMQILRRLTDEHKRTTVVVLHDINQAAAYADYVVAMKNGKAVLTGTPEEVFTVHNIKELFDMDVDVLDYEGKKLIVHHI

SEQ ID NO: 29539 - protein, 205 aa, Neisseria meningitidis; identical to SEQ ID NO: 2053

SEQ ID NO: 29540 - protein, 99 aa, Neisseria meningitidis; identical to SEQ ID NO: 3688

SEQ ID NO: 29541 - protein, 295 aa, Neisseria meningitidis; identical to SEQ ID NO: 14587

SEQ ID NO: 29542 - protein, 279 aa, Neisseria meningitidis; identical to SEQ ID NO: 9071

SEQ ID NO: 29543 - protein, 321 aa, Neisseria meningitidis
MSYTQLTQGERYHIQYLSRHCTVTEIAKQLNRHKSTISREIRRHRTQGQQYSAEKAQRQSRTIKQRKRQPYKLDSQLIQHIDTLIRRKLSPEQVCAYLCKHHRITLHHSTIYRYLRQDKSNGSTLWQHLRICSKPYRKRYGSTWTRGKVPNRVGIENRPAIVDQKSRIGDWEADTIVGKGQKSALLTLVERVTRYTIICKLDSLKAEDTARAAVRALKAHKDRVHTITMDNGKEFYQHTKITKALKAETYFCRPYHSWEKGLNENTNGLIRQYFPKQTDFRNISDREIRRVQDELNHRPRKTLGYETPSVLFLNLFQPLVP

SEQ ID NO: 29544 - protein, 62 aa, Neisseria meningitidis; identical to SEQ ID NO: 5951

SEQ ID NO: 29545 - protein, 200 aa, Neisseria meningitidis; identical to SEQ ID NO: 7297

SEQ ID NO: 29546 - protein, 207 aa, Neisseria meningitidis
MMKPHNLFQFLAVCSLTVSVASAQAGAVDALKQFNNDADGISGSFTQTVQSKKKTQTAHGTFKILRPALFKWEYTSPYKQTIVGDGQTVWLYDVDLAQVTKSSQDQAIGGSPAAILSNKTALESSYTLKEDGSSNGIDYVLATPKRNNAGYQYIRIGFKGGNLAAMQLKDSFGNQTSISFGGLNTNPQLSRGAFKFTPPKGVDVLSN

SEQ ID NO: 29547 - protein, 137 aa, Neisseria meningitidis; identical to SEQ ID NO: 14675

SEQ ID NO: 29548 - protein, 1315 aa, Neisseria meningitidis
MTSANFNINGFGDVKLTPYSPLLGYKAWDSFIGSIQSLSDLIYNVDNNRNKMEITVNNAIQAADSFLSSIGRDNKITNTASLLASLDNIFLNLRNVSRDIRETGKFKPNDIQQAIGDIFIAAGDGLQYIKQQTEAMAQSKFLPTKLKTGLNDVLNSRMLKSSTVLQHELNYLGFKIKDYGNERLGESIMNIDDFTPSKIANFFADPDTYSNVLEEVSRFIYSLVPDDANPWKGGEDYIGRGISEWGELLEKWYKQDFLPYLEKEWDQFPKFEDWLPEFPEWAREWLKLDPKRSGKYHVYDPLALDLDGDGIETVATKGFAGSLFDHTNNGIRTATGWVSADDGLLVRDLNGNGIIDNGAELFGDNTKLADGSFAKHGYAALAELDSNGDNIINAADAAFQTLRVWQDLNQDGISQTNELRTLEELGIQSLDLAYKDVNKNLGNGNTLAQQGSYTKTNGTTAKMGDLLLAADNLHSRFKDKVELTAKQAKAANLAGIGRLRDLREAAALSGDLANMLKAYSAAETKEAQLALLDNLIHKWAETDSNWGKKSPMRLSTDWTQTANEGIALTPSQVAQLKKNALVSLSDKAKAAIDAARDRIAVLDAYTGQDSSTLYYMSEEDALNIVKVTNDTYDHLAKNIYQNLLFQTRLQPYLNQISFKMENDTFTLDFSGLVQAFNHVKETNPQKAFVDLAEMLAYGELRSWYEGRRLMADYVEEAKKAGKFEDYQKVLGQETVALLAKTSGTQADDILQNVGFGHNKNVSLYGNDGNDTLIGGAGNDYLEGGSGSDTYVFGKGFGQDTVYNYDYATGRKDIIRFTDGITADMLTFTREGNHLLIKAKDGSGQVTVQYYFQNDGSGAYRIDEIHFDNGKVLDVATVKELVQQSTDGSDRLYAYQSGNTLNGGLGDDYLYGADGDDLLNGDAGNDSIYSGNGNDTLDGGEGNDALYGYNGNDVLNGGEGNDHLNGEDGNDTLIGGAGNDYLEGGSGSDTYVFGEGFGQDTVYNYDYATGRKDIIRFTDGITADMLTFTREGNHLLIKAKDGSGQVTVQSYFQNDGSGAYRIDEIHFDNGKVLDVATVKELVQQSTDGSDRLYAYQSGNTLNGGLGDDYLYGADGDDLLNGDAGNDSIYSGNGNDTLDGGEGNDALYGYNGNDVLNGGEGNDHLNGEDGNDTLIGGAGNDYLEGGSGSDTYVFGKGFGQDTVYNYHVDKNSDTMHFKGFKAADVHFIRSGSDLVLSASEQDNVRISGFFYGENHRVDTFVFDDAAISNPDFAKYINAGNNLVQSMSVFGSNTAATGGNVDANTQSVQQPLLVTPSA

SEQ ID NO: 29549 - protein, 145 aa, Neisseria meningitidis; identical to SEQ ID NO: 22493

SEQ ID NO: 29550 - protein, 207 aa, Neisseria meningitidis; identical to SEQ ID NO: 15776

SEQ ID NO: 29551 - protein, 196 aa, Neisseria meningitidis; identical to SEQ ID NO: 259

SEQ ID NO: 29552 - protein, 119 aa, Neisseria meningitidis; identical to SEQ ID NO: 121

SEQ ID NO: 29553 - protein, 90 aa, Neisseria meningitidis; identical to SEQ ID NO: 7650

SEQ ID NO: 29554 - protein, 204 aa, Neisseria meningitidis; identical to SEQ ID NO: 6872

SEQ ID NO: 29555 - protein, 292 aa, Neisseria meningitidis
VVGNGKKYAAPLLVLGCVVFGLGSLIVRSVPVGSYAIAFWRLLISVFVFWFLARFFGQKFPKNRKTVRYALTAGVFLAFDLALWHESIHAVGPGISTLLNSLQIFFLSAIGVFFFGERLSGLKKAGLISAVAGVAMIAGAEFGYNGNAVWGFVSGLVSGLMLALSMVFVRKTHEVEPVALFPSMMILSLGGAVSLVVPALLMDGGVLYPTTWKDAGLVLVYGVVMQCFAWAMVAYAIPLLSLSLTGLLLLSEPVAALFIDYFGLGKPIEGVQWAGVALTLSAIYLGSLKQQS

SEQ ID NO: 29556 - protein, 198 aa, Neisseria meningitidis; identical to SEQ ID NO: 1998

SEQ ID NO: 29557 - protein, 244 aa, Neisseria meningitidis; identical to SEQ ID NO: 19407

SEQ ID NO: 29558 - protein, 323 aa, Neisseria meningitidis
MTEYPGIGSPLFYGVFFAAVLVMIALDMFSLKKNSSHKVGVKEALAWSGLWVAVSCLFAGWLYFKLAGNPGYGAAVAKEKVLEFFTGYILEKSLAVDNIFVFLMIFGYFKVAPQFQHRVLLYGVLGALVLRTVMIFVGAALVQQFEWILYLFGAFLLYTGIHMMKPEGDEEGDLANSRLLNAVKKVVPVGTEFHGEKFFTVENGKKIATPLFLVLVMIELSDVVFAVDSIPAVFAVTTDPFIVLTSNIFAILGLRAMYFLLADVAERFVFLKYGLAFVLSFIGVKMLVMHWVHIPISVSLSVVFGALGASVLTSLVYTKKTGR

SEQ ID NO: 29559 - protein, 206 aa, Neisseria meningitidis
LLGVVPGIGESIQAYKVAKAAKNLQGMKKALDKAATVATAQGYVSKTKIKIGQTELRVTAATDKQLLKAIGEGRDTTGKMTEQLFDSLAKQNGFRVLSGGKYGGNNGFDHVWQAADGSVVLIVESKQIRNGTVQLNPNGAGGYTQMSEDWIRQVLDQLPDGSPAKAAVFKANKNGTLKTAIAGVDRQTGKAVILPVKVPSKTNIRR

SEQ ID NO: 29560 - protein, 144 aa, Neisseria meningitidis; identical to SEQ ID NO: 6

SEQ ID NO: 29561 - protein, 225 aa, Neisseria meningitidis; identical to SEQ ID NO: 1002

SEQ ID NO: 29562 - protein, 207 aa, Neisseria meningitidis; identical to SEQ ID NO: 9989

SEQ ID NO: 29563 - protein, 315 aa, Neisseria meningitidis; identical to SEQ ID NO: 8207

SEQ ID NO: 29564 - protein, 176 aa, Neisseria meningitidis; identical to SEQ ID NO: 316

SEQ ID NO: 29565 - protein, 313 aa, Neisseria meningitidis; identical to SEQ ID NO: 24046

SEQ ID NO: 29566 - protein, 257 aa, Neisseria meningitidis
MKPKIQRHGEILSLVRRHQFMSVDELAAALDVTPQTIRRDIRELEEVGSLKRHHGGASSGGNLPEGLPADRQTRCQNEKNAIARLIAEHIPDESSLFVSIGTTMEAVASELVRRRGSLRIITNNIHVASIVSARTDYTVIITSGVVRPLDGGITGVATVDFINQFKVDYAVMSTHGVESDGSLLDDDYKEVSVMQAMIANARVRFLGVDHSKFRSNALVRLGDITAFDKVFTDRLPDTAMQKMLKEAGVECLIADAV

SEQ ID NO: 29567 - protein, 76 aa, Neisseria meningitidis; identical to SEQ ID NO: 3081

SEQ ID NO: 29568 - protein, 344 aa, Neisseria meningitidis; identical to SEQ ID NO: 7515

SEQ ID NO: 29569 - protein, 200 aa, Neisseria meningitidis; identical to SEQ ID NO: 19173

SEQ ID NO: 29570 - protein, 128 aa, Neisseria meningitidis; identical to SEQ ID NO: 1074

SEQ ID NO: 29571 - protein, 284 aa, Neisseria meningitidis; identical to SEQ ID NO: 14960

SEQ ID NO: 29572 - protein, 92 aa, Neisseria meningitidis; identical to SEQ ID NO: 600

SEQ ID NO: 29573 - protein, 127 aa, Neisseria meningitidis; identical to SEQ ID NO: 15627

SEQ ID NO: 29574 - protein, 346 aa, Neisseria meningitidis; identical to SEQ ID NO: 2509

SEQ ID NO: 29575 - protein, 95 aa, Neisseria meningitidis; identical to SEQ ID NO: 738

SEQ ID NO: 29576 - protein, 287 aa, Neisseria meningitidis; identical to SEQ ID NO: 14921

SEQ ID NO: 29577 - protein, 335 aa, Neisseria meningitidis
MSTFFQQTAQAMIARHIDRFPLLKLDQVIDWQPIEQYLNRQKTRYLRDHRGRPAYPLLSMFKAVLLGQWHSLSDPELEHSLITRIDFNLFCRFDELSIPDYSTLCRYRNRLAQDDTLSELLELINRQLTEKGLKVEKASAAVVDATIIQTVGSKQRQAIEVDEEGQISGQTTPSKDSDARWIKKNGLYKLGYKQHTRTDAEGYIEKLHITPANAHECKHLSPLLEGLPEGTTVYADKGYDSAENRQHLEEHQLLDGIMSKACRNRPLAETQTKRNRYLSKPRYVVEQSFGTLHRKFRYARAAYFGLLKVSAQSHLKAMCLNLLKAANRLSAPATA

SEQ ID NO: 29578 - protein, 473 aa, Neisseria meningitidis
MKIIQIQNNHNVNDDRPEFDRALIASLPASGPRYTSYPTADRFHDGFREGEYIKALHLRGMGALNKPLSLYIHIPFCNTICYYCGCNKIITKDKSRADAYIEYLEKEMELLAPHLNGRHQLAQLHFGGGTPTFLSDEQIERVFRMIRKHFELIPTGEYSIEIDPRKVSRDTVLMLGRLGFNRMSIGIQDFDPKVQAAVNRIQSYEETKEVIDAAREAGFKSVSVDLIYGLPHQTSESIKTTIDTVLSLDPDRLALYHYAHLPHVFKPQRRIDTAAVPDSEEKLDMLQYCVQTLTERGYVFIGMDHFAKPDDELSIALKEGFLQRNFQGYSTYADCDLVAIGVSSIGKIGSTYSQNERDIDAYYAAIDEGRLPIMRGYQLNQDDILRRNIIQDLMCRFALDYRIYESMFGIPFDRYFKDELADLEKLAGLGLVRLNSHGLTVTPKGRFLIRNIAMVFDYHLHHKETKAKYSQTV

SEQ ID NO: 29579 - protein, 473 aa, Neisseria meningitidis; identical to SEQ ID NO: 6909

SEQ ID NO: 29580 - protein, 231 aa, Neisseria meningitidis; identical to SEQ ID NO: 15654

SEQ ID NO: 29581 - protein, 241 aa, Neisseria meningitidis
MRIPLLAPDNYAFPDPTYALARCDGLVGVSGDLDAGRLLEAYRNGVFPWFSRDGWFFWYAVGPRAVVFPDRLHIPRSLAKTLRNGSYRVAVNGCFAEVVAHCAAAARPNQDGTWIAPEFQTAYLKLHEMGHAHSFECHYPDESGETRLAGGFYGVQIGSVFYGESMFALQPDASKIAFACAVPFLADLGVELIDCQQDTEHMRRFGSELLPFADFAERLRMLNAVLLKEEIGRREVACKGL

SEQ ID NO: 29582 - protein, 190 aa, Neisseria meningitidis; identical to SEQ ID NO: 14911

SEQ ID NO: 29583 - protein, 384 aa, Neisseria meningitidis; identical to SEQ ID NO: 23912

SEQ ID NO: 29584 - protein, 228 aa, Neisseria meningitidis; identical to SEQ ID NO: 380

SEQ ID NO: 29585 - protein, 53 aa, Neisseria meningitidis; identical to SEQ ID NO: 14789

SEQ ID NO: 29586 - protein, 151 aa, Neisseria meningitidis; identical to SEQ ID NO: 14268

SEQ ID NO: 29587 - protein, 214 aa, Neisseria meningitidis; identical to SEQ ID NO: 1408

SEQ ID NO: 29588 - protein, 242 aa, Neisseria meningitidis; identical to SEQ ID NO: 107

SEQ ID NO: 29589 - protein, 212 aa, Neisseria meningitidis; identical to SEQ ID NO: 14128

SEQ ID NO: 29590 - protein, 262 aa, Neisseria meningitidis; identical to SEQ ID NO: 256

SEQ ID NO: 29591 - protein, 823 aa, Neisseria meningitidis
MKKTCFHCGLDVPEHLHLTVRYENEDRETCCAGCQAVAQSIIDAGLGSYYKQRTADAQKTELPPQEILDQIRLYDLPEVQSDFVETHGGTREAVLMLGGITCAACVWLIEQQLLRTDGIVRIDLNYSTHRCRVVWDDGKIRLSDILLKIRQIGYTAAPYDAQKIEAANQKERKQYIVRLAVAGLGMMQTMMFALPTYLYGGDIEPDFLQILHWGGFLMVLPVVFYCAVPFYQGALRDLKNRRAGMDTPIAVAIIMTFIAGVYSLATNAGQGMYFESIAMLLFFLLGGRFMEHIACRKAGDAAERLVKLIPAFCHHMPDYPDTQETCEAAVVKLKAGDIVLVKPGETIPVDGTVLEGSSAVNESMLTGESLPVAKMPSEKVTAGTLNTQSPLIIRTDRTGGGTRLSHIVRLLDRALAQKPRTAELAEQYASSFIFGELLLAVPVFIGWTLYADAHTALWITVALLVITCPCALSLATPTALAASTGTLAREGILIGGKQAIETLAQTTDIIFDKTGTLTQGKPAVRRISLLRGTDEAFVLAVAQALEQQSEHPLARAILNCRVSSGSVPDIAIKQRLNRIGEGVGAQLTVNGETQVWALGRASYVAEISGKEPQTEGGGSAVYLGSQSGFQAVFYLTDPLKDSAAEAVRQLAGKNLTLHILSGDRETAVAETARALGVAHYRAQAMPEDKLEYVKALQKEGKKVLMIGDGINDAPVLAQADVSAAAAGGTDIARDGADIVLLNEDLRTVAHLLDQARRTRHIIRQNLIWAGAYNIIAVPLAVLGYVQPWIAALGMSFSSLVVLGNAMRLHKQVDMPSEKMPSEQ

SEQ ID NO: 29592 - protein, 1457 aa, Neisseria meningitidis
MKTTDKRTTETHRKAPKTGRIRFSPAYLAICLSFGILPQAWAGHTYFGINYQYYRDFAENKGKFAVGAKDIEVYNKKGELVGKSMTKAPMIDFSVVSRNGVAALVGDQYIVSVAHNGGYNNVDFGAEGRNPDQHRFTYKIVKRNNYKAGTKGHPYGGDYHMPRLHKFVTDAEPVEMTSYMDGRKYIDQNNYPDRVRIGAGRQYWRSDEDEPNNRESSYHIASAYSWLVGGNTFAQNGSGGGTVNLGSEKIKHSPYGFLPTGGSFGDSGSPMFIYDAQKQKWLINGVLQTGNPYIGKSNGFQLVRKDWFYDEIFAGDTHSVFYEPRQNGKYSFNDDNNGTGKINAKHEHNSLPNRLKTRTVQLFNVSLSETAREPVYHAAGGVNSYRPRLNNGENISFIDEGKGELILTSNINQGAGGLYFQGDFTVSPENNETWQGAGVHISEDSTVTWKVNGVANDRLSKIGKGTLHVQAKGENQGSISVGDGTVILDQQADDKGKKQAFSEIGLVSGRGTVQLNADNQFNPDKLYFGFRGGRLDLNGHSLSFHRIQNTDEGAMIVNHNQDKESTVTITGNKDIATTGNNNSLDSKKEIAYNGWFGEKDTTKTNGRLNLVYQPAAEDRTLLLSGGTNLNGNITQTNGKLFFSGRPTPHAYNHLNDHWSQKEGIPRGEIVWDNDWINRTFKAENFQIKGGQAVVSRNVAKVKGDWHLSNHAQAVFGVAPHQSHTICTRSDWTGLTNCVEKTITDDKVIASLTKTDISGNVDLADHAHLNLTGLATLNGNLSANGDTRYTVSHNATQNGNLSLVGNAQATFNQATLNGNTSASGNASFNLSDHAVQNGSLTLSGNAKANVSHSALNGNVSLADKAVFHFESSRFTGQISGGKDTALHLKDSEWTLPSGTELGNLNLDNATITLNSAYRHDAAGAQTGSATDAPRRRSRRSRRSLLSVTPPTSVESRFNTLTVNGKLNGQGTFRFMSELFGYRSDKLKLAESSEGTYTLAVNNTGNEPASLEQLTVVEGKDNKPLSENLNFTLQNEHVDAGAWRYQLIRKDGEFRLHNPVKEQELSDKLGKAEAKKQAEKDNAQSLDALIAAGRDAVEKTESVAEPARQAGGENVGIMQAEEEKKRVQADKDTALAKQREAETRPATTAFPRARRARRDLPQLQPQPQPQPQRDLISRYANSGLSEFSATLNSVFAVQDELDRVFAEDRRNAVWTSGIRDTKHYRSQDFRAYRQQTDLRQIGMQKNLGSGRVGILFSHNRTENTFDDGIGNSARLAHGAVFGQYGIGRFDIGISTGAGFSSGSLSDGIGSKIRRRVLHYGIQARYRAGFGGFGIEPHIGATRYFVQKADYRYENVNIATPGLAFNRYRAGIKADYSFKPAQHISITPYLSLSYTDAASGKVRTRVNTAVLAQDFGKTRSAEWGVNAEIKGFTLSLHAAAAKGPQLEAQHSAGIKLGYRW

SEQ ID NO: 29593 - protein, 419 aa, Neisseria meningitidis; identical to SEQ ID NO: 6779

SEQ ID NO: 29594 - protein, 157 aa, Neisseria meningitidis; identical to SEQ ID NO: 7285

SEQ ID NO: 29595 - protein, 415 aa, Neisseria meningitidis; identical to SEQ ID NO: 846

SEQ ID NO: 29596 - protein, 330 aa, Neisseria meningitidis; identical to SEQ ID NO: 27804

SEQ ID NO: 29597 - protein, 349 aa, Neisseria meningitidis; identical to SEQ ID NO: 15473

SEQ ID NO: 29598 - protein, 392 aa, Neisseria meningitidis; identical to SEQ ID NO: 276

SEQ ID NO: 29599 - protein, 587 aa, Neisseria meningitidis; identical to SEQ ID NO: 14678

SEQ ID NO: 29600 - protein, 162 aa, Neisseria meningitidis; identical to SEQ ID NO: 911

SEQ ID NO: 29601 - protein, 508 aa, Neisseria meningitidis
MNTPLPYSNYLIRILTASVYDVAVETPLEPARSLSVRLKNNILLKREDLQPVFSFKIRGAYNKMSKLPKDALACGVIAASAGNHAQGVALSAQRLGCRAVIVMPETTPKIKVDAVKSHGGEVVLRGVSYNDAYDYAMELAEKEGLTYIAPFDDPDVIAGQGTVGMEIVSQHPDPIRAVFVPIGGGGLAAGVAAFIKQVRPEIKVIGVQTNDSCCMKQSVEAGEIVHLKDVGLFSDGTAVKVVGNETFRLCKELLDEIITVDTDAVCGAVKDIFDDTRSITEPAGALALAGLKAYIAREGAENQTLIAVTSGANMNFHRLRHVSERSELGEGNEGIFAVTIPEERGSFLKFVNILGNRNITEFNYRYGDDEKAHIFVGLQAAGPQDLAVIGSRLDEAGLPNVDLTDDEIAKIHIRYMVGGRTDKVENERLVSFEFPERPGALARFLNHMQGGWNITLFHYRNHGADYGRILVGIDVPPHDAAAFDGFLESLGYSYHEETQNAAYKLFLA

SEQ ID NO: 29602 - protein, 169 aa, Neisseria meningitidis; identical to SEQ ID NO: 18699

SEQ ID NO: 29603 - protein, 1490 aa, Neisseria meningitidis
MRFTHTIPFYSVLSTLGLFAVSPAYSSIVRSDVDYQYFRDFAENKGAFAVGASNISIQDKQGKILGRVLSGIPMPDFRVSNRQTAIATLVHPQYVNSVKHNVGYGSIQFGNDTQNPEEQAYTYRLVSRNPHPDYDYHLPRLNKLVTEISPAALSSVPLLGNGQPKANAYLDTDRFPYFVRLGSGTQQVRKADGTRTQTAPAYQYLTGGTPLKVLGFQNHGLLVGDSLTDQPLNTYAVAGDSGSPLFAFDKHENRWVLAGVLSTYAGFDSFFNKYIVTQPEFIRSTIRQYETRLDVGLTTNELIWRDNGNGDSTLQGLNERITLPIANPSLAPQNDSRHMPSEDAGKTLILSSRFDNKTLMLADNINQGAGALQFDSNFTVVGKNHTWQGAGVIVADGKRVFWQVSNPKGDRLSKLGAGTLIANGQGINQGDISIGEGTVVLAQKAASDGSKQVFNQVGITSGRGTAVLADSQQIKSENLYFGFRGGRLDLNGNNLAFTHIRHADGGAQIVNHNPDQAATLTLTGNPVLSPEHVEWVQWGNRPQGNAAVYEYINPHRNRRTDYFILKPGGNPREFFPLNMENSTSWQFIGNNRQQAAKQVAQAENARPDLITFGGYLGENAQTGKAAPSYSKTNIEWVNSPNTPHKPSPYTNTPTRTGAGVPTITASKKAATPAPTSHGMPTAPKTGNFSDITGEAAIEKTRHIANAAVYGRPEYRYNGALNLHYRPKRTDSTLLLNGGMNLNGEVLIEGGNMIVSGRPVPHAYDHQAKREPVLENEWTDGSFKAARFTLRNHARLTAGRNTAHLDGDITAYNLSGIDLGFIQGKTPECYRSYHSGSTHCTPNAVLKAENYRALPATQVRGDITLNDRSELRLGKAHLYGSIRAGKDTAVRMEADSNWTLSQSSHTGALTLDGAQITLNPDFANNTHNNRFNTLTVNGTLDGFGTFRFLTGIVRKQNAPLKLERDSRGAFQIHVKNTGQEPQTTESLALVSLNPKHSHQARFTLQNGYADLGAYRYILRKNNNGYSLYNPLKEAELQIEATRAEHERNQQAYNQLQATDISRQVQHDSDATRQALQAWQNSQTELARIDSQVQYLSAQLKQTDPLTGILTRAQNLCAAQGYSVDICRQVAKAADTNDLTLFETELDTYIERVEMAESELDKARQGGDAQAVETARHAYLNALNRLSRQIHSLKTGVAGIRMPNLAELISRSANTAVSEQAAYNTGRQQAGRRIDRHLTDPQQQNIWLETGTQQTDYHSGTHRPYQQTTNYAHIGIQTGITDRLSVGTILTDERTNNRFDEGVSARNRSNGAHLFVKGENGALFAAADLGYSNSRTRFTDYDGAAVRRHAWDAGINTGIKIDTGINLRPYAGIRINRSNGNRYVLDGAEINSPAQIQTTWHAGIRLDKTVELGQAKLTPAFSSDYYHTRQNSGSALSVNDRTLLQQAAHGTLHTLQIDAGYKGWNAKLHAAYGKDSNTARHKQAGIKIGYNW

SEQ ID NO: 29604 - protein, 114 aa, Neisseria meningitidis; identical to SEQ ID NO: 402

SEQ ID NO: 29605 - protein, 186 aa, Neisseria meningitidis; identical to SEQ ID NO: 9740

SEQ ID NO: 29606 - protein, 160 aa, Neisseria meningitidis
MAIVKNSVVSLHYEMYDANNQLLDKTEEPIAYLHGGYDGIFPLVEEALHGKDAGDTVDVALSPDDAFGEQDSELVRIEDVGVFPVEVEVGMMFEADDPETGDVVVYRVTDVADGKAVVDGNHPLAGMKIRFKATVESVRDASDEEIAHGHVHGPHGHHHH

SEQ ID NO: 29607 - protein, 352 aa, Neisseria meningitidis; identical to SEQ ID NO: 14595

SEQ ID NO: 29608 - protein, 284 aa, Neisseria meningitidis; identical to SEQ ID NO: 15986

SEQ ID NO: 29609 - protein, 183 aa, Neisseria meningitidis; identical to SEQ ID NO: 1173

SEQ ID NO: 29610 - protein, 269 aa, Neisseria meningitidis; identical to SEQ ID NO: 15142

SEQ ID NO: 29611 - protein, 122 aa, Neisseria meningitidis; identical to SEQ ID NO: 3130

SEQ ID NO: 29612 - protein, 197 aa, Neisseria meningitidis; identical to SEQ ID NO: 22190

SEQ ID NO: 29613 - protein, 43 aa, Neisseria meningitidis
MRNFDKLAEEAAEHAAEGAVKFIDGKPAKKIIAVPGRLANIVV

SEQ ID NO: 29614 - protein, 377 aa, Neisseria meningitidis; identical to SEQ ID NO: 7656

SEQ ID NO: 29615 - protein, 109 aa, Neisseria meningitidis; identical to SEQ ID NO: 4604

SEQ ID NO: 29616 - protein, 129 aa, Neisseria meningitidis; identical to SEQ ID NO: 14100

SEQ ID NO: 29617 - protein, 258 aa, Neisseria meningitidis; identical to SEQ ID NO: 8194

SEQ ID NO: 29618 - protein, 658 aa, Neisseria meningitidis
MNEFSLAPIVIVLLVSVITVILCRKFNIPSMLGYLLVGFLAGPGMLSLIPKSHATDYLGEIGIVFLMFSIGLEFSLPKLRAMRRLVFGLGGLQVGVTMLSVMGILMLTGVPFNWAFAVSGALAMSSTAIVSRILSEKTELGQPHGQMAMGVLLMQDIAVVPLMILIPALAGGGDGNIWAALGLAFAKMLLTLGLLFFVGSKIMSRWFRMVAKRKSSELFMINVLLVTLGVAYLTELEGLSMALGAFVAGMLLSETEYRFQVEDDIRPFRDILLGFFFITVGMKLDIQALIGGWRQVLMLLAMLLVLKALVVFAIAFKMKHSVGDSLKTALYLAQGGEFGFVMLAIAGQLDMVSPEWEQAATAAVLLSMIIAPFLLGGSDALVGRLVKSSWDMKSLDLHSMLVETMSKSDHVLIVGFGRGGQTVGRVLAQEDIPYFALDLDIARVQVARSAGEPVSFGDAKRREVLEAAGLGRAKMVVVTLNNMHETQHVLDNVLSMYPNMPVYVRATNDDYVKTFTDIGAEEAVSDTKETGLVLAGYAMLGNGASYRHVYQTMANIRHSRYAALEGLFVGSDDEAGFGENGETVRHAFPLAAEAYAVGKTVGTLPMAAYGIKLLFVRRRTGRIENPDASFTLEGGDVLVVAGKKEEIISFENWSLQGI

SEQ ID NO: 29619 - protein, 194 aa, Neisseria meningitidis
MISRLTGKLVEKNPPQIVIDVNGVGYEADVSMQTFYNLPPVGESVQLFTQLIIREDAHLLFGFATAEERKTFRQLIKVSGIGAKTALGILSAMTADELAQAVAEEDVKRLSSAPGIGKKTAERMVLELRGKLVAHTVTDGLFAAAPAADETEDIVSTLLALGYSEREAKAAVKGVPKGTDVGEGVRLALKNLLK

SEQ ID NO: 29620 - protein, 304 aa, Neisseria meningitidis; identical to SEQ ID NO: 745

SEQ ID NO: 29621 - protein, 92 aa, Neisseria meningitidis; identical to SEQ ID NO: 1287

SEQ ID NO: 29622 - protein, 164 aa, Neisseria meningitidis; identical to SEQ ID NO: 7730

SEQ ID NO: 29623 - protein, 295 aa, Neisseria meningitidis; identical to SEQ ID NO: 6246

SEQ ID NO: 29624 - protein, 470 aa, Neisseria meningitidis; identical to SEQ ID NO: 14061

SEQ ID NO: 29625 - protein, 1302 aa, Neisseria meningitidis
MNEGEVVLTPEQIQTLRGYAFRGDTYGGWRYLANLGDRYADDAAAIVGKDANLNGLNLWMKKGVENLWDDTVGKKTRLEKFDRVALQHFSQYVDLINENNGRLPNTSEIERSYYKAVTENGVSSSAAIDLVINRSLPDMADGYWALGLGIEAERIHNAQAVNNPNGSEWDNRKQLISALDKGFDGSFKEKHFTFLQSVIMDVTKLGVEYTIDGWQKIGGWGNGIINDLYKSVAKREWTGIFEIVNNNIKQFRDLFPNPEGWIDDGHQCFAPWVKETKKRNGKYHVYDPLALDLDGDGIETVATKGFAGSLFDHTNNGIRTATGWVSADDGLLVRDLNGNGIIDNGAELFGDNTKLADGSFAKHGYAALAELDSNGDNIINAADAAFQTLRVWQDLNQDGISQTNELRTLEELGIQSLDLAYKDVNKNLGNGNTLAQQGSYTKTNGTTAKMGDLLLAADNLHSRFKDKVELTAKQAKAANLAGIGRLRDLREAAALSGDLANMLKAYSAAETKEAQLALLDNLIHKWAETDSNWGKKSPMRLSTDWTQTANEGIALTPSQVAQLKKNALVSLSDKAKAAIDAARDRIAVLDAYTGQDSSTLYYMSEEDALNIVKVTNDTYDHLAKNIYQNLLFQTRLQPYLNQISFKMENDTFTLDFSGLVQAFNHVKETNPQKAFVDLAEMLAYGELRSWYEGRRLMADYVEEAKKAGKFEDYQKVLGQETVALLAKTSGTQADDILQNVGFGHNKNVSLYGNDGNDTLIGGAGNDYLEGGSGSDTYVFGKGFGQDTVYNYDYATGRKDIIRFTDGITADMLTFTREGNHLLIKAKDGSGQVTVQYYFQNDGSGAYRIDEIHFDNGKVLDVATVKELVQQSTDGSDRLYAYQSGNTLNGGLGDDYLYGADGDDLLNGDAGNDSIYSGNGNDTLDGGEGNDALYGYNGNDVLNGGEGNDHLNGEDGNDTLIGGAGNDYLEGGSGSDTYVFGKGFGQDTVYNYDYATGRKDIIRFTDGITADMLTFTREGNHLLIKAKDGSGQVTVQSYFQNDGSGAYRIDEIHFDNGKVLDVATVKELVQQSTDGSDRLYAYQSGNTLNGGLGDDYLYGADGDDLLNGDAGNDSIYSGNGNDTLDGGEGNDALYGYNGNDVLNGGEGNDHLNGEDGNDTLIGGAGNDYLEGGSGSDTYVFGKGFGQDTVYNYHVDKNSDTMHFKGFKAADVHFIRSGSDLVLSASEQDNVRISGFFYGENHRVDTFVFDDAAISNPDFAKYINAGNNLVQSMSVFGSNTAATGGNVDANIQSVQQPLLVTPSA

SEQ ID NO: 29626 - protein, 110 aa, Neisseria meningitidis; identical to SEQ ID NO: 14608

SEQ ID NO: 29627 - protein, 85 aa, Neisseria meningitidis; identical to SEQ ID NO: 15519

SEQ ID NO: 29628 - protein, 318 aa, Neisseria meningitidis; identical to SEQ ID NO: 15650

SEQ ID NO: 29629 - protein, 98 aa, Neisseria meningitidis
MKKSLFAAALLSLVLAACGGEKAAEAPATEAPAAEAPATEAPAAEAPAAEAPAAEAPATEAPAAEAPAAEAAATEAPAAEAAASEAPAAEAPAAEAAK

SEQ ID NO: 29630 - protein, 86 aa, Neisseria meningitidis; identical to SEQ ID NO: 7679

SEQ ID NO: 29631 - protein, 489 aa, Neisseria meningitidis
LKAVILHTGGHEMNEYSQLIKHPDISLSPISDSIGIGNPATGEILAYVRNTGSDKLKNLIQKAAAAQKLWAAKTALERADILWRWYFLVKENKEALARLMTMEQGKSLTESRGEIDYAASFVRWFAEEARRIDGDVLTSVKASQKLVVLKQPVGVTAAITPWNFPSAMIARKAAPALAVGCAMIVKPASLTPLSAYALVVLAYEAGVPQDLLPVVSGRASEIGREFATNPIIRKISFTGSTEVGAKIFADSAADIKKLSLELGGNAPFIVFDDADLDKAVEGALASKFRNSGQTCVCTNRVYAQSGIYDEFCRKLSEKVAELKLGNGLEDGVNQGPLIEEKAVEKVEQHIADALAKGAVCLTGGKRSALGGTFFEPTVLSGVTAQMAVAREETFGPLCPVFRFETEVEVIEAANNTEYGLAAYLFTADTARQWRVGEALEYGMVGINTGLISNEAAPFGGVKRSGLGREGSKYGADEYLELKYLCMDVG

SEQ ID NO: 29632 - protein, 119 aa, Neisseria meningitidis; identical to SEQ ID NO: 2176

SEQ ID NO: 29633 - protein, 367 aa, Neisseria meningitidis; identical to SEQ ID NO: 15488

SEQ ID NO: 29634 - protein, 223 aa, Neisseria meningitidis
MTTQDELKRIAAEKAVEFVPENEYIGIGTGSTINFFIEALGKSGKKIKGAVSTSKKSSELLAQYDIPVVSLNEVSGLAVYIDGADEVNHTLQMIKGGGGAHLNEKIVASASEKFVCIADESKYVSRLGKFPLPVEVVESARSLVSRKLLAMGGQPELRIGYTTFYGNQIVDVHGLNIDKPLTMEDEINKITGVLENGIFARDAADVLILGTEEGAKVIYPCQG

SEQ ID NO: 29635 - protein, 203 aa, Neisseria meningitidis; identical to SEQ ID NO: 13371

SEQ ID NO: 29636 - protein, 868 aa, Neisseria meningitidis; identical to SEQ ID NO: 15737

SEQ ID NO: 29637 - protein, 259 aa, Neisseria meningitidis; identical to SEQ ID NO: 2706

SEQ ID NO: 29638 - protein, 105 aa, Neisseria meningitidis; identical to SEQ ID NO: 7739

SEQ ID NO: 29639 - protein, 411 aa, Neisseria meningitidis; identical to SEQ ID NO: 6085

SEQ ID NO: 29640 - protein, 279 aa, Neisseria meningitidis
MTATAAAIDRLLPQTQCRECGYDGCLPYAQAVATGEAYNLCAPGGATVVRDLAALLGKPLVAPAKTQAKALARIDETACIGCTACIRACPADAIMGAGKLMHTVIADECTGCGLCVAPCPVDCIHMQPVADTVLPRARRFSLSADSRFAAAEHARTRYLKRNERKQREADERKAMLAEREAAVRNARPQTPDTPKKPAFNPADLIAKAMAKAQTQQDRLAAADNRKDYQAKQIAEARERAELRRAQRDMKYGSDSEKAAALEYLKQYKAKQEAAQNTAS

SEQ ID NO: 29641 - protein, 525 aa, Neisseria meningitidis; identical to SEQ ID NO: 6933

SEQ ID NO: 29642 - protein, 716 aa, Neisseria meningitidis; identical to SEQ ID NO: 13960

SEQ ID NO: 29643 - protein, 278 aa, Neisseria meningitidis; identical to SEQ ID NO: 789

SEQ ID NO: 29644 - protein, 319 aa, Neisseria meningitidis; identical to SEQ ID NO: 5570

SEQ ID NO: 29645 - protein, 239 aa, Neisseria meningitidis
MATLTDKTILVTGASQGLGEQVAKAYAAAGATVILVARHQKKLEKVYDAIVEAGYPEPFAICFDLISAEEKEFNQFAATIAEATQGKLDGIVHCAGYFYALSPLDFQTVAEWVNQYRINTVAPMGLTRALFPLLKQSPDASVIFVGESHGETPKAYWGGFGASKAALNYLCKVAADEWERFGNLRANVLVPGPINSPQRIKSHPGEAKSERKSYGDVLPAFVWWASAESKGRSGEIVYL

SEQ ID NO: 29646 - protein, 222 aa, Neisseria meningitidis; identical to SEQ ID NO: 3618

SEQ ID NO: 29647 - protein, 371 aa, Neisseria meningitidis
MKVGFVGWRGMVGSVLMQRMKEENDFAHIPEAFFFTTSNVGGAAPDFGQAAKTLLDANDVAELAKMDIIVTCQGGDYTKSVFQPLRDSGWNGYWVDAASSLRMKDDAIIVLDPVNRNVIDNGLKNGVKNYIGGNCTVSLMLMALGGLFQNDLVEWATSMTYQAASGAGAKNMRELISGMGAIHAKVADELADPSSAILDIDRKVSDFLRSEDYPKANFGVPLAGSLIPWIDVDLGNGQSKEEWKGGVETNKILGRSDNPTVIDGLCVRIGSMRCHSQALTLKLKKDLPVSEIEAILAGANDWVKVIPNEKEASIHELTPAKVTGTLSVPVGRIRKLEMGGEYISAFTVGDQLLWGAAEPLRRVLRIVLGSL

SEQ ID NO: 29648 - protein, 177 aa, Neisseria meningitidis; identical to SEQ ID NO: 3350

SEQ ID NO: 29649 - protein, 317 aa, Neisseria meningitidis; identical to SEQ ID NO: 15792

SEQ ID NO: 29650 - protein, 242 aa, Neisseria meningitidis; identical to SEQ ID NO: 1183

SEQ ID NO: 29651 - protein, 163 aa, Neisseria meningitidis; identical to SEQ ID NO: 29330

SEQ ID NO: 29652 - protein, 174 aa, Neisseria meningitidis; identical to SEQ ID NO: 3281

SEQ ID NO: 29653 - protein, 134 aa, Neisseria meningitidis; identical to SEQ ID NO: 1773

SEQ ID NO: 29654 - protein, 275 aa, Neisseria meningitidis; identical to SEQ ID NO: 67

SEQ ID NO: 29655 - protein, 387 aa, Neisseria meningitidis; identical to SEQ ID NO: 30

SEQ ID NO: 29656 - protein, 390 aa, Neisseria meningitidis; identical to SEQ ID NO: 7103

SEQ ID NO: 29657 - protein, 107 aa, Neisseria meningitidis; identical to SEQ ID NO: 2524

SEQ ID NO: 29658 - protein, 422 aa, Neisseria meningitidis; identical to SEQ ID NO: 13155

SEQ ID NO: 29659 - protein, 481 aa, Neisseria meningitidis; identical to SEQ ID NO: 18290

SEQ ID NO: 29660 - protein, 469 aa, Neisseria meningitidis
MDTQIKTEADNQSNRRYLTVWRWHFYAGLLVMPFLTLLAVTGLGMLLFANITGKEGERIHVVPQATVQPLSVQAEAARSAVNPETSSVVQYIAPRADDMVAVFRVNNEGKATMVAVDPYTAKVVSTMPRNQGWYYAMDEIHSDMMLGSTGDYLLETAASLTIIMIISGLYLWWVKRRGIKAMLLPPKGRARSWWRNLHGAFGTWVSLILLLFCLSGIAWAGIWGGKFVQAWSQFPAGKWGVEPNPVSVVPTHGEVLNDGKVKEVPWILELTPMPVSGTTVGKDGINPDEPMTLETVDRFAREIGFKGRYQLNLPKGEDGVWTLSQDSMSYDMISPFADRTVHIDQYSGKILADIRFDDYNPFGKFMAASIALHMGTLGWWSVLANVVFCLAVIFIGISGCVMWWKRRPSGAVGMVPPAQKIKLPVWWAMAVPLLLIALLFPTALLAIAVIWLLDTLLLSRIPVLRRWFK

SEQ ID NO: 29661 - protein, 494 aa, Neisseria meningitidis
MSKPVFKKIALYTLGAISGVAVSLAVQGFAAEKDRRDNEVLPVQSIRTMAEVYGQIKANYYQDKPDADLFEGAMKGMVAGLDPHSEYMDKKGYAEIKESTSGEFGGLGMEIGQEDGFVKVVSPIEDTPAERAGVKSGDFIVKIDNVSTRGMTVSEAVKKMRGKPGTKITLTLSRKNADKPIVVNLTRAIIKVKSVRHHLIEPDYGYIRVSQFQERTVESVNTAAKELLKENKGKPLKGLVLDLRDDPGGLLTGAVGVSAAFLPSEAVVVSTKGREGMEGFVLKARPEDYIFKAGADPLAGIPAELKTIPMTVLVNSGSASASEIVAGALQDHKRAVIVGTQSFGKGSVQTLIPLSNGSAVKLTTALYYTPNDRSIQAQGIVPDVEVKDKERIFESREADLVGHIGNPLGGEDVNSETLAVPLEKDADKPAVKEKGKKKKDEDLSSRRIPNPAKDDQLRKALDLVKSPEQWQKSLGLAAKKPVSNKDKKDKKDKK

SEQ ID NO: 29662 - protein, 196 aa, Neisseria meningitidis; identical to SEQ ID NO: 12580

SEQ ID NO: 29663 - protein, 285 aa, Neisseria meningitidis
MNYALDALWWKLTSQPVRDLASLLTAPPLWQSGCELSVRELLGEHGFRYLLALDADPTRLTDYLTRRAPFGHRLGIYAEELLAFWFANAPHAELLAHNLTVSGSDGNTQGAADFVARLNGKPYHIELTCKYYGGGTGRPEDMRGLDPKDTLLGKAAKLTAQLGLPHTSDGIRTLRQHGLPLDVKPVSIVRGIGFFPQSFHAFEPPLNPYGWRGIYIQDWAEYGFERQEVRYHLLDRMAYLAPARAAETETLNETEIRRIDQGLIAVLECRPDGFWHEIERIMKAV

SEQ ID NO: 29664 - protein, 117 aa, Neisseria meningitidis; identical to SEQ ID NO: 408

SEQ ID NO: 29665 - protein, 332 aa, Neisseria meningitidis; identical to SEQ ID NO: 7596

SEQ ID NO: 29666 - protein, 352 aa, Neisseria meningitidis; identical to SEQ ID NO: 6199

SEQ ID NO: 29667 - protein, 405 aa, Neisseria meningitidis
MQRRIITLLCAAGMAFSTQTLAANLEVRPNAPERYTVKQGDTLWGISGKYLYSPWQWGRLWDANRDQIHNPDLIYPDQVLVLRHVDGEPRLGLEQTDGIPVVKMSPDKEVSGYGIPAIDVNFYRIFMRHPQIVSRKETAAAPRLLSGPEGRLLYTKGTRVYTKGLKEPGRYLTYRINKNITDPDTGKFLGQEVAFSGIVHSLDYTDSVLEQRSKQAGERPKDNEYHTRTHPLITPLRTPSIQPLVVETAISEIQQGDYLMKMPEDTDRFNMMPHEPSRPVQAKIVSVFEGTRIAGQFQTITIDKGEADGLDKGTVLSLYKRKKTMQVDLSNNFKSRDTVELISTPAEEVGLAMVYRTSEHLSSAIILENISDISVGDTAANPGRDLDNIPDQGRSRVKFGFNRSE

SEQ ID NO: 29668 - protein, 597 aa, Neisseria meningitidis; identical to SEQ ID NO: 22121

SEQ ID NO: 29669 - protein, 260 aa, Neisseria meningitidis; identical to SEQ ID NO: 16467

SEQ ID NO: 29670 - protein, 66 aa, Neisseria meningitidis; identical to SEQ ID NO: 3365

SEQ ID NO: 29671 - protein, 469 aa, Neisseria meningitidis; identical to SEQ ID NO: 15880

SEQ ID NO: 29672 - protein, 350 aa, Neisseria meningitidis; identical to SEQ ID NO: 8682

SEQ ID NO: 29673 - protein, 280 aa, Neisseria meningitidis; identical to SEQ ID NO: 6191

SEQ ID NO: 29674 - protein, 68 aa, Neisseria meningitidis; identical to SEQ ID NO: 15227

SEQ ID NO: 29675 - protein, 417 aa, Neisseria meningitidis; identical to SEQ ID NO: 9265

SEQ ID NO: 29676 - protein, 107 aa, Neisseria meningitidis; identical to SEQ ID NO: 2467

SEQ ID NO: 29677 - protein, 48 aa, Neisseria meningitidis; identical to SEQ ID NO: 6016

SEQ ID NO: 29678 - protein, 505 aa, Neisseria meningitidis; identical to SEQ ID NO: 5551

SEQ ID NO: 29679 - protein, 213 aa, Neisseria meningitidis; identical to SEQ ID NO: 17750

SEQ ID NO: 29680 - protein, 261 aa, Neisseria meningitidis; identical to SEQ ID NO: 16980

SEQ ID NO: 29681 - protein, 277 aa, Neisseria meningitidis; identical to SEQ ID NO: 14875

SEQ ID NO: 29682 - protein, 85 aa, Neisseria meningitidis; identical to SEQ ID NO: 4382

SEQ ID NO: 29683 - protein, 206 aa, Neisseria meningitidis; identical to SEQ ID NO: 320

SEQ ID NO: 29684 - protein, 281 aa, Neisseria meningitidis; identical to SEQ ID NO: 8149

SEQ ID NO: 29685 - protein, 93 aa, Neisseria meningitidis; identical to SEQ ID NO: 2125

SEQ ID NO: 29686 - protein, 268 aa, Neisseria meningitidis; identical to SEQ ID NO: 18441

SEQ ID NO: 29687 - protein, 539 aa, Neisseria meningitidis; identical to SEQ ID NO: 15657

SEQ ID NO: 29688 - protein, 445 aa, Neisseria meningitidis
MSNHTSWSSKIGFVLAAAGSAIGLGAIWKFPYTAGTNGGAVFFLLFLIFTILVALPVQLAEFYIGRTGGKNAVDSFRALRPSTQWLWVGRMGVSACFILLSFYSVVGGWVLNYVVHSFTGAVHTGADFEALFGATISNPAGSLSYQALFMLITVWVVKGGISDGIEKANRYLMPGLFILFIALAVRSLTLPGAMEGVSFLLKPNWSYFKADTMITALGQAFFALSIGVSAMITYASYLGKDQDMFRSGHTIMWMNLLVSLLAGLVIFPAVFAFGFEPSQGPGLIFIVLPAVFMKMPFGTVLFAVFMLLVVFATLTSAFSMLETVIAATIRQDERKRKKHTWLIGTAIFIVGIPSALSFGVWGEFKVFGKTIFDLWDYVISAVIMPVGALGVAVFTAWIQDKQSVLKDAGAGSTVPRAVLLLWLNTLRYLAPIAIIIVFINSLDIL

SEQ ID NO: 29689 - protein, 351 aa, Neisseria meningitidis; identical to SEQ ID NO: 2371

SEQ ID NO: 29690 - protein, 335 aa, Neisseria meningitidis
MYPLARRILFALDAEKAHHFTLDALNMVYKLGLIPVTGNRTKPVKLMGLDLPNPVGLAAGLDKNGEYIDALGALGFGFIEIGTVTPKPQPGNPQPRLFRVPEHQGIINRMGFNNHGIDTMIRNIEKSKFSGVLGINIGKNAVTPIENAADDYLICLEKAYAHASYITVNISSPNTKNLRALQGGDELSALLEALKNKQAQLASVHGKYVPLAVKIAPDLDEAQIEDIAHVVKSVEMDGIIATNTTIDKSSLGSHPLAGEQGGLSGLPVHEKSNRVLKLLADHIDGKLPIIGVGGIMEGGDAAEKIRLGATAVQVYSGLIYKGPALVKECLKALAR

SEQ ID NO: 29691 - protein, 131 aa, Neisseria meningitidis; identical to SEQ ID NO: 9635

SEQ ID NO: 29692 - protein, 142 aa, Neisseria meningitidis; identical to SEQ ID NO: 18752

SEQ ID NO: 29693 - protein, 605 aa, Neisseria meningitidis
VKPLRRLTNLLAACAVAAAAFGQPALAADLAQDPFITDNAQRQHYEPGGKYHLFGDPRGSVSDRTGKINVIQDYTHQMGNLLIQQAAIQGNLGYTVRFSGHGYEEHAPFDNHAADSASKEQGNVNEGFTVYRLNWEGHEHHPADAYDGPKGGNYPKPTGARDEYTYHVNGTARSIKLNPTDTRSIRQRISDNYNNLGSNFSDRADEANRKMFEHNAKLDRWGNSMEFVNGVAAGALNPFISAGEALGIGDILYGTRYAIDKAAMRNIAPLPAEGKFAVIGGLGSVAGFEKNTREAVDRWIQENPNAAETVEALVNVLPFAKVKNLTKAAKPGKAAVSGDFSKSYTCSFHGSTLVRTADGYKAIAHIQAGDRVLSKDEASGETGYKPVTAQYGNPYRETVYIEISDGIGNSQTLISNRIHPFYSGGKWIKAEDLKAGSRLFAESGKTQTVRNIVVKPKPLKAYNLTVADWHTYFVKGDKAETEGVWVHNDCPTKLKPTERYNRQTHYGGSQTDGARAQAARQAGEGKPCPTCGRIQIFGTKTAPSPQHEPPLVKHYYEHGGHSMSNADRAKHARESIKGTQCLTCQRKEGAMMSRYSREQAKKHGL

SEQ ID NO: 29694 - protein, 364 aa, Neisseria meningitidis
MKTNLLNYDLQGLTRHFADMGEKPFRAKQVMRWMHQSGAQNFDEMTDLAKSLRHKLNEQAGIEIPKLMMSQKSSDGTRKWLLDVGTGNGVETVFIPESDRGTLCISSQVGCALECTFCSTGRQGFNRNLTAAEIIGQLWWANKAMGVTPKNERVISNVVMMGMGEPMANFDNVVTALSIMLDDHGYGLSRRRVTVSTSGMVPQMDRLRDVMPVALAVSLHASNDEVRNQIVPLNKKYPLKELMAACQRYLVKAPRDFITFEYVMLDGINDKAQHARELIELVKDVPCKFNLIPFNPFPNSGYERSSNENIRVFRDILQQAGFVVTVRKTRGDDIDAACGQLAGQVQDKTRRQQKWQQILIGQQG

SEQ ID NO: 29695 - protein, 149 aa, Neisseria meningitidis; identical to SEQ ID NO: 26698

SEQ ID NO: 29696 - protein, 49 aa, Neisseria meningitidis; identical to SEQ ID NO: 5144

SEQ ID NO: 29697 - protein, 87 aa, Neisseria meningitidis; identical to SEQ ID NO: 932

SEQ ID NO: 29698 - protein, 166 aa, Neisseria meningitidis; identical to SEQ ID NO: 1240

SEQ ID NO: 29699 - protein, 145 aa, Neisseria meningitidis; identical to SEQ ID NO: 1767

SEQ ID NO: 29700 - protein, 397 aa, Neisseria meningitidis
MYRHIEYYPGDPILSLVETFKNDPRPEKVNLSIGIYFDDEGKMPVLESVSRAETARAAAPAPSPYLPMEGLDTYRSAVQHLLFGKDNRALVQGRIVTVQTLGGSGALKVGADFLHRWFPEARAYVSDPTWDNHRGIFEGAGFEVGTYPYYDPATVGVKFDEMTAFFNTLPENSVLILHPCCHNPTGVDMSEQQWDEVLHIIKTRKLIPFMDIAYQGFGGDLDSDAYAVRKAVEMELPLFVSNSFSKNLSLYGERVGGLSVVCPNKEEADLVFGQLKFTVRRIYSSPPAHGAYIAADVMNSPELYALWQNEVYMMRDRIRAMRQKLYDVLTAQIPDRDFTYFIKQRGMFGYTGLSVEQVRRLRDEFAVYLLDSGRMCVAGLNTSNTDYVARAFAEVLK

SEQ ID NO: 29701 - protein, 874 aa, Neisseria meningitidis; identical to SEQ ID NO: 23324

SEQ ID NO: 29702 - protein, 307 aa, Neisseria meningitidis
MENQRPLLGFALALLAAMTWGTLPIAVRQVLKFVDAPTLVWVRFTVAAAVLFVLLALGGRLPKWRDFSWCSFRLLLLGVAGISANFVLIAQGLHYISPTTTQVLWQISPFTMIVVGVLVFKDRMTAAQKIGLVLLLAGLLMFFNDKFGELSGLGAYAKGVLLCAAGSMAWVCYAVAQKLLSAQFGPQQILLLIYAASAAVFLPFAEPAHIGSLDGTLAWVCFAYCCLNTLIGYGSFGEALKHWEASKVSAVTTLLPVFTVIFSLLGHYVMPDTFAAPDMNGLGYVGALVVVGGAVTAAVGDRLFKRR

SEQ ID NO: 29703 - protein, 443 aa, Neisseria meningitidis; identical to SEQ ID NO: 15396

SEQ ID NO: 29704 - protein, 206 aa, Neisseria meningitidis; identical to SEQ ID NO: 1193

SEQ ID NO: 29705 - protein, 147 aa, Neisseria meningitidis; identical to SEQ ID NO: 2466

SEQ ID NO: 29706 - protein, 92 aa, Neisseria meningitidis; identical to SEQ ID NO: 752

SEQ ID NO: 29707 - protein, 347 aa, Neisseria meningitidis; identical to SEQ ID NO: 2159

SEQ ID NO: 29708 - protein, 425 aa, Neisseria meningitidis
MRSSDILIVDDEIGIRDLLSEILQDEGYSVALAENAEEARKLRHQARPAMVLLDIWMPDCDGITLLKEWAKNGQLNMPVVMMSGHASIDTAVEATKIGAIDFLEKPISLQKLLSAVENALKYGAAQTETGPVFDKLGNSAAIQEMNREVGAAVKCASPVLLTGEAGSPFETVARYFHKNGTPWVSPARVEYLIDMPMELLQKAEGGVLYVGDIAQYSRNIQAGIAFIVGKAEHRRVRVVASGSRAAGSDGIACEEKLAELLSESVVRIPPLRMQHEDIPFLIQGIACNVAESQKIAPAAFSEEALAALTRYDWPGNFDQLQSVVATLLLEADGQEIGAAAVSSLLGQNVPAEGAEDMVGGFNFNLPLRELREEVERRYFEYHIAQEGQNMSKVAQKVGLERTHLYRKLKQLGIGVSRRAGEKTEE

SEQ ID NO: 29709 - protein, 283 aa, Neisseria meningitidis; identical to SEQ ID NO: 14093

SEQ ID NO: 29710 - protein, 208 aa, Neisseria meningitidis; identical to SEQ ID NO: 15132

SEQ ID NO: 29711 - protein, 262 aa, Neisseria meningitidis; identical to SEQ ID NO: 7699

SEQ ID NO: 29712 - protein, 291 aa, Neisseria meningitidis; identical to SEQ ID NO: 14500

SEQ ID NO: 29713 - protein, 138 aa, Neisseria meningitidis; identical to SEQ ID NO: 937

SEQ ID NO: 29714 - protein, 157 aa, Neisseria meningitidis; identical to SEQ ID NO: 23769

SEQ ID NO: 29715 - protein, 136 aa, Neisseria meningitidis; identical to SEQ ID NO: 1774

SEQ ID NO: 29716 - protein, 706 aa, Neisseria meningitidis
MRRFLPIAAICAVVLLYGLTAATGSTSSLADYFWWIVAFSAMLLLVLSAVLARYVILLLKDRRDGVFGSQIAKRLSGMFTLVAVLPGVFLFGVSAQFINGTINSWFGNDTHEALERSLNLSKSALNLAADNALGNAIPVQIDLIGAASLPGDMGRVLEHYAGSGFAQLALYNAASGKIEKSINPHKLDQPFPDKARWEKIQQAGSVRDLESIGGVLYAQGWLSAGTHNGRDYALFFRQPIPKGVAEDAVLIEKARAKYAELSYSKKGLQTFFLATLLIASLLSIFLALVMALYFAHRFVEPVLSLAEGAKAVAQGDFSQTRPVLRNDEFGRLTKLFNHMTEQLSIAKEADECNRRREEAARHYLECVLEGLTTGVVVFDEQGRLKTFNKAAEQILGMPLTPLWGSSRHGWHGVSAQQSLLAEVFAAIGAAAGTDKPVHVKYAAPDDAKILLGKATVLPEDNGNGVVMVIDDITVLIHAQKEAAWGEVAKRLAHEIRNPLTPIQLSAERLAWKLGGKLDEQDAQILTRSTDTIVKQVAALKEMVEAFRNYARSPSLKLENQDLNALIGDVLALYEAGPCRFAAELAGEPLMVAADTTAMRQVLHNIFKNAAEAAEEADVPEVRVKSEAGQDGRIVLTVCDNGKGFGREMLHNAFEPYVTDKPAGTGLGLPVVKKIIEEHGGRISLSNQDAGGACVRIILPKTVKTYA

SEQ ID NO: 29717 - protein, 245 aa, Neisseria meningitidis; identical to SEQ ID NO: 10890

SEQ ID NO: 29718 - protein, 300 aa, Neisseria meningitidis
MDSLMTLLSVLIPMFAGFFIRVPKPYLPALDKVLSVLVYAVLLLIGVSLSRVEDLGSRLDDMALTVLWLFVCTVGANLLALAVLGKLFPWRIKGKGKGVSVGVSGSVGQLGCVLLGFASGKLMRDIWMPSESAGMYCLMLLVFLIGVQLKSSGVSLRQVLVNRRGIRLSVWFMLSSLSGGLLFAASTDGVSWTKGLAMASGFGWYSLSGLVMTEAYGAVWGSIMLLNDLARELFALAFIPLLMKRFPDAAVGVGGATSMDFTLPVIQGAGGLEVVPVAVSFGVVVNIAAPFLMVVFSALG

SEQ ID NO: 29719 - protein, 559 aa, Neisseria meningitidis
MEIINDAELIRSMQRQQHIDAELLTDANVRFEQPLEKNNYVLSEDETPCTRVNYISLDDKTARKFSFLPSVLMKETAFKTGMCLGSNNLSRLQKAAQQILIVRGYLTSQAIIQPQNMDSGILKLRVSAGEIGDIRYEEKRDGKSAEGSISTFNNKFPLYRNKILNLRDVEQGLENLRRLSSVKTDIQIIPSEEEGKSDLQIKWQQNKPIRFSIGIDDAGGKTTGKYQGNVALSFDNPLGLSDLFYVSYGRGLVHKTDLTDATGTETESGSRSYSVHYSVPVKKWLFSFNHNGHRYHEATEGYSVNYDYNGKQYQSSLAAERMLWRNRLHKTSVGMKLWTRQTYKYIDDAEIEVQRRRSAGWEAELRHRAYLNRWQLDGKLSYKRGTGMRQSMPAPEENGGDILPGTSRMKIITAGLDAAAPFILGKQQFFYATAIQAQWNKTPLVAQDKLSIGSRYTVRGFDGEQSLFGERGFYWQNTLTWYFHPNHQFYLGADYGRVSGESAQYVSGKQLMGAVVGFRGGHKVGGMFAYDLFAGKPLHKPKGFQTTNTVYGFNLNYSF

SEQ ID NO: 29720 - protein, 608 aa, Neisseria meningitidis
LGISRKISLILSILAVCLPMHAHASDLANDSFIRQVLDRQHFEPDGKYHLFGSRGELAERSGHIGLGKIQSHQLGNLMIQQAAIKGNIGYIVRFSDHGHEVHSPFDNHASHSDSDEAGSPVDGFSLYRIHWDGYEHHPADGYDGPQGGGYPAPKGARDIYSYDIKGVAQNIRLNLTDNRSTGQRLADRFHNAGSMLTQGVGDGFKRATRYSPELDRSGNAAEAFNGTADIVKNIIGAAGEIVGAGDAVQGISEGSNIAVMHGLGLLSTENKMARINDLADMAQLKDYAAAAIRDWAVQNPNAAQGIEAVSNIFMAAIPIKGIGAVRGKYGLGGITAHPIKRSQMGAIALPKGKSAVSDNFADAAYAKYPSPYHSRNIRSNLEQRYGKENITSSTVPPSNGKNVKLADQRHPKTGVPFDGKGFPNFEKHVKYDTKLDIQELSGGGIPKAKPVFDAKPRWEVDRKLNKLTTREQVEKNVQEIRNGNINSNFSQHAQLEREINKLKSADEINFADGMGKFTDSMNDKAFSRLVKSVKENGFTNPVVEYVEINGKAYIVRGNNRVFAAEYLGRIHELKFKKVDFPVPNTSWKNPTDVLNESGNVKRPRYRSK

SEQ ID NO: 29721 - protein, 241 aa, Neisseria meningitidis; identical to SEQ ID NO: 15594

SEQ ID NO: 29722 - protein, 207 aa, Neisseria meningitidis; identical to SEQ ID NO: 1335

SEQ ID NO: 29723 - protein, 340 aa, Neisseria meningitidis; identical to SEQ ID NO: 2046

SEQ ID NO: 29724 - protein, 761 aa, Neisseria meningitidis; identical to SEQ ID NO: 22950

SEQ ID NO: 29725 - protein, 70 aa, Neisseria meningitidis; identical to SEQ ID NO: 232

SEQ ID NO: 29726 - protein, 366 aa, Neisseria meningitidis
METQLYIGIMSGTSMDGADAVLVRMDGGKWLGAEGHAFTPYPDRLRRQLLDLQDTGTDELHRSRILSQELSRLYAQTAAELLCSQNLAPSDITALGCHGQTVRHAPEHGYSIQLADLPLLAERTRIFTVGDFRSRDLAAGGQGAPLVPAFHKALFRDDRETRAVLNIGGIANISVLPPDAPAFGFDTGPGNMLMDAWTQAHWQLPYDKNGEKAAQGNILPQLLDRLLAHPYFAQPHPKSTGRELFALNWLETYLDGGENRYDVLRTLSRFTAQTVFDAVSHAAADARQMYICGGGIRNPVLMADLAECFGTRVSLHSTAELNLDPQWVEAAAFAWLAACWINRIPGSPHKATGASKPCILGAGYYY

SEQ ID NO: 29727 - protein, 77 aa, Neisseria meningitidis; identical to SEQ ID NO: 760

SEQ ID NO: 29728 - protein, 146 aa, Neisseria meningitidis; identical to SEQ ID NO: 5620

SEQ ID NO: 29729 - protein, 233 aa, Neisseria meningitidis; identical to SEQ ID NO: 23456

SEQ ID NO: 29730 - protein, 658 aa, Neisseria meningitidis; identical to SEQ ID NO: 7626

SEQ ID NO: 29731 - protein, 310 aa, Neisseria meningitidis; identical to SEQ ID NO: 714

SEQ ID NO: 29732 - protein, 435 aa, Neisseria meningitidis; identical to SEQ ID NO: 9235

SEQ ID NO: 29733 - protein, 202 aa, Neisseria meningitidis; identical to SEQ ID NO: 597

SEQ ID NO: 29734 - protein, 197 aa, Neisseria meningitidis; identical to SEQ ID NO: 2603

SEQ ID NO: 29735 - protein, 94 aa, Neisseria meningitidis; identical to SEQ ID NO: 23891

SEQ ID NO: 29736 - protein, 278 aa, Neisseria meningitidis; identical to SEQ ID NO: 15248

SEQ ID NO: 29737 - protein, 123 aa, Neisseria meningitidis; identical to SEQ ID NO: 2701

SEQ ID NO: 29738 - protein, 39 aa, Neisseria meningitidis; identical to SEQ ID NO: 22760

SEQ ID NO: 29739 - protein, 1069 aa, Neisseria meningitidis
MFYLYQSNRLETLAALFARIQKVKPLKSALQPEQIIVQSQGMRRYLNTCLARDLGVAANLSFSLPAGLTWKLMKKLIPGIPELSPFAPEVMRWRLLDLFRSEAFRNTAEFEDVRNVLQDYLGSGESADYQLAGQLADIFDQYLVYRPQWIDAWQQGRRLGLGDDEIWQSKLWRYLDDGRQSAPHRVALWEKLLAALDKDKLPERYFVFGISTMAPMYLQLLHKLSEHCDVFVFALNPSGMYWGNVIEAAQILKGGGDPDLTQAGHPLLASLGKQGRDFFDFLNEMEIEGETPVFEEGGRDTLLHALQTDIQNLKMPSENVGSVGTDDGSIRIVSAHSPLRELQILKDKLLKILHEHPDWQPHDIAVLTPNIESYTPFIEAVFGQAQPGAQALPYSVSDVKISRRQPLFHALSCLFDLLESRFEVDKVLVLLETAPVLRHFGLTEDDLPLLHDMVADLNVRWGLDGEMRGGTDQLFTWKQAVERMILGWMLPEGGNPMWQGVSAWYADVNQTALFGRFAAFLETLTDIVRIWRQPATIGEWVARCRGLLKTLFQAEADDQKAVQNLENEWVKWQAETELAQFSGQLPPHTVIRHIRRFLDSESEAGFLRGGITFCSMVPMRSLPFKVICLLGLNDGDFPRNTKAAVFDLIAKHPAKGDRARRDDDRYLFLEALISAREILYLSYIGRDIRKDEELAPSSLLGELIDTVAAMAGIGSRQLAQNWIEQHPLQAFSRRYFQEGGRSDGIFGTRTDYAAALGQTPEPPQPFFDQSVENAEPVAEIGQDEFIRFWRNPVKVWLQQQLAWSEPHIGEAWEPAEPFEPQHADQIAEIYIEARREGRDFAQTAARIGAESLLPSGELGRLWQQDFQTAAKQIDTAVLNSPKLPPLSYAIPSDGQILKGSLGNLYRCGQVFYAYGKPNAPQRIAFLLEHLIFCAVMPSEAETRQTFIVQSGETEILAEIAQDRALQLLSEWMAFFNIGQNRPLPFFAKTSLAAAEAFAQKQDWEAALKKAQTAYYGNKVSKGQKDYTEVALVFGNASQNPLEQPLFENLARLLADTFAAAEKKEEAGAA

SEQ ID NO: 29740 - protein, 140 aa, Neisseria meningitidis; identical to SEQ ID NO: 5192

SEQ ID NO: 29741 - protein, 329 aa, Neisseria meningitidis; identical to SEQ ID NO: 19766

SEQ ID NO: 29742 - protein, 358 aa, Neisseria meningitidis; identical to SEQ ID NO: 17036

SEQ ID NO: 29743 - protein, 100 aa, Neisseria meningitidis; identical to SEQ ID NO: 1476

SEQ ID NO: 29744 - protein, 485 aa, Neisseria meningitidis; identical to SEQ ID NO: 6505

SEQ ID NO: 29745 - protein, 58 aa, Neisseria meningitidis; identical to SEQ ID NO: 903

SEQ ID NO: 29746 - protein, 158 aa, Neisseria meningitidis; identical to SEQ ID NO: 15270

SEQ ID NO: 29747 - protein, 182 aa, Neisseria meningitidis; identical to SEQ ID NO: 125

SEQ ID NO: 29748 - protein, 513 aa, Neisseria meningitidis
MKFLDREASIAKPGFNRWLVPPAALAVHLAIGQIYAYSVFNAPLTKLIGITESAAGDWKLTTVGWIFSIALAMLGASAALFGTWMERVGPRKAIFAAACCFSLGFFVSAFGVRTHNLFLLYLGNGVIGGVGLGLGYIGPVSTLMKWFPDKPGMATGLAIMGFGGGAMLASPLSVSLMNAFSNAASVGVAETFAVLGLLYLALMMFGAFTIRVPADGWKPEGYTAPKTQNKLVSSNHVNVSQAMKTPQFWLLFWVLCLNVTAGIGVLGQASVMIQELFSETSVGRQAAVGAGAAAGFVSLLSLFNMGGRFLWSSVSDKIGRKNTYTIFFVLGSLLYFAVPSIGEGGSKALFIIGFCVIISMYGGGFAAIPAYLKDLFGTYQVGAIHGRILLAWSTAAVIGPVLVNYIRQSQIDSGIPAAQAYSVTMYIMAGLLIIGLLCNLAVKSVHEKHHEKDIKTAAHSGNPDDETAISDAYLVGEKVSGGGISVWWRWALAVIPLAYGVVMIFVKALDLFS

SEQ ID NO: 29749 - protein, 235 aa, Neisseria meningitidis; identical to SEQ ID NO: 15903

SEQ ID NO: 29750 - protein, 395 aa, Neisseria meningitidis; identical to SEQ ID NO: 29037

SEQ ID NO: 29751 - protein, 495 aa, Neisseria meningitidis; identical to SEQ ID NO: 2837

SEQ ID NO: 29752 - protein, 443 aa, Neisseria meningitidis; identical to SEQ ID NO: 6693

SEQ ID NO: 29753 - protein, 81 aa, Neisseria meningitidis; identical to SEQ ID NO: 7714

SEQ ID NO: 29754 - protein, 232 aa, Neisseria meningitidis
MKSRHLALGVAALFALAACDSKVQTSVPADSAPAASAAAAPAGLVEGQNYTVLANPIPQQQAGKVEVLEFFGYFCPHCAHLEPVLSKHAKSFKDDMYLRTEHVVWQKEMLTLARLAAAVDMAAADSKNVANSHIFDAMVNQKIKLQNPEVLKKWLGEQTAFDGKKVLAAYESPESQARADKMQELTETFQIDGTPTVIVGGKYKVEFADWESGMNTIDLLADKVREEQKAAQ

SEQ ID NO: 29755 - protein, 442 aa, Neisseria meningitidis; identical to SEQ ID NO: 2771

SEQ ID NO: 29756 - protein, 535 aa, Neisseria meningitidis; identical to SEQ ID NO: 23612

SEQ ID NO: 29757 - protein, 458 aa, Neisseria meningitidis; identical to SEQ ID NO: 569

SEQ ID NO: 29758 - protein, 230 aa, Neisseria meningitidis; identical to SEQ ID NO: 15645

SEQ ID NO: 29759 - protein, 427 aa, Neisseria meningitidis; identical to SEQ ID NO: 146

SEQ ID NO: 29760 - protein, 209 aa, Neisseria meningitidis; identical to SEQ ID NO: 1847

SEQ ID NO: 29761 - protein, 794 aa, Neisseria meningitidis
MADNYVIWFENLRMTDVERVGGKNASLGEMISQLTEKGVRVPGGFATTAEAYRAFLAHNGLSERISAALAKLDVEDVAELARVGKEIRQWILDTPFPEQLDAEIEAAWNKMVADAGGADISVAVRSSATAEDLPDASFAGQQETFLNINGLENVKEAMHHVFASLYNDRAISYRVHKGFEHDIVALSAGVQRMVRSDSGASGVMFTLDTESGYDQVVFVTSSYGLGENVVQGAVNPDEFYVFKPTLKAGKPAILRKTMGSKHIKMIFTDKAEAGKSVTNVDVPEEDRNRFSITDEEITELAHYALTIEKHYGRPMDIEWGRDGLDGKLYILQARPETVKSQEEGNRNLRRFAINGDKTVLCEGRAIGQKVGQGKVRLIKDASEMDSVEAGDVLVTDMTDPDWEPVMKRASAIVTNRGGRTCHAAIIARELGIPAVVGCGNATELLKNGQEVTVSCAEGDTGFIYAGLLDVQITDVALDNMPKAPVKVMMNVGNPELAFSFANLPSEGIGLARMEFIINRQIGIHPKALLEFDKQDDELKAEITRRIAGYASPVDFYVDKIAEGVATLAASVYPRKTIVRMSDFKSNEYANLVGGNVYEPHEENPMLGFRGAARYVADNFKDCFALECKALKRVRDEMGLTNVEIMIPFVRTLGEAEAVVKALKENGLERGKNGLRLIMMCELPSNAVLAEQFLQYFDGFSIGSNDMTQLTLGLDRDSGLVSESFDERNPAVKVMLHLAISACRKQNKYVGICGQGPSDHPDFAKWLVEEGIESVSLNPDTVIETWLYLANELNK

SEQ ID NO: 29762 - protein, 158 aa, Neisseria meningitidis
MNTIAPNLDGKHLRIGIVQARFTNEIGSEMLKVCCRTLQELGVADENITVATVPGALEIPIALMNFASSEKFDALIAIGVVIRGETYHFELVSNESGAGVSRVALDYNIPIANAVLTTENDAQAIERIEEKASDAAKVAVECANLVNLLIEEQFEDEE

SEQ ID NO: 29763 - protein, 699 aa, Neisseria meningitidis
MPSERRFRPIPTARFVRKRITGKIMEVIQYPNSPFKLHQPFPPAGDQPTAIAGLLEGLSDGLAYQTLLGVTGSGKTYTMANVIAQSGRPAIIMAHNKTLAAQLYAEMREFFPENAVEYFVSYYDYYQPEAYVPSRDLFIEKDSAINEHIEQMRLSATKNLMTRNDVIIVATVSAIYGIGDPTEYQQMVLSVKEGDTIEQRDIIATLVSMQYERGDLDFKRGSFRVRGDVIDVYPAESSENALRISLFDDEIDRLDMFDPLSGSLIQRVGRYTVFPSSHYVTPRDTVLRACESIKEELRERIEFFAREQRPVEQQRIEQRTRFDLEMLYEMGFCKGIENYSRHFSGKKEGEPPPTLMDYLPDNAIMFIDESHVTVTQIGGMYKGDASRKQNLVDYGFRLPSARDNRPLKFHEFEKVMPQTIFVSATPAKYEEEHAGQVVEQVVRPTGLVDPQIIIRPVATQVDDLMSEINDRIEKGERVLVTTLTKRMAEQLTDYYSELGIKVRYLHSDIDTVERVEIIRDLRLGLFDVLVGINLLREGLDIPEVSLVAILDADKEGFLRSHRSLIQTIGRAARNVNGVAILYADKITDSMKAAIDETERRREKQIKFNEEQGIVPQQIKKQVKDIIDGVYHEEDGSKGRLKGKNKVKVGEIHNEEDAIKEIAKLEKAMQQAARDLQFEEAAVLRDRIRDIKENLLFGAE

SEQ ID NO: 29764 - protein, 167 aa, Neisseria meningitidis; identical to SEQ ID NO: 189

SEQ ID NO: 29765 - protein, 273 aa, Neisseria meningitidis; identical to SEQ ID NO: 3190

SEQ ID NO: 29766 - protein, 169 aa, Neisseria meningitidis; identical to SEQ ID NO: 13980

SEQ ID NO: 29767 - protein, 151 aa, Neisseria meningitidis
MKKPKILFVCLGNICRSPMAEYILRRRAAEAGIPLEADSAGTSGWHDGEDMHRETAKILKKHGIDASGFTSRKIRQSDAVAFDCIIAMDGKNLSELERTFGRRSEKIFKLTDLIPESGYDHVPDPWYTGDFEETFRLADAGCRALLEKISK

SEQ ID NO: 29768 - protein, 220 aa, Neisseria meningitidis; identical to SEQ ID NO: 2583

SEQ ID NO: 29769 - protein, 774 aa, Neisseria meningitidis
VLKTPPMLAAELSGKTGVSISAPYANENSRIILSAADIAAENGKIKLQSYGDQSYYAGQGELYTFERRSYKTGKWYNRKHITEVKEHKNAKPDAVNLSASQGIDIKSGGSIDAYATAFDAPKGSINIEAGRKLTLYAVEELNYDKLDSQKRRRFLGISYSKAHDTTTQVMKTALPSRVVAESANLQSGWDTKLQGTQFETTLGGATIRAGVGEQARADAKIILEGIKSSIHTETVSSSKSTLWQKQAGRGSNIETLQLPSFTGPVAPVLSAPGGYIVDIPQGNLKTQIETLTKQPEYAYLKQLQVAKNINWNQVQLAYDKWDYKQEGLTEAGAAIIALAVTVVTSGAGTGAVLGLNGAAAAATDAAFASLASQASVSFINNKGNIGNTLKELGRSSTVKNLVVAAATAGVSNKIGASSLATWSETPWVNNLNVNLANAGSAALINTAVNGGSLKDNLEANILAALVNTAHGEAASKIKQLDQHYIVHKIAHAIAGCAAAAANKGKCQDGAIGAAVGEIVGEALVKNTDFSGMTASEIEKAKANITAYAKLVAGATVGVTGGNVDVAANASETAVKNNALDIIWDIGNLVWDGGKWIYAKSIGDKQMAREAAIDFGVDAAAAAVPFVPAGATKISRGGAYVLKAGDEAVDTAKAIQEIQKQTGIKLTYDKVNKVWTTPAGLDYGLDAKHGNRIKHVLAHTIPNPNKPVHSVFNVSRKEVLPLVDEAWRMKGNPLPNDSSVYLVDMKKPIGTKGETKVRIVVQKGTNKIISAYPQK

SEQ ID NO: 29770 - protein, 93 aa, Neisseria meningitidis; identical to SEQ ID NO: 7643

SEQ ID NO: 29771 - protein, 348 aa, Neisseria meningitidis; identical to SEQ ID NO: 10439

SEQ ID NO: 29772 - protein, 444 aa, Neisseria meningitidis; identical to SEQ ID NO: 1459

SEQ ID NO: 29773 - protein, 384 aa, Neisseria meningitidis; identical to SEQ ID NO: 6554

SEQ ID NO: 29774 - protein, 155 aa, Neisseria meningitidis; identical to SEQ ID NO: 5339

SEQ ID NO: 29775 - protein, 235 aa, Neisseria meningitidis; identical to SEQ ID NO: 5939

SEQ ID NO: 29776 - protein, 88 aa, Neisseria meningitidis; identical to SEQ ID NO: 6869

SEQ ID NO: 29777 - protein, 263 aa, Neisseria meningitidis; identical to SEQ ID NO: 18955

SEQ ID NO: 29778 - protein, 99 aa, Neisseria meningitidis; identical to SEQ ID NO: 1110

SEQ ID NO: 29779 - protein, 468 aa, Neisseria meningitidis; identical to SEQ ID NO: 18038

SEQ ID NO: 29780 - protein, 168 aa, Neisseria meningitidis; identical to SEQ ID NO: 7876

SEQ ID NO: 29781 - protein, 77 aa, Neisseria meningitidis; identical to SEQ ID NO: 14102

SEQ ID NO: 29782 - protein, 320 aa, Neisseria meningitidis
MQYAKISGTGSYLPANRVSNDDLAQKVDTSDEWITARTGIKFRHIAAENEKTSDLAAEAARRALDATGLDSGEIDLIIVATATPDMQFPSTATIVQQKLGITNGCPAFDVQAVCAGFMYALTTANAYIKSGMAKNALVIGAETFSRIVDWNDRTTCVLFGDGAGAVVLSAADKPGIIHSKLKADGNYLKLLNVPGQIACGKVSGSPYISMDGPGVFKFAVKMLSKIADDVIEEAGYTAAQIDWIVPHQANRRIIESTAKHLGLSMDKVVLTVQDHGNTSAASIPLALDTGIRSGQIKRGQNLLLEGIGGGFAWGAVLLQY

SEQ ID NO: 29783 - protein, 636 aa, Neisseria meningitidis; identical to SEQ ID NO: 7432

SEQ ID NO: 29784 - protein, 272 aa, Neisseria meningitidis; identical to SEQ ID NO: 15445

SEQ ID NO: 29785 - protein, 286 aa, Neisseria meningitidis
MAKVKGGLGRGLNSLLANGADNSSGDRLTTVAVKDIRPGRYQARVQIDDEALQELADSIKAQGVIQPVIVREHGLSRYELIAGERRWRAAQIAGLTEIPAVIKTISDETALAMGLIENLQRENLNPIEEAQGLKRLADEFGLTHETIAQAVGKSRSAISNSLRLLSLPEPVQEMLYQRRLEMGHARALLTLPVVEQLELAQKAVKNGWSVREVERRSQAALQNKRPEPKKTAAADIGRLNDLLTEKLGVNAEIKTANHKKGRIILHFDTPETFDHILKQLGIDYRP

SEQ ID NO: 29786 - protein, 456 aa, Neisseria meningitidis
MLDNLTGRFSNVLKNIRGQAKLTEDNIKEALREVRLALLEADVALPVVKEFVNNVKEKALGQEVVGSLTPDQAFIGVVNKALTELMGRENKTLDLSVAPPAVVLMAGLQGAGKTTTVGKLARLLKNDQKKKVLVVSADVYRPAAIEQLRLLAEQVGVDFFPSDTNQKPVEIATAAVDYAKKHFYDVLMVDTAGRLAIDEEMMNEIKALHAAVNPVETLFVIDAMLGQDAVNTAQAFNEALPLTGVVLTKMDGDSRGGAALSVRHVTGKPIKFIGVGEKINGLEPFHPDRLASRILGMGDVLTLIEDVQKGIDEAAAAKMAKKLQKGKGFDLNDFKEQIQQMRNMGGLENLMSKMPGELGQISKQIPEGTAEKAMGKVEAIINSMTPKERANPALLKASRKRRIAMGAGTTVQEVNKLLKQFEQMQQMMKMFSGNGLGKLMRMAKGMRGIKGMFPGL

SEQ ID NO: 29787 - protein, 323 aa, Neisseria meningitidis; identical to SEQ ID NO: 3380

SEQ ID NO: 29788 - protein, 212 aa, Neisseria meningitidis; identical to SEQ ID NO: 15742

SEQ ID NO: 29789 - protein, 109 aa, Neisseria meningitidis
MSLPPCPQCASEYTYEDGGQYICPECAHEWNETESAADLAAQVLDANGAVLQNGDTVILIKDLKVKGSSMTIKQGTKVKGIRLQEGDHNIGCKIDGSAMNLKSEFVKKA

SEQ ID NO: 29790 - protein, 186 aa, Neisseria meningitidis; identical to SEQ ID NO: 104

SEQ ID NO: 29791 - protein, 808 aa, Neisseria meningitidis
MSAQTDPGYFFMPNHIILIGASERPYSLGERVLSNLLSTPFQGKITPVNPRHHTIAGLPAYTSLNKIPGNADLIIAVTLPDSYDTLFKTCRKKQLRHIILIQDWDSLSAAELHTAETTIRKHHGNGLNITACTTAGIQLPSLGLNISTQDGYAAGHTAILTGNAAVSRQIDNILNKLRQGTSRHISLHPGISPITSADWLNRFGHSLHTKTAVLHYNPEEDQRKLFSAIRQFTRHTPLILHITCRTTETDRAVLHCLARHCNFLISFNADDLEAALRAQLSDLPPLSRLDILSDTPAEWLNAHAPKTLALHFPNLPHHIRNGHLTGTPTPSICHDIASRQLARPDTQAVLTILSPSGHEDYKKTARALIRLSEQTAKPLLVSSPFSDGITHFDTPTQAIRTLSYRNTAAALKQAQLDIAPPQPCRLKTPQPQNIKKALAAANPSLLAEALHLPPYRHTTHNAVQFQFDSHPLYGDILTARCNGQTTAVLPPFTTLDSRHLARFAELDGTQTLDQFLHTLTVIPEYRQHILGITLNLNGGQYSSDFLLKTPETHDTPKRKNTGKAAQTLEHAAAKMQSAAAYLKHKNPTAAEFLRHTSEAAAELLGSKTETGAAVPNVLAPYPAAHLKTLSLKNNTTVTITPLLPEDAEAKQQFVRSLSPEARYTRFMTHTNELPAATLARLCNPDYHCEAAWTARDADSNIVAVVRHSRLNRNECEFGITLAEHMRGSGLAQKMMELIIQTAAQQGYRTMSADILKTNTPMIKLAEKSGFTLKESDTEKNLYRAYLNLAADKTTEKTNKNLHTDHKIT

SEQ ID NO: 29792 - protein, 575 aa, Neisseria meningitidis; identical to SEQ ID NO: 14939

SEQ ID NO: 29793 - protein, 475 aa, Neisseria meningitidis; identical to SEQ ID NO: 3229

SEQ ID NO: 29794 - protein, 83 aa, Neisseria meningitidis; identical to SEQ ID NO: 5051

SEQ ID NO: 29795 - protein, 473 aa, Neisseria meningitidis
MFRRHFCFQMQGKPMAKTLKTLYQCTECGGTSPKWQGKCPHCGEWNTLQESLAAPEPKNARFQSWAADTSTVQSLSAVTATEVPRNPTGMGELDRVLGGGLVDGAVILLGGDPGIGKSTLLLQTIAKMAQSRKVLYVSGEESAQQVALRAQRLELPTEGVNLLAEIRMEAIQTALKQHQPEVVVIDSIQTMYSDQITSAPGSVSQVRECAAQLTRMAKQMGIAMILVGHVTKDGAIAGPRVLEHMVDTVLYFEGDQHSNYRMIRAIKNRFGAANELGVFAMTENGLKGVSNPSAIFLASYRDDTPGSCVLVTQEGSRPLLVEIQALVDDAHGFTPKRLTVGLEQNRLAMLLAVLNRHGGIACFDQDVFLNAVGGVKIGEPAADLAVILAMLSSFRNRPMPEKTVVFGEIGLSGEVRPVARGQERLKEAEKLGFKRAIVPKANMPRNAKEFPNLKIYGVSSLQEAIDICRDSRE

SEQ ID NO: 29796 - protein, 349 aa, Neisseria meningitidis
MSKQPTSKRQWRDGAAPSAKKTAKPFKSKARPKGETRKTATQAYGQKASDGIKPQNAPKQRAAKAKKLVVRNPNQKIMEHARDLKERRSDLSRMEPERLQKVLAASGVGSRREMEEWITNGWITVNGKTAQLGDKVTPDDHVTVKGSIIKLKWADRLPRIILYYKQEGEIVSRDDPQGRVSIFDRLPQAASSRWVAIGRLDINTSGLLILTTSGELVQRFAHPSFEVEREYAVRVLGGLTGEQMRVLTEEGVMLEDGLAKVERIREQGGEGANKWYNVVIKEGRNREVRRIFESQGLTVSRLVRVGFGPIGLPNRLKRGQFYELNPAEVANIIKWADMLLPGERRRKKA

SEQ ID NO: 29797 - protein, 187 aa, Neisseria meningitidis; identical to SEQ ID NO: 14283

SEQ ID NO: 29798 - protein, 431 aa, Neisseria meningitidis; identical to SEQ ID NO: 14522

SEQ ID NO: 29799 - protein, 548 aa, Neisseria meningitidis; identical to SEQ ID NO: 3866

SEQ ID NO: 29800 - protein, 406 aa, Neisseria meningitidis; identical to SEQ ID NO: 7984

SEQ ID NO: 29801 - protein, 156 aa, Neisseria meningitidis; identical to SEQ ID NO: 14045

SEQ ID NO: 29802 - protein, 227 aa, Neisseria meningitidis; identical to SEQ ID NO: 2422

SEQ ID NO: 29803 - protein, 914 aa, Neisseria meningitidis
MQQQHLFRLNILCLSLMTALPVYAENVQAEQAQEKQLDTIQVKAKKQKTRRDNEVTGLGKLVKTADTLSKEQVLDIRDLTRYDPGIAVVEQGRGASSGYSIRGMDKNRVSLTVDGLAQIQSYTAQAALGGTRTAGSSGAINEIEYENVKAVEISKGSNSVEQGSGALAGSVAFQTKTADDVIGEGRQWGIQSKTAYSGKNRGLTQSIALAGRIGGAEALLIHTGRRAGEIRAHEDAGRGVQSFNRLVPVEDGSSDYVYFVVEEECKSGSYETCKSKPKKDIVGKDERQTVSTRDYTGPNRFLADPLSYESRSWLFRPGFRFENKRHYIGGILEHTQQTFDTRDMTVPAFLTKAVFDENRKYGSIRGHGKYAGDHKYSGLITNGENGALVGAEYGTGVFYDETHTKSRYGLEYVYTNADKDTWADYARLSYDRQGIGLDNHFQQTHCSADGSDKYCRPSADKPFSYYKSDRVIYGESHRLLQAAFKKSFDTAKIRHNLSVNLGFDRFGSNLRHQDYYFQNAKRAYSLKTPPKNGNQNSPNGDKSKPYWVSIGGGNVVTGQICRLGNNTYTDCTPRSINGKSYYAAVRDNVRLGRWADVGAGLRYDYRSTHSDDSSVSTGTHRTLSWNAGIVLKPADWLDLTYRTSTGFRLPSFAEMYGWRAGVQSKAVKIDPEKSFNKEAGIVFKGDFGNLEASWFNNAYRDLIVRGYEAQIQNGKETAKGDPAYLNAQSARITGINILGKIDWNGVWDKLPEGWYSTFAYNRVHVRDIKKRADRTDIQSHLFDAIQPSRYVVGLGYDQPEGKWGVNGMLTYSKAKEITELLGSRALLNGNSRNTKATARRTRPWYIVDVSGYYTIKKHFTLRAGVYNLLNYRYVTWENVRQTAGGAVNQHKNVGVYNRYAAPGRNYTFSLEMKF

SEQ ID NO: 29804 - protein, 215 aa, Neisseria meningitidis; identical to SEQ ID NO: 6176

SEQ ID NO: 29805 - protein, 466 aa, Neisseria meningitidis; identical to SEQ ID NO: 7726

SEQ ID NO: 29806 - protein, 337 aa, Neisseria meningitidis; identical to SEQ ID NO: 263

SEQ ID NO: 29807 - protein, 343 aa, Neisseria meningitidis; identical to SEQ ID NO: 614

SEQ ID NO: 29808 - protein, 395 aa, Neisseria meningitidis; identical to SEQ ID NO: 1108

SEQ ID NO: 29809 - protein, 123 aa, Neisseria meningitidis; identical to SEQ ID NO: 130

SEQ ID NO: 29810 - protein, 302 aa, Neisseria meningitidis; identical to SEQ ID NO: 1790

SEQ ID NO: 29811 - protein, 384 aa, Neisseria meningitidis
MVDKKSPLIAVSVGEASGDLLGAHLIRAIRKRCPQARFVGIGGELMKAEGFESLYDQERLAVRGFVEVVRRLPEILRIRRGLVRDLLSLKPDVFVGIDAPDFNLGVAEKLKRSGIPTVHYVSPSVWAWRRERVGKIVHQVNRVLCLFPMEPQLYLDAGGRAEFVGHPMAQLMPLEDDRETARQTLGVDAGIPVFALLPGSRVSEIDYMAPVFFQTALLLLERYPAACFLLPAATEATKRRLAEILQRSEFAGLPLTVTDRQSETVCRAADAVLVTSGTATLEVALCKRPMVISYKISPLTYAYVKRKIKVPHVGLPNILLGKEAVPELLQHDAVPEKLAAALADWYEHPDKVAALQQDFRVLHLLLKKDTADLAARAVLEEAGC

SEQ ID NO: 29812 - protein, 318 aa, Neisseria meningitidis; identical to SEQ ID NO: 12498

SEQ ID NO: 29813 - protein, 393 aa, Neisseria meningitidis; identical to SEQ ID NO: 5005

SEQ ID NO: 29814 - protein, 98 aa, Neisseria meningitidis; identical to SEQ ID NO: 9060

SEQ ID NO: 29815 - protein, 391 aa, Neisseria meningitidis; identical to SEQ ID NO: 6209

SEQ ID NO: 29816 - protein, 358 aa, Neisseria meningitidis; identical to SEQ ID NO: 7769

SEQ ID NO: 29817 - protein, 420 aa, Neisseria meningitidis; identical to SEQ ID NO: 2546

SEQ ID NO: 29818 - protein, 257 aa, Neisseria meningitidis; identical to SEQ ID NO: 780

SEQ ID NO: 29819 - protein, 313 aa, Neisseria meningitidis
MKTLLLLIPLVLTACGTLTGIPAHGGGKRFAVEQELVAASSRAAVKEMDLSALKGRKAALYVSVMGDQGSGNISGGRYSIDALIRGGYHNNPESATQYSYPAYDTTATTKADALSSVTTSTSLLNAPAAALTKNSGRKGERSAGLSVNGTGDYRNETLLANPRDVSFLTNLIQTVFYLRGIEVVPPEYADTDVFVTVDVFGTVRSRTELHLYNAETLKAQTKLEYFAVDRDSRKLLIAPKTAAYESQYQEQYALWTGPYKVSKTVKASDRLMVDFSDITPYGDTTAQNRPDFKQNNGKKPDVGNEVIRRRKGG

SEQ ID NO: 29820 - protein, 123 aa, Neisseria meningitidis; identical to SEQ ID NO: 7208

SEQ ID NO: 29821 - protein, 286 aa, Neisseria meningitidis; identical to SEQ ID NO: 5322

SEQ ID NO: 29822 - protein, 280 aa, Neisseria meningitidis; identical to SEQ ID NO: 6063

SEQ ID NO: 29823 - protein, 334 aa, Neisseria meningitidis
MNHTVTLPDQTTFAANDGETVLAAAARQNLNLPHSCKSGVCGQCKAELVSGDIQMGGHSEQALSEAEKAQGKILMCCTTAQSDINIPGYKADALPVRTLPARIESIIFKHDVALLKLALPKAPPFAFYAGQYIDLLLPGNVSRSYSIANLPDQEGILELHIRRHENGVCSEMIFGSEPKVKEKGIVRVKGPLGSFTLQEDSGKPVILLATGTGYAPIRSILLDLIRQGSNRAVHFYWGARHQDDLYALEEAQGLACRLKNACFTPVLSRPGEGWQGRNGHVQDIAAQDHPDLSEYEVFACGSPAMTEQTKNLFVQQHKLPENLFFSDAFTPSAS

SEQ ID NO: 29824 - protein, 352 aa, Neisseria meningitidis; identical to SEQ ID NO: 15195

SEQ ID NO: 29825 - protein, 69 aa, Neisseria meningitidis; identical to SEQ ID NO: 3167

SEQ ID NO: 29826 - protein, 354 aa, Neisseria meningitidis; identical to SEQ ID NO: 22347

SEQ ID NO: 29827 - protein, 186 aa, Neisseria meningitidis
MKNLIAFNKPYGVICQFSPHEKHKSLKDFINFPGFYPAGRLDTDSEGLLLLTDDGRLQAQITDPKFKHPKTYWAQLEGVPDESRLESLRKGIDLGGFVTRPASIRILKHGEADSLWERIPPIRVRKTVPDFWIEITISEGKNRQVRRMTAKAGYPCLRLIRVASGRLKLFDLDLKPGEWAYAPFKP

SEQ ID NO: 29828 - protein, 187 aa, Neisseria meningitidis; identical to SEQ ID NO: 9755

SEQ ID NO: 29829 - protein, 615 aa, Neisseria meningitidis; identical to SEQ ID NO: 14969

SEQ ID NO: 29830 - protein, 160 aa, Neisseria meningitidis; identical to SEQ ID NO: 2526

SEQ ID NO: 29831 - protein, 404 aa, Neisseria meningitidis
MEWEFNSYYTLIAATLVLLVGKFLVQKIKFLRDFNIPEPVAGGLVAAIILFALHEAYGVSFKFEKPLQNAFMLIFFTSIGLSADFSRLKAGGLPLVVFTAIVGGFILVQNFVGVGLATALGLDPLIGLITGSVSLTGGHGTSGAWGPNFETQYGLVGATGLGIASATFGLVFGGLIGGPVARRLINKMGRKPVENKKQDQDDNSDDVFEQAKRTRLITAESAVETLAMFAACLAFAEIMDGFDKEYLFDLPKFVWCLFGGVVIRNILTAAFKVNMFDRAIDVFGNASLSLFLAMALLNLKLWELTGLAGPVTVILAVQTVVMVLYATFVTYVFMGRDYDAAVLAAGHCGFGLGATPTAVANMQSVTHTFGASHKAFLIVPMVGAFFVDLINAAILTGFVNFFKG

SEQ ID NO: 29832 - protein, 787 aa, Neisseria meningitidis
MQFSYSWLKTQADTELSSDKLEHLLTMSGLEVEEAETAAPAFAGVVVAEVKSVEKHPDADRLNVTRVDAGTGELVQIVCGAPNVKAGIKVPCSLPGAVLPGNFKIKPTKMRGVVSNGMLCSTDELGLPDDGVNGLHILPEDAPVGTNIREYLDLDDTLFTLKITPNRADCLSIKGIAREVSALTGCAFRQPEIHTAPITGSRKQPVQINAPADCGRFISRVIENVNAKAATPDWMKQRLERSGIRSISVLVDIGNYVMLEIGQPMHVFDADKLSGSLHIRRAREGETLECLNEKTVSLSENTLVVADEKGALSLAGLMGGAASAVSDGTQNIVLEAAWFAPEIIAGKSRQYGFGSDSSFRFERSVDYRLQADAIERATELVLQICGGAAGEMVEAQGELPEAKQVGLRLDRLKTVLGVDIPAEQVETILQHLDLQPEKTAEGFRVTAPSFRFDIEIEADLIEEIGRVYGYENIPDDYTSGRLKMLELPETRRPRFAVYNEMAARGYREVVSYAFVNEQWEQDFAANADPIRLQNPLAAQYAVMRSTLIGGLVEILQNNLNRKQNRVRVFEIARVFGKGSDGQFVQNERIGGLWYGAAMPEQWGGKTRNADFYDIKADVENLLKNKAVEFVKTGHPALHPGRAANIVSDGKVIGFVGELHPKWLQKYDLPQAPLVFEIDMAAVLECGKTRYRAVSKFQPVRRDLAFVMPEAMSHDDLLLVLEGAANKLVQEISVFDVYRGMGLPEGMKSVAVKVILQDMENTLTDEAVEPLIGKLIGAATAAGARLRS

SEQ ID NO: 29833 - protein, 118 aa, Neisseria meningitidis; identical to SEQ ID NO: 2492

SEQ ID NO: 29834 - protein, 154 aa, Neisseria meningitidis
MYKHLVVAVDGSETSINALKHAAELAGVNSARLTLVHVANPAEYMALAPEFLQHESYEAAAVAQGNEVLDAAERTARELGVENTVKHLLVANKGAREMAQDLVDYADENGADLLVLGTHGRTGLMHLLMGSFAETVMRQSHLPLLIIRSKAEEA

SEQ ID NO: 29835 - protein, 926 aa, Neisseria meningitidis; identical to SEQ ID NO: 15987

SEQ ID NO: 29836 - protein, 465 aa, Neisseria meningitidis; identical to SEQ ID NO: 1096

SEQ ID NO: 29837 - protein, 251 aa, Neisseria meningitidis; identical to SEQ ID NO: 4289

SEQ ID NO: 29838 - protein, 110 aa, Neisseria meningitidis
MQILSFQPDIAERMLEGTEGESVNENAQFVRTDNGYWIAWHEGVAALLAPDMPPGIPCFWVEGAESLEELCAMVERGEFDEVEEFDGDDDEWLETAQGCGHHGDACACGH

SEQ ID NO: 29839 - protein, 617 aa, Neisseria meningitidis; identical to SEQ ID NO: 15302

SEQ ID NO: 29840 - protein, 218 aa, Neisseria meningitidis
MKNKTKVWDFPTRLFHWLLAASLPFMWYSAKTGGDMLQWHTRVGLFVLFLLVFRLCWGIWGSDTARFSRFVQGWAGIRGYLKNGIPEHIQPGHNPLGALMVVALLVAVSFQVGTGLFAADENTFSTNGYLNHLVSEHTGSLMRKIHLNFFKLLAVFSAIHIAAVAAYRVFKKKNLVLPMITGFKYIEGKTSIRFAGKTALAAALSVAALAAAAILLLS

SEQ ID NO: 29841 - protein, 163 aa, Neisseria meningitidis; identical to SEQ ID NO: 3672

SEQ ID NO: 29842 - protein, 478 aa, Neisseria meningitidis; identical to SEQ ID NO: 9742

SEQ ID NO: 29843 - protein, 207 aa, Neisseria meningitidis; identical to SEQ ID NO: 1132

SEQ ID NO: 29844 - protein, 176 aa, Neisseria meningitidis; identical to SEQ ID NO: 26619

SEQ ID NO: 29845 - protein, 130 aa, Neisseria meningitidis; identical to SEQ ID NO: 425

SEQ ID NO: 29846 - protein, 205 aa, Neisseria meningitidis; identical to SEQ ID NO: 6895

SEQ ID NO: 29847 - protein, 124 aa, Neisseria meningitidis; identical to SEQ ID NO: 215

SEQ ID NO: 29848 - protein, 153 aa, Neisseria meningitidis; identical to SEQ ID NO: 7521

SEQ ID NO: 29849 - protein, 392 aa, Neisseria meningitidis; identical to SEQ ID NO: 4748

SEQ ID NO: 29850 - protein, 505 aa, Neisseria meningitidis; identical to SEQ ID NO: 2655

SEQ ID NO: 29851 - protein, 159 aa, Neisseria meningitidis; identical to SEQ ID NO: 3392

SEQ ID NO: 29852 - protein, 160 aa, Neisseria meningitidis
MMKKILAVSALCLMTAAARAADTYGYLAVWQNPQNADDVLQVKTTKEDSTKSEAFAELEAFCKGQDTLAGIAEDEPTGCRSVVSLNNTCVALAYPKALGVMRVENAVVITSPRFTSVHQVALNQCIKKYGAQGQCGLETVYCTSSSYYGGTVRSLIQNLK

SEQ ID NO: 29853 - protein, 269 aa, Neisseria meningitidis
MAKIGDFAAKSMIEIRSKRMITLPSLNNLPSKWDEIRYWLETRVFECGVMPHPNLTECEAGQFDRDFWDNIGCAPEEYVRIRRAIRLLEVRYPDSLNELVCAAIATPLGEMLAVFGNKGLCLLEFVGQKHLEQEIAAVQKALRGRFVFREDERTQLLRQELDLYFKGRLKTFATPLEQIGTEFQKQAWDALLAIPYGETRSYKEQAQHLGNPKAVRAVAAANGQNKVSILIPCHRVIGSDGKLTGYAGGLNRKQFLLALERGEVQTALF

SEQ ID NO: 29854 - protein, 253 aa, Neisseria meningitidis; identical to SEQ ID NO: 1532

SEQ ID NO: 29855 - protein, 1144 aa, Neisseria meningitidis; identical to SEQ ID NO: 14737

SEQ ID NO: 29856 - protein, 306 aa, Neisseria meningitidis; identical to SEQ ID NO: 1708

SEQ ID NO: 29857 - protein, 112 aa, Neisseria meningitidis; identical to SEQ ID NO: 1765

SEQ ID NO: 29858 - protein, 163 aa, Neisseria meningitidis
MRAVIQKTVGAKVDVVSEAGTETCGKIDGGFVVLLGVTHSDTEKDARYISDKIAHLRVFEDEAGKLNLSLKDVGGAVLLVSQFTLYADAASGRRPSFSQAAPAEQAQQLYLRTAELLRGHGIHVETGRFRTHMQVSLCNDGPVTILLDSFMTRISPKMKVVPD

SEQ ID NO: 29859 - protein, 300 aa, Neisseria meningitidis
MSVFQTAFFMFQKHLQKASDSVVGGTLYVVATPIGNLADITLRALAVLQKADIICAEDTRVTAQLLSAYGIQGKLVSVREHNERQMADKIVGYLSDGMVVAQVSDAGTPAVCDPGAKLARRVREVGFKVVPVVGASAVMAALSVAGVAGSDFYFNGFVPPKSGERRKLFAKWVRAAFPVVMFETPHRIGATLADMAELFPERRLMLAREITKTFETFLSGTVGEIQTALSADGNQSRGEMVLVLYPAQDEKHEGLSESAQNIMKILTAELPTKQAAELAAKITGEGKKALYDLALSWKNK

SEQ ID NO: 29860 - protein, 61 aa, Neisseria meningitidis; identical to SEQ ID NO: 1125

SEQ ID NO: 29861 - protein, 581 aa, Neisseria meningitidis; identical to SEQ ID NO: 14479

SEQ ID NO: 29862 - protein, 159 aa, Neisseria meningitidis; identical to SEQ ID NO: 9538

SEQ ID NO: 29863 - protein, 447 aa, Neisseria meningitidis; identical to SEQ ID NO: 22226

SEQ ID NO: 29864 - protein, 213 aa, Neisseria meningitidis; identical to SEQ ID NO: 9820

SEQ ID NO: 29865 - protein, 478 aa, Neisseria meningitidis; identical to SEQ ID NO: 14444

SEQ ID NO: 29866 - protein, 171 aa, Neisseria meningitidis; identical to SEQ ID NO: 23366

SEQ ID NO: 29867 - protein, 507 aa, Neisseria meningitidis
MTVIKQEDFIQSICDAFQFISYYHPKDYIDALYKAWQKEENPAAKDAMTQILVNSRMCAENNRPICQDTGIATVFLKVGMDVQWDADMSVEEMVNEGVRRAYTWEGNTLRASVLADPAGKRQNTKDNTPAVIHMSIVPGDKVEVTCAAKGGGSENKSKLAMLNPSDNIVDWVLKTIPTMGAGWCPPGILGIGIGGTPEKAVLMAKESLMSHIDIQELQEKAASGAELSTTEALRLELFEKVNALGIGAQGLGGLTTVLDVKILDYPTHAASKPIAMIPNCAATRHVEFELDGSGPVELTPPRVEDWPDLTYSPDNGKRVDVDKLTKEEVASWKTGDVLLLNGKILTGRDAAHKRLVDMLNKGEELPVDFTNRLIYYVGPVDPVGDEVVGPAGPTTATRMDKFTRQMLEQTDLLGMIGKSERGVATCEAIADNKAVYLMAVGGAAYLVAKAIKSSKVLAFPELGMEAIYEFEVKDMPVTVAVDSKGESIHATAPPQWQAKIGIIPVES

SEQ ID NO: 29868 - protein, 262 aa, Neisseria meningitidis; identical to SEQ ID NO: 14182

SEQ ID NO: 29869 - protein, 231 aa, Neisseria meningitidis; identical to SEQ ID NO: 3708

SEQ ID NO: 29870 - protein, 159 aa, Neisseria meningitidis; identical to SEQ ID NO: 929

SEQ ID NO: 29871 - protein, 706 aa, Neisseria meningitidis; identical to SEQ ID NO: 14469

SEQ ID NO: 29872 - protein, 449 aa, Neisseria meningitidis
MLNPSRKLVELIRILDEGGFIFSGDPVQATEALRRVDGSTEEKIIRRAEMIDRNRMLRETLERVRAGSFWLWVVAATFAFFTGFSGTYLLMDNQGLNFFLVLAGVLGMNTLMLAVWLAMLFLRVKVGRFFSSPATWFRGKDPVNQAVLRLYADEWRQPSVRWKIGATSHSLWLCTLLGMLVSVLLLLLVRQYTFNWESTLLGDSSSVRLVEMLAWLPAKLGFPVPDARAVIEGRLNGNIADARAWSGLLVGSIACYGILPRLLAWAVCKILLKTSENGLDLEKPYYQAVIRRWQNKITDADTRRETVSAVSPKIVLNDAPKWAVMLETEWQDGEWFEGRLAQEWLDKGVAANREQVAALETELKQKPAQLLIGVRAQTVPDRGVLRQIVRLSEAAQGGAVVQLLAEQGLSDDLSEKLEHWRNALAECGAAWLEPDRAAQEGRLKTNDRT

SEQ ID NO: 29873 - protein, 262 aa, Neisseria meningitidis; identical to SEQ ID NO: 3749

SEQ ID NO: 29874 - protein, 247 aa, Neisseria meningitidis; identical to SEQ ID NO: 2441

SEQ ID NO: 29875 - protein, 916 aa, Neisseria meningitidis
MLTNIAKKIFGSRNDRLLKQYRKSVARINALEEQMQALSDADLQAKTAEFKQRLADGQTLDGILPEAFAVCREASRRTLGMRHFDVQLIGGMVLHDGKIAEMRTGEGKTLVATLAVYLNALAGKGVHVVTVNDYLASRDAGIMEPLYNFLGLTVGVIISDMQPFDRQNAYAADITYGTNNEFGFDYLRDNMVTDQYDKVQRELNFAVVDEVDSILIDEARTPLIISGQADDNIQLYQIMNTVPPHLVRQETEEGEGDYWVDEKAHQVILSEAGHEHAEQILTKMGLLAENDSLYSAANIALMHHLMAALRAHTLFHKDQHYVIQDGEIVIVDEFTGRLMSGRRWSEGLHQAVEAKEGVEIKRENQTLASITFQNYFRLYTKLSGMTGTADTEAFEFQSIYNLETVIIPTNRPIQRKDFNDQIFRSAEEKFEAVVKDIEECHKRGQPVLVGTTSIENSELVSHLLQKAGLPHNVLNAKEHEREALIVAQAGKVGAITVATNMAGRGTDIVLGGNLKHQTDAIRADEALSDEEKQAQISALEDGWQAEHDKVMEAGGLHIIGTERHESRRIDNQLRGRSGRQGDPGSSRFYLSFEDPLLRLFALDRAAAILNRLAPERGVAIEHNLLTRQIEGAQRKVEGRNFDMRKQVLEYDDVANEQRKVIYSQRNEILTSKDISDLMKEIRSDVVSDLVDTYMPPDSMEEQWDIPTLENRLAAEFRLHEDIQSWLKADNAIDGQDIKERLIERIENEYAAKTELVGKQAMADFERNVMLQVIDNQWREHLAAMDYLRQGIHLRSYAQKNPKQEYKREAFTMFQDLWNGIKFHIASLLTSVQIEQNPVAVVEEQPIGNIQSIHSESPDMEELLGQSQTDLVTEAFNPDGTDFSPEALEARGQIVHRNDPCPCGSGLKYKQCHGKLA

SEQ ID NO: 29876 - protein, 113 aa, Neisseria meningitidis; identical to SEQ ID NO: 3580

SEQ ID NO: 29877 - protein, 331 aa, Neisseria meningitidis; identical to SEQ ID NO: 1014

SEQ ID NO: 29878 - protein, 1161 aa, Neisseria meningitidis
MRLTHIKLSGFKSFTDPTTIHVPGQLVAVIGPNGCGKSNVIDAVRWVLGEASAKQLRGESMQDVIFNGAATRRPAPRASVELVFDNSDHSLQGAWGQYAEVSIKRQLTRQGESTYFINNQTVRRRDITDLFLGTGVGARGYAVIEQGMISRIIEARPEELRAYIEEAAGVSKYKERRKETEGCLKDTREHLQRLGDLQNELARQVEKLEKQAETAERYKSLTAQLNQQQDLLDYAQWQQSLAAADKATAQHQSLQAQQDETAAQVQALNDEVHALQTAEQSQQQAVHELGNKRGVLREQIARLEEQIRHQQNLHQRIERDKQAAQAQLQRIHQEQQQIRVQLEENELQVEEKQTELAEWAMQVAEHEERLPELEEAQATLNAAFQTQQDEANRIRRELALKQQQLAHAEQTVAKHEERKGRLKQENQALNLPDEAETAAAQEAAALLQSQQEHYEEQIIAAEEALHAAREAFQTASNRFQSLKQQHITLQAQQQALSQILSQQQEAADFWQATDHAAAPQLWQHITAPAEWQHALSVILAERLHARAVPQGFVPPEPLPQGQAAWLSDGLSGGIKKSLPVQALLNQIQAQPPFQTALHYWLDGVLCAPDLSYALAHQNDLGAHQIWLTPEGHQVDKVSVLLYAKPAQESLIAQKARLDGIASELENLAPELSADEAAFKQAEAAVRSSEVQHKNLMQQQQQHTRQYSQAQQRAAELLARTNQGQIRREHIERELAQLAEEQTVLQHTSDGLSDDIVTLQEAAAELEHQQQTTAHSRQEQQGRLKQAQLALLEANRQYGLAEVAVHKLNQQKQNYRQQIAQLEQQTLDWQERQQELALAYETEFQNDEQHIKLEELSEAVQTLDEEYIVVQEKLAQIQEQGREQYAKVQTLQTKLPQLQAATQTALLQQQEALINAKRYHQNLTERAADLDALEALAKESPKVLNSSIGSLSQQIEALGAVNLAALQELEEARERDGYYRSQSEDVQAAITLLEEAIAQIDDKTKARFKETFDAVNGKVQTFFPTLFGGGEATLKMIGDDLLTAGVSIMARPPGKKNSTIHLLSGGEKALTAMSLVFALFSLNPAPFCLLDEVDAPLDDANTSRFCNLVKEMSAQTQFLYISHNRLTMEMAEQLVGVTMQEKGVSRVVAVDIKQALEMAEAV

SEQ ID NO: 29879 - protein, 419 aa, Neisseria meningitidis; identical to SEQ ID NO: 5127

SEQ ID NO: 29880 - protein, 275 aa, Neisseria meningitidis; identical to SEQ ID NO: 23958

SEQ ID NO: 29881 - protein, 768 aa, Neisseria meningitidis; identical to SEQ ID NO: 14281

SEQ ID NO: 29882 - protein, 191 aa, Neisseria meningitidis; identical to SEQ ID NO: 1730

SEQ ID NO: 29883 - protein, 39 aa, Neisseria meningitidis; identical to SEQ ID NO: 7406

SEQ ID NO: 29884 - protein, 143 aa, Neisseria meningitidis; identical to SEQ ID NO: 28

SEQ ID NO: 29885 - protein, 119 aa, Neisseria meningitidis; identical to SEQ ID NO: 3189

SEQ ID NO: 29886 - protein, 380 aa, Neisseria meningitidis; identical to SEQ ID NO: 5057

SEQ ID NO: 29887 - protein, 188 aa, Neisseria meningitidis; identical to SEQ ID NO: 23427

SEQ ID NO: 29888 - protein, 658 aa, Neisseria meningitidis
MEYMDLKSLLNFGLPNMPRTVIGLRKKAQRDGWQTRRRQGKGGGVEYALPIEIRAAIMKRQSDELAEKMPKMLPQVRPGTAMSAQALAEAAKLLNEKQRSVADARCAVVAAVLGIKYQYGCSAKAAVAQFLGLLAESKLDAVTLGNLEKANDRSRSAKVGERTLDGWISAYLKAENATERLVALAPKTTKAVKPIESYGWLPMFMQFHNIPSAPKLAHSYRRFVQWAEAENMPVNDVPNLSMVRRVWDKLPLIMQERGRKTGAAYKSLLPYVKRDWGALKPNDVWIGDGHSFKAKVAHPVHGRPFKPEVTVIIDGCTRFVVGFSVSLAESCVAVSDALRIGVKHFGLPIIYYSDNGGGQTGKTIDHEITGITSRLGIRHETGIAGNPQGRGIIERWWKDNLIEMARQYETFAGAGMDSSTKNLMYRKMESAFNALEKGKDLTEEQQKYLKKLPGWSRFIADVVKCIDEYNNRPHVELPRHPDGGHYSPKAYREMRLEQDGIAPDMLSAEELATMFMPQEVRKVQRGWLDLFNNSYFSTELAEYHKDEVRVSYDLDDASAVNVFDMDGKFITKAQADGNTREAFPTARIDQLAEKRRKGKIKRAENAIKLANAEVNPALEQAAVWDELGHLGGNVIEAEYAVLPRTGTDDFVLFETDRS

SEQ ID NO: 29889 - protein, 286 aa, Neisseria meningitidis
MKPYSANPNLTEPRRLRVLLIAAALGFLLLMLVVPLVAVFYEALKGGWDLYLKSLSDPEAWSAIKLTLITALIVVPVNAVLGVAMAWLLTRFDFRGKQLLTTLLDLPFSVSPVVAGLMFVLLFGAHTALGGWLEAQGIQIIFAIPGIVLATLFVTFPFVAREIIPLMQAQGDSEEQAALILGASGWQMFWRVTLPNIKWALLYGIILTNARAMGEFGAVSVVSGHIRGETNTVPLLVEIFYNEYNFTGAFALSGVLALLALATLAVQNIITKLQDKKLAAAERNAV

SEQ ID NO: 29890 - protein, 149 aa, Neisseria meningitidis; identical to SEQ ID NO: 880

SEQ ID NO: 29891 - protein, 297 aa, Neisseria meningitidis; identical to SEQ ID NO: 560

SEQ ID NO: 29892 - protein, 704 aa, Neisseria meningitidis
MDLLSVFHKYRLKYAVAVLTILLLAAVGLHASVYRTFTPENIRSRLQQSIAHTHRKISFDADIQRRLLPRPTVILKNLTITEPGGDQTAVSVQETKIGLSWKNLWSDQIQIEKWVVSSAELALTRDGKGVWNIQDLIDSQKRQASVNRIIVENSTVRLNFLQEQLILKEINLNLQSPDSSGQPFESSGILVWGKLSVPWKSRGLFLSDGIGTPKISPFHFEASTSLDGHGITISTTGSPSVRFNAGGADAAGLGLRADTSFRNLHLTAQIPTLALRNNSIKIETVNGAFTAGGEYAQWDGSFKLDKANLHSGIANIGNAEISGSFKTPRHQTNFSLNSPLVWTENKGLDAPRLYVSTLQDTVNRLPQPRFISRLDGSLSVPNLQNWNAELNGTFDRQTVAAKFRYTHEDAPHLEAAVALQKLNLTPYLDDVRQQNGKIFPDTLAKLSGDIEAHLKIGKVQLPGLQLDDMETYLHADKGHIALSRFKSGLYGGHTEGGISIANTRPATYRLQQNASNIQIQPLLQDLFGFHSFSGNGDAVIDLTASGETRKELIRSLQGSLSLNISNGAWHGIDMDNILKNGISGKTADNAAPSTPFHQFTLNSEISDGISRHIDTELFSDSLYVTSNGYTNLDTQELSEDVLIRNAVHPKNKPIPLKITGTVDKPSITVDYGRLTGGINSRKEKQKILEDTLLEQWQWLKPKEP

SEQ ID NO: 29893 - protein, 334 aa, Neisseria meningitidis; identical to SEQ ID NO: 15582

SEQ ID NO: 29894 - protein, 207 aa, Neisseria meningitidis; identical to SEQ ID NO: 243

SEQ ID NO: 29895 - protein, 294 aa, Neisseria meningitidis
MSTFFQQTAQAMIAKHIDRFPLLKLDQVIDWQPIEQYLNRQRIRYVRDHRGRPTYSLLSMFKSVLLGQWHSLSDPELEHSLITRIDFNLFCRFDELSIPDYSTLCRYRNRLAQDNTLSELLELINRQLTEKNLKIEKASAAVIDATIIQTAGSKQRQAIEVDEEGQVSGQTTPSKDSDARWTKKNGLYRLGYKQHTRTDAEGYIEKLHITPANTHECNHLLPLLEGITEGTTIYADKGYDSAENRTSGRTSVVRRHYARAAYFGLIKVSAQSHLKAMCLNLLKAANRLSAPAAA

SEQ ID NO: 29896 - protein, 289 aa, Neisseria meningitidis
MKRIFLPALPAILPLSAYADLPLTIEDIMTDKGKWKLETSLTYLNSENSRAALAAPVYIQTGATSFIPIPTEIQENGSNTDMLAGTLGLRYGLTGNTDIYGSGSYLWHEERKLDGNGKTRNKRMSDISLGISHTFLKDDKNPALISFLESTVYEKSRNKASSGKSWLIGATTYKAIDPIVLSLTAAYRINGSKTLSDGIRYKSGNYLLLNPNISFAANDRISLTGGIQWLGTQPDRIDGKKETARNTSTYAHFGTGFGFTKTTALNASARFNVSGQSSSELKFGVQHTF

SEQ ID NO: 29897 - protein, 791 aa, Neisseria meningitidis
MNKNIKSLNLREKDPFLSREKQRYEHPLPSREWIIELLERKGVPSKIESLARELSITEDEYVFFERRLKAMARDGQVLINRRGAVCAADKLDLVKCRVEAHKDGFGFAVPLTPAKDGDFVLYERQMRGIMHGDIVTVRPAGMDRRGRREGTVLDIVERAQSKVVGRFYMDRGVAILEPEDKRLNQSIVLEPDGVARFKPESGQVIVGEIEVYPEQNRPAVAKIIEVLGDYADSGMEIEIAVRKHHLPHQFSEACAKAAKKIPDHVRKSDLKGRVDLRDLPLVTIDGETARDFDDAVFAEKIGRNYRLVVAIADVSHYVRPDDAIDTDAQERSTSVYFPRRVIPMLPENLSNGICSLNPNVERLCMVCDMVITYAGNIKEYRFYPAVMRSHARLTYNQVWKWLSDGIGHPFKAQIDTLYKLFKILQKKRFERGAVEFDSIETQMLFDDNGKIEKIVPVVRNDAHKLIEECMLAANVCAADFLLKNKHTALFRNHLGPTPEKLAALREQLGLLGLQLGGGDNPSPKDYAALAGQFKGRPDAELLQVMMLRSMQQAVYEPHCDGHFGLAYEAYAHFTSPIRRYPDLTVHRAIKAVLNQQTYTPKKSWQALGVHTSFCERRADDASRDVENWLKTYYMRDKVGEVFEGKISGMTSFGIFVTLDGIHIDGLVHISDLGEDYFNFRPEIMAIEGERSGIRFNMGDRVAVRVARADLDDGKIDFVLIAEGSGRGRKVKSSASAKPAGTAGKGKPKTAAEKKTARGGKVRGRGASAAAESGKKAKKPVPIKVKKRKGKS

SEQ ID NO: 29898 - protein, 176 aa, Neisseria meningitidis
VSGNHGLGGLLEEGTHGKSPKCHGGNLGDFGEFCKGLGKYVKEVTVANGVVTATMLSSGVNKEIQGRKLSLWAKRQNGSVKWFCGQPVTRAANNTAKDAVTAANDNSNNGINTKHLPSTCRDAASAICTRTPRADFKHFQKISRYRVLPESRHMAEKLRHSRAGGNLGLSVRKLIG

SEQ ID NO: 29899 - protein, 126 aa, Neisseria meningitidis; identical to SEQ ID NO: 23552

SEQ ID NO: 29900 - protein, 413 aa, Neisseria meningitidis; identical to SEQ ID NO: 13940

SEQ ID NO: 29901 - protein, 374 aa, Neisseria meningitidis; identical to SEQ ID NO: 23970

SEQ ID NO: 29902 - protein, 116 aa, Neisseria meningitidis; identical to SEQ ID NO: 4624

SEQ ID NO: 29903 - protein, 179 aa, Neisseria meningitidis; identical to SEQ ID NO: 8483

SEQ ID NO: 29904 - protein, 242 aa, Neisseria meningitidis; identical to SEQ ID NO: 14445

SEQ ID NO: 29905 - protein, 432 aa, Neisseria meningitidis; identical to SEQ ID NO: 2024

SEQ ID NO: 29906 - protein, 245 aa, Neisseria meningitidis; identical to SEQ ID NO: 11946

SEQ ID NO: 29907 - protein, 231 aa, Neisseria meningitidis; identical to SEQ ID NO: 15038

SEQ ID NO: 29908 - protein, 282 aa, Neisseria meningitidis; identical to SEQ ID NO: 1327

SEQ ID NO: 29909 - protein, 47 aa, Neisseria meningitidis
MFCIVVYRFRTFVRLKAGRHRNESTQRKCRLNMRSGGVLLGVSERNV

SEQ ID NO: 29910 - protein, 233 aa, Neisseria meningitidis; identical to SEQ ID NO: 6431

SEQ ID NO: 29911 - protein, 444 aa, Neisseria meningitidis
VGEPENKSSEPVREIQASKEMPSETSSPRKENETEVHIPAAPFIVKQSGSNALAVCALVLAALGLGTSGFLFVQGQNVLKNQELAFNQKIDKAALGESENAALLKDNLNRQAAIQSELDRLDSGVKANGEQILMTQKAYRELTKGRADWLVDETETILNLAAQQLVLTGNIQTAVGVLEHIDSRLSRFNQAELLPIKQAVSSDLAELKNRPYVDISGTALRLDRLETAVSGLPLILDGVLKPGVQARNEAVSASWWQNVWEKSLGTLKGLVEIRRLENNDAMLLSPEQAYFVRENLRLRLLDARIALMQRNGEVYQGDLNNAEAAVRQYFDAKSPATQSWLKELAELKALDVRMTADDGLKNSLNAVRAYRDGTRMTAAENQEAEQAASEPANENTASEPAAASDVKTIEAPSLPSERKPEQPAKKQSVPEKAGRSPSAKGERA

SEQ ID NO: 29912 - protein, 185 aa, Neisseria meningitidis; identical to SEQ ID NO: 313

SEQ ID NO: 29913 - protein, 344 aa, Neisseria meningitidis; identical to SEQ ID NO: 6373

SEQ ID NO: 29914 - protein, 900 aa, Neisseria meningitidis
MQLHILNNPKDAALAADAEFLKQSLFNLLHEEASPLVVETVKLLSTSDDSAALIEKVLPQLDEQQTHDLTLACGLFAQILNIAEDVHHERRRQIHEEAGRGGAEGSLTETVRRLKAGKADGKSVQRQLDNTSVTAVLTAHPTEVQRQTVLSFNRRIRALLPQRERCTNADALARLRREIDTILLGLWQTSETRRHKLSVNDEINNGVSIFPMSFFEALPKLYRNMEHDFQMVYPGVRVPDILKIGGWIGGDRDGNPFVSAETLRFAFRRHADAVFRFYRGELDKLYRELPLSIRRVKVNGDVTALSDKSPDEEIARAEEPYRRAIAYIMARAMGKARALGLGMGCKFGFLEPYASAQEFLDDLKKLQRSLIDNGSRLLAEGRLADLIRSVSVFGFHMMPLDLRQHAGKHADVVAELFQHAGLEDYNSLNEEQKQAALLRELGHQRPLYSPFITYSDHTRHELAIFNEARKIKDEFGEDAVTQSIISNCEQPSDLLALALLLKETGLLVVENGKPHSRINIVPLFETIEALENACPVMETMFRLDWYDALLESRGNIQEIMLGYSDSNKDGGYVTSSWCLYQAELGLVELFKKYGVRMRLFHGRGGSVGRGGGPSYQAILAQPAGSVAGQIRITEQGEVITAKYADPGNAQRNLETLVAATLEASILPDKKDPDAKLMQALSDVSFKYYRELITHPDFIDYFLQTSPIQEIATLNLGSRPASRKTLARIQDLRAIPWVFSWMQNRLMLPAWYGFGSAVETLCEGSPETLAALREHAQSNPFFQAMLSNMEQVMAKTDITLAENYAGLSESPDKAKIIFGMIKEEYRRSRKALLDLLQTEELLRDNRSLARSLALRIPYLNALNGLQVAMLKRLRKEPDNPHALLMVHLTINGVAQGLRNTG

SEQ ID NO: 29915 - protein, 103 aa, Neisseria meningitidis; identical to SEQ ID NO: 392

SEQ ID NO: 29916 - protein, 110 aa, Neisseria meningitidis
LAADVVKVRDRFNEELDNVRREIGKRPMEEFRNVFLQAAQEAQTTIGQKAVQIELEKFPLNGSPSAKRIAFYFGAQRIREVEQKEREDQRKEQERQARRMERDDGHGIGM

SEQ ID NO: 29917 - protein, 321 aa, Neisseria meningitidis
MSHTQLTQGERYHIQYLSRHCTVTEIAKQLNRHKSTISREIRRHRTQGQQYSAEKAQRQSRTIKQRKRQPYKLDSQLIQHIDTLIRRKLSPEQVCAYLCKHHQITLHHSTIYRYLRQDKSNGSTLWQHLRICSKPYRKRYGSTWTRGKVPNRVGIENRPAIVDQKSRIGDWEADTIVGKGQKSALLTLVERVTRYTIICKLDSLKAEDTARAAVRTLKAHKDRVHTITMDNGKEFYQHTKITKALKAETYFCRPYHSWEKGLNENTNGLIRQYFPKQTDFRNISDREIRRVQDELNHRPRKTLGYETPSVLFLNLFQPLIH

SEQ ID NO: 29918 - protein, 106 aa, Neisseria meningitidis; identical to SEQ ID NO: 853

SEQ ID NO: 29919 - protein, 335 aa, Neisseria meningitidis
MSTFFRQTAQAMIAKHIDRFPLLKLDQVIDWQPIEQYLNRQKTRYLRDHRGRPAYPLLSMFKAVLLGQWHSLSDPELEHSLITRIDFNLFCRFDELSIPDYSTLCRYRNWLAQDDTLSELLELINCQLTEKGLKVEKASAAVIDATIIQTAGSKQRQAIEVDEEGQISGQTTPSKDSDARWIKKNGLYKLGYKQHTRTDGEGYIEKLHITPANTHECNHLSPLLEGIAEDTTVYADKGYDSKENRQHLKEHRLLDGIMRKAQRNRPLTEAQTKRNRYLSKTRYVVEQSFGTLHRKFRYARAAYFGLSKVSAQSHLKAMCLNLLKAANRLSAPAAA

SEQ ID NO: 29920 - protein, 95 aa, Neisseria meningitidis; identical to SEQ ID NO: 589

SEQ ID NO: 29921 - protein, 306 aa, Neisseria meningitidis; identical to SEQ ID NO: 14090

SEQ ID NO: 29922 - protein, 378 aa, Neisseria meningitidis; identical to SEQ ID NO: 14916

SEQ ID NO: 29923 - protein, 69 aa, Neisseria meningitidis; identical to SEQ ID NO: 3057

SEQ ID NO: 29924 - protein, 147 aa, Neisseria meningitidis; identical to SEQ ID NO: 15429

SEQ ID NO: 29925 - protein, 107 aa, Neisseria meningitidis; identical to SEQ ID NO: 14750

SEQ ID NO: 29926 - protein, 436 aa, Neisseria meningitidis; identical to SEQ ID NO: 3506

SEQ ID NO: 29927 - protein, 942 aa, Neisseria meningitidis; identical to SEQ ID NO: 14566

SEQ ID NO: 29928 - protein, 288 aa, Neisseria meningitidis; identical to SEQ ID NO: 464

SEQ ID NO: 29929 - protein, 729 aa, Neisseria meningitidis
MIYHRIAVNVPLSDGLLTYSHSDPLPPGTRVLVPFRNKTVVGMVWETDIAPDMDTARILSIQTTFLDEPPLPESWRDLLSFTSRYYHYPTGQAVFAALPQGLKETRAVEMPQPPLFYALNEAGRAQTPPLARFNKKAALWDALLSGGMTMAALKQVNAQAAKLIEDWAEQGWIETTEAAKPVLRSCNGQASHSEFVLNADQQKASDAIQTALGRFQPFLLYGITGSGKTEVYFDAMAKVLAQGRQVLFLLPEINLTPQLLKRVENRFADVPTAVLHSQMAAGRRTQDYLRAMLGQAKLVIGTRLAVFTPMDDVGLIVVDEEHDGSFKQDNELRYHARDLAVWRAKQSGCPVVLGSATPSLESWHKAQSGAYRLLQLTERAHTAAQLPQVDILNVGRLKLDNGFSPQALQLLKQNFEAGGMSLVYLNRRGFAPALFCGDCGHTFGCPNCSAKMVLHQRARQLRCHHCDHREPIPFKCPDCGNQDLTAVGHGTQRVEETLRAFLPKAAVVRVDRDSTAHKNDWADLYRRIADNEIDILVGTQMLAKGHDFARLNLVIVLNADGSLYSADFRAPERLFAELMQVSGRAGRADKPGKVLIQTQLPEHPVFAAVKAQDYAVFAENELNERQMFAMPPFGFQTAVRADAPRVADAMEFLNAAKETLAPLLPESVSQFGAAPMLMVRLAERERAQIFLESVSRQDLHRAVSLWVQVLQQNRDSKIRWSVDVDPQEA

SEQ ID NO: 29930 - protein, 201 aa, Neisseria meningitidis; identical to SEQ ID NO: 291

SEQ ID NO: 29931 - protein, 590 aa, Neisseria meningitidis; identical to SEQ ID NO: 23709

SEQ ID NO: 29932 - protein, 482 aa, Neisseria meningitidis
MKGDIGVIGLAVMGQNLILNMNDCGFKVVAYNRTIGKVDEFLNGAAKGTDIVGAYSLQDLVDKLAKPRKIMMMVRAGSVVDDFIEQLLPLLEEGDIIIDGGNANYPDTTRRTHYLAEKGILFVGAGVSGGEEGARHGPSIMPGGDKRAWEAVKPIFQAIAAKTPQGEPCCDWVGRDGAGHFVKMVHNGIEYGDMQLICEAYQFMKDGLGLSYDEMHRVFAEWNKTELDSYLIEITAAILGYKDEGGEPLVEKILDTAGQKGTGKWTGINALDLGIPLTLISEAVFARCVSSFKEQRVQTGKLFARTVTPVEGGKQEWVEALRQALLASKIISYAQGFMLIREAGESYGWDLDYGNTALLWREGCIIRSAFLSNIRDAYENNPDLVFLGADPYFKNILENCLPAWRKVVAKAVECGIPMPCMASAITFLDGYTTERLPANLLQAQRDYFGAHTYERTDKPRGEFFHTNWTGKGGDTASTTYDI

SEQ ID NO: 29933 - protein, 572 aa, Neisseria meningitidis
MNLHQTVEHEAAAAFAAAGIADSPVVLQPTKNAEHGDFQINGVMGAAKKAKQNPRELAQKVADALAGNAVIESAEVAGPGFINLRLRPEFLAQNIQTALNDARFGVAKTDKPQTVVIDYSSPNLAKEMHVGHLRSSIIGDSISRVLEFMGNTVIRQNHVGDWGTQFGMLVAYLVEQQKDNAAFELADLEQFYRAAKVRFDEDPAFADTAREYVVKLQGGDETVLALWKQFVDISLSHAQAVYDTLGLKLRPEDVAGESKYNDDLQPVVDDLVQKGLAVEDDGAKVVFLDEFKNKEGEPAAFIVQKQGGGFLYASTDLACLRYRVGTLHADRLLYVVDHRQALHFEQLFTTSRKAGYLPENVGAAFVGFGTMMGKDGKPFKTRSGDTVKLVDLLTEAVERATALVKEKNPELGADEAAKIGKTVGIGAVKYADLSKNRTSDYVFDWDAMLSFEGNTAPYLQYAYTRVQSVFRKTGEWDADAPTVLTEPLEKQLAAELLKFEDVLQSVADTAYPHYLAAYLYQIATLFSRFYEACPILKAEGASRNSRLQLAKLTGDTLKQGLDLLGIDVLDVM

SEQ ID NO: 29934 - protein, 144 aa, Neisseria meningitidis
MCGLWLLRALTAKLPQQRYAALFITLFFAAVLVFGRHDSMYWYPVLVNLMMLAVFGGSLFAGQTVIEKLARLQQPDLPEKAVRYTRRVTQVWCVFFIINGTLAALLARLGRYDWWAVYTGVIAYVLMGMPFAGEWLYRKLVLKV

SEQ ID NO: 29935 - protein, 394 aa, Neisseria meningitidis; identical to SEQ ID NO: 6363

SEQ ID NO: 29936 - protein, 94 aa, Neisseria meningitidis; identical to SEQ ID NO: 2694

SEQ ID NO: 29937 - protein, 125 aa, Neisseria meningitidis
MPLKFQPRERSVIMCDFRGYEEPEMVKKRPVVVIARNRHNGKLVTVVPLSSTEPVPLADYHHKMSGNPLPDKPHIQCAKCDMTATVGLARLDRYKPKGRDRCIPIISEEDFQAIKTAVAKAFKLY

SEQ ID NO: 29938 - protein, 619 aa, Neisseria meningitidis; identical to SEQ ID NO: 22449

SEQ ID NO: 29939 - protein, 287 aa, Neisseria meningitidis; identical to SEQ ID NO: 2947

SEQ ID NO: 29940 - protein, 183 aa, Neisseria meningitidis; identical to SEQ ID NO: 15567

SEQ ID NO: 29941 - protein, 119 aa, Neisseria meningitidis; identical to SEQ ID NO: 420

SEQ ID NO: 29942 - protein, 89 aa, Neisseria meningitidis; identical to SEQ ID NO: 9425

SEQ ID NO: 29943 - protein, 166 aa, Neisseria meningitidis
MADLQKTFQTSFRDAMASCAAGVHVITTDGAAGRYGITMTAVAPVTDEPPTVMLCINRSARIIPILSENGSLCINTLADEHQDVAEHFAGLTGLSPEERFAYHIWHRGKTGQLEIEGALVHLHGHIVGKHEIGTHFVFYVRLDEIKNCGCKRPALLYFRRQFRFLD

SEQ ID NO: 29944 - protein, 336 aa, Neisseria meningitidis
MNDNTQTLPPRRLSVAPMLDWTDRHYRYMARQITRNTWLYSEMVNAGAIVYGDKDRFLMFNEGEQPVALQLGGSDPSDLAKAAKAAEAYGYNEVNLNCGCPSPRVQKGSFGACLMNEVGLVADCLNAMQDAVGIPVTVKHRIGVDRQTEYQTVADFVGTLRDKTACKTFIVHARNAWLDGLSPKENRDVPPLKYDYVYRLKQEFPGLEIIINGGITTNEAIAGHLQHVDGVMVGREAYHNPMVMREWDRLFYGDTANPIGYADLVQRLYTYSQAQIQAGRGTILRHIVRHSLGLMHGLKGARTWRRMLSDATLLKDNDGSLILEAWKEVERANTRE

SEQ ID NO: 29945 - protein, 321 aa, Neisseria meningitidis; identical to SEQ ID NO: 6649

SEQ ID NO: 29946 - protein, 162 aa, Neisseria meningitidis
MTALLVILALALIAAGTAGIVYPALPGLALMFAGTWLLAYSGGYQIYGAGVLWTVGLISLAGILADYVAGIWGTKYTGAGKLAVRGALVGSIIGIFFSLPGLILGPFIGAAAGELIDRRNMLQAGKAGLGTLLGLIIGTTFKIGCAVSILFILLVKYIAYLF

SEQ ID NO: 29947 - protein, 511 aa, Neisseria meningitidis; identical to SEQ ID NO: 14073

SEQ ID NO: 29948 - protein, 275 aa, Neisseria meningitidis; identical to SEQ ID NO: 7533

SEQ ID NO: 29949 - protein, 79 aa, Neisseria meningitidis; identical to SEQ ID NO: 1083

SEQ ID NO: 29950 - protein, 65 aa, Neisseria meningitidis; identical to SEQ ID NO: 15698

SEQ ID NO: 29951 - protein, 418 aa, Neisseria meningitidis; identical to SEQ ID NO: 8075

SEQ ID NO: 29952 - protein, 123 aa, Neisseria meningitidis; identical to SEQ ID NO: 15049

SEQ ID NO: 29953 - protein, 335 aa, Neisseria meningitidis
MSTFFQQTAQAMIARHIDRFPLLKLDQVIDWQPIEQYLNRQKTRYLRDHRGRPAYPLLSMFKAVLLGQWHSLSDPELEHSLITRIDFNLFCRFDELSIPDYSTLCRYRNRLAQDDTLSELLELINRQLTEKGLKVEKASAAVVDATIIQTVGSKQRQAIEVDEEGQINGQTTPSKDSDARWIKKNGLYKLGYKQHTRTDAEGYIEKLHITPANAHECKHLPPLLEGLPKGTTVYADKGYDSAENRQHLEEHQLQDGIMRKACRNRPLSEVQTKRNRYLSKTRYVVEQSFGTLHRKFRYARAAYFGLIKVSAQSHLKAMCLNLLKAANRLSAPVAA

SEQ ID NO: 29954 - protein, 319 aa, Neisseria meningitidis; identical to SEQ ID NO: 6432

SEQ ID NO: 29955 - protein, 1277 aa, Neisseria meningitidis
MTTTTAPQRIREIPYNYTSYTDREIVIRLLGNEAWQILQDLRGQRKTGRSARMLFEVLGDIWVVVRNPYLVDDLLEHPKRRAALIREMRHRLNEIRKRRDDNRQVDVLVAAAEKAVERFDSSFDETSQKRRQILERLSKITKPHNIMFDGLARVTHVTDATDWRVEYPFVVVNPDTEAEIAPLVRALIELDLVIIPRGGGTGYTGGAIPLDAMSAVINTEKLDKHNGVEFVELAGLDGKHPIIHCGAGVVTRRVEETAHQAGLVFAVDPTSADASCVGGNVAMNAGGKKAVLWGTALDNLAYWQMVNPQGEWLRIERVRHNFGKIHDEETAVFDVHTLDSDGLNIVKTERLEIPGHKFRKVGLGKDVTDKFLSGLPGVQKEGTDGIITGVAFVLHKMPKYTRTVCMEFFGTVATATPSIVEIRDFLLAHDSVRLAGLEHLDWRYVRAVGYATKAAGKGRPKMVLLADVVSDDEAAVEAAAEHICELARARDGEGFIAVSPEARKTFWLDRSRTAAIAKHTNAFKINEDVVIPLERLGEYSDGIERINIELSIQNKLKLCAALEQYLSGKLPIDKMGTDLPTAELLGERGKHALAHVSAVKTRWEWLLANLDTPLADYKARYGAAVHAAPEAKNNESCFIAFRDFRLRVSVKADVMKPLAEIFSGKTDTKIIQGLGKIHAKTVRSRVFVALHMHAGDGNVHTNIPVNSDDAEMLQTAYRSVERIMKIARSLGGVISGEHGIGITKLEFLSDEEMQPFWNYKNQVDPKHTFNRHKLMKGSDLSNAYTPSFELLGAESLIMEKSDLGTIADSVKDCLRCGKCKPVCSTHVPRANLLYSPRNKILGVGLLTEAFLYEEQTRRGVSVKHFEELMDIGDHCTVCHRCVKPCPVNIDFGDVTVAVRNYLADSGHKRFAPAASMGMAFLNATGPKTIKALRAAMIQTGFPAQNFAYKIGKLLPIGTKKQKAEPKATVGKAPIKEQVIHFINRPLPKNVPAKTPRSLLGIEDGKSIPIIRNPASPEDAEAVFYFPGCGSERLFSQIGLAVQAMLWHVGVQTVLPPGYMCCGYPQDAGGNKAKAEEMSTNNRVAFHRMANTLNYLDIKTVVVSCGTCYDQLEKYRFEEIFPGCRIIDIHEYLLEKGVKLDGVKGQQYLYHDPCHTPIKTMNATQMASSLMGQKVVLSDRCCGESGMFAVKRPDIATQVKFRKQEEIEKNLKELPQGEPVKMLTSCPACLQGLSRYADDNNMPADYIVIEMAKYILGENWLDEFVKKANNGGVEKVLL

SEQ ID NO: 29956 - protein, 275 aa, Neisseria meningitidis; identical to SEQ ID NO: 17334

SEQ ID NO: 29957 - protein, 113 aa, Neisseria meningitidis
MPSEPLKGLPEQNVVWLTGKHTNDLEAVVGKCMETDGKGAPSGWAANGVCHTLFAKLVGNIAEDGGKLTDYLISHSALQPYQAGKSGYAAVQNGRYVLEIDSEGAFYFRRRHY

SEQ ID NO: 29958 - protein, 321 aa, Neisseria meningitidis; identical to SEQ ID NO: 19261

SEQ ID NO: 29959 - protein, 241 aa, Neisseria meningitidis
MSEGMVSPVLYLIPTPLGTPDTPCLLPHDQRAVVGLTDFVVEAEKTARAHLKHLGVTMPIRELNLQTLNEHTDLKTLPELLKPLQEGRSMGIVSEAGCPAVADPGANLVALAHKHSFEVRPLVGPSSLLLALMASGANGQNFAFKGYLPSEKNERIQSLKALEQRSRQQNETQLFIETPYRNDVLLADAVENLHPETRLCTATDLTLPTQSVVSKTVADWRRMKEMPNLKKRPTIFVMYAG

SEQ ID NO: 29960 - protein, 181 aa, Neisseria meningitidis; identical to SEQ ID NO: 14383

SEQ ID NO: 29961 - protein, 317 aa, Neisseria meningitidis; identical to SEQ ID NO: 9092

SEQ ID NO: 29962 - protein, 223 aa, Neisseria meningitidis; identical to SEQ ID NO: 1391

SEQ ID NO: 29963 - protein, 182 aa, Neisseria meningitidis; identical to SEQ ID NO: 3766

SEQ ID NO: 29964 - protein, 121 aa, Neisseria meningitidis; identical to SEQ ID NO: 4117

SEQ ID NO: 29965 - protein, 158 aa, Neisseria meningitidis; identical to SEQ ID NO: 17665

SEQ ID NO: 29966 - protein, 78 aa, Neisseria meningitidis; identical to SEQ ID NO: 7882

SEQ ID NO: 29967 - protein, 215 aa, Neisseria meningitidis; identical to SEQ ID NO: 1509

SEQ ID NO: 29968 - protein, 758 aa, Neisseria meningitidis; identical to SEQ ID NO: 13907

SEQ ID NO: 29969 - protein, 205 aa, Neisseria meningitidis; identical to SEQ ID NO: 7783

SEQ ID NO: 29970 - protein, 246 aa, Neisseria meningitidis; identical to SEQ ID NO: 2993

SEQ ID NO: 29971 - protein, 356 aa, Neisseria meningitidis; identical to SEQ ID NO: 5919

SEQ ID NO: 29972 - protein, 237 aa, Neisseria meningitidis; identical to SEQ ID NO: 7758

SEQ ID NO: 29973 - protein, 468 aa, Neisseria meningitidis; identical to SEQ ID NO: 29

SEQ ID NO: 29974 - protein, 123 aa, Neisseria meningitidis; identical to SEQ ID NO: 6403

SEQ ID NO: 29975 - protein, 351 aa, Neisseria meningitidis; identical to SEQ ID NO: 6464

SEQ ID NO: 29976 - protein, 321 aa, Neisseria meningitidis; identical to SEQ ID NO: 6149

SEQ ID NO: 29977 - protein, 628 aa, Neisseria meningitidis; identical to SEQ ID NO: 6456

SEQ ID NO: 29978 - protein, 176 aa, Neisseria meningitidis; identical to SEQ ID NO: 1829

SEQ ID NO: 29979 - protein, 129 aa, Neisseria meningitidis; identical to SEQ ID NO: 9668

SEQ ID NO: 29980 - protein, 73 aa, Neisseria meningitidis; identical to SEQ ID NO: 227

SEQ ID NO: 29981 - protein, 238 aa, Neisseria meningitidis
MTDTAENQTQNNWQAEHPRSIRSFVLRQSHMTAAQQRAIDTLWDSFGIDYQATPADLDANFGSNRPKILEIGFGMGTATAEIARRLPETDFLAIDVHGPGVGNLLKLINENHLENIRVMRHDAVEVIENMLQDGSLDGIHIFFPDPWHKKRHHKRRLIQAPFIAKLLPKLKTGGYIHLATDWEEYARQMLEVLSSFDSLQNTAADYAPTPDYRPETKFEARGKRLGHGVWDLVFKRIG

SEQ ID NO: 29982 - protein, 424 aa, Neisseria meningitidis; identical to SEQ ID NO: 4741

SEQ ID NO: 29983 - protein, 65 aa, Neisseria meningitidis; identical to SEQ ID NO: 127

SEQ ID NO: 29984 - protein, 318 aa, Neisseria meningitidis; identical to SEQ ID NO: 15595

SEQ ID NO: 29985 - protein, 42 aa, Neisseria meningitidis; identical to SEQ ID NO: 6907

SEQ ID NO: 29986 - protein, 489 aa, Neisseria meningitidis; identical to SEQ ID NO: 15549

SEQ ID NO: 29987 - protein, 526 aa, Neisseria meningitidis
MSSIKRSLISLSDKTGAVEFAQTLHKLGVEILSTGGTAKLLADAGVPVIEVADYTGFPEMLDGRVKTLHPKIHGGILGRRDLDEHVAKMEEHGIGNIDLVCVNLYPFAATIAKPNCTLEDAIENIDIGGPTMVRSAAKNWKHVAIVTDTADFPAIAAELEANNGALSDKTRFNLSRKAFSHTAQYDGMISNYLTSLSDDVLSGTPEIAGFPGRFNQSWIKVQDMRYGENPHQRAAFYRDIDPAAGSLAAYKQLQGKELSYNNIADADAAWEAVKSFDVPACVIVKHANPCGVAIASNTLDAYKLAYATDTTSAFGGIIAFNREVDGATVKQITDNQFMEVLMAPKFTAEALEIAAAKKNVRVLEVPLEAGANRFELKRVGGGLLVQTPDIHRISRADLKVVSKRQPTEQEWNDLLFVWNVAKYVKSNAIVFGKGGQTYGIGAGQMSRVDSTRIAARKAQDAGLDLNGACAASDAFFPFRDGVDVIAEQGIKAIIHPAGSMRDQEVFDAADEHGIAMVVTGIRHFRH

SEQ ID NO: 29988 - protein, 178 aa, Neisseria meningitidis; identical to SEQ ID NO: 7442

SEQ ID NO: 29989 - protein, 671 aa, Neisseria meningitidis
MMKLNPQQLEAVRYLGGPLLVLAGAGSGKTGVITQKIKYLIVNVGYLPHTVAAITFTNKAAAEMQERVAKMLPKSQTRGLTICTFHSLGMKILREEANHIGYKKNFSILDSTDSAKIIGELLGGTGKEAVFKAQHQISLWKNDLKTPEDVVQTASNIWEQQTARVYASYQETLQSYQAVDFDDLIRLPAVLLQQNSEVRHKWQRRLRYLLVDECQDTNTCQFTLMKLLTGAEGMFTAVGDDDQSIYAWRGANMENLRKMQENYPQMKVIKLEQNYRSTARILKIANKVIENNPKLFTKKLWSQLGEGEPVKVVACQNEQHEADWVVSQIVKQKLIGGDKTQYADFAVLYRGKHQARIFEEALRGARIPYRLSGGQSFFDKAEIKDVLSYVRLLANPNDDPAFLRAVTTPKRGIGDVTLGKLNTYAHEHECSLYEAAQNEEALATLNNTNRQHLQAFMDMFGSYRAKAETGEAGEFINSLLEEIDYENHLLASEEGKAGEIKWRNVGDLVSWFARKGGEDGKNIIELAQTVALMTLLEGKDEEETDAVSLSTLHAAKGLEYPYVFLVGCEEGVLPHNDSIEEGNVEEERRLMYVGITRAKRQLTLTHCVKRKKQGTWQFPEPSRFIDEMPQEDLKILGRKGGEPIVSKEEGRRNLADIIGRLDSMKKGGPED

SEQ ID NO: 29990 - protein, 735 aa, Neisseria meningitidis
MFPDQSAPNLLQGLNPEQLSAVTWPPQSALVLAGAGSGKTRVLTTRIAWLLQTGQASVHSIMAVTFTNKAAKEMQTRLGAMIPVNVRAMWLGTFHGLCHRFLRLHHRDAGLPSSFQILDSGDQLSLIKRLLKSLNIAEEIIAPRSLQGFINAQKESGLRASVLSAPDPHTSRMIECYAEYDKICQREGVVDFAELMLRSYEMLQSNEILRQHYQNRFNHILVDEFQDTNKLQYAWLKLMAGGNAAVFAVGDDDQSIYRFRGANVGNMTALMEEFHIDAPVKLEQNYRSVGNILAAANAVIENNDERLGKNLRTDAEAGDKIRYYSAFTDLEEARFIVDETKALEREGWDLDEIAVLYRSNAQSRVIEQSLFRSGIPYKIYGGLRFYERQEIKHALAYLRLAVNPDDDNALLRVINFPPRGIGARTVENLQTASQEQGVSLWQAACNAGAKAAKVAAFVRLIEALRNQVGQMPLPEIIAGILKDSGLTEHYRTQKGDNQDRLDNLDELVNAAIEFKPEDSNFETLPDNISDDPAFPILAFLSNAALESGENQAGAGEKAVQLMTVHAAKGLEFNAVFLTGMEEGRFPSEMSLAERGGLEEERRLMYVAITRARKRLYITMAQQRMLHGQTQFGIVSRFVEEIPPEVLHYLSVKKTAYDSYGSPRQTAASKDKIIDDYKQPQTYAGFRIGQNVRHAKFGTGVIIDAADKGESARLTINFGKQGVKELDTKFAKLEAM

SEQ ID NO: 29991 - protein, 265 aa, Neisseria meningitidis
MDTAQKQRWAITLSYDGSRFYGWQKQADGVPTVQAALETALAQIAGEAVSTIVAGRTDTGVHATAQVVHFDTAAARPQQAWVRGVNAHLPEGIAVLHARQVAPEFHARFDAYGRHYRYLLESVPVRSPLLKNRAGWTHLKLDIEPMRRAAAYLIGEQDFSSFRAAECQAKSPVKTIYRADLTQSSGLVRLDLHGNAFLHHMVRNIMGALVYVGSGRLSVEGFAALIQERSRLKAPPTFMPDGLYLTGVDYPEAYGIIRPQIPEWL

SEQ ID NO: 29992 - protein, 1139 aa, Neisseria meningitidis; identical to SEQ ID NO: 6379

SEQ ID NO: 29993 - protein, 133 aa, Neisseria meningitidis
MRTIKYLAMALLLMFTVAGCQLAGWYPCPSLSGWCMPRKPAAIDFWDIGGESPPSLEDYEIPLSDGNRSVRANEYESAQQSYFYRKIGKFEACGLDWRTRDGKPLIETFKQEGFDCLKKQGLRRNGLSECVRW

SEQ ID NO: 29994 - protein, 140 aa, Neisseria meningitidis; identical to SEQ ID NO: 6541

SEQ ID NO: 29995 - protein, 144 aa, Neisseria meningitidis; identical to SEQ ID NO: 7462

SEQ ID NO: 29996 - protein, 146 aa, Neisseria meningitidis; identical to SEQ ID NO: 6802

SEQ ID NO: 29997 - protein, 377 aa, Neisseria meningitidis; identical to SEQ ID NO: 1690

SEQ ID NO: 29998 - protein, 102 aa, Neisseria meningitidis; identical to SEQ ID NO: 28012

SEQ ID NO: 29999 - protein, 128 aa, Neisseria meningitidis; identical to SEQ ID NO: 6045

SEQ ID NO: 30000 - protein, 155 aa, Neisseria meningitidis; identical to SEQ ID NO: 6051

SEQ ID NO: 30001 - protein, 177 aa, Neisseria meningitidis; identical to SEQ ID NO: 1513

SEQ ID NO: 30002 - protein, 415 aa, Neisseria meningitidis; identical to SEQ ID NO: 22753

SEQ ID NO: 30003 - protein, 325 aa, Neisseria meningitidis; identical to SEQ ID NO: 19566

SEQ ID NO: 30004 - protein, 194 aa, Neisseria meningitidis
VGIQFFEFQSFPINCLSIECLDSRLRGNDESIRTETCTTSFPRTCTTSFPRTCIPSFPRTCIPSFPRACIPSFPRTCIPSFPRTCIPSFPRTCIPSFPRTCIPSFPRTCIPSFPRTCIPSFPRTCIPSFPRKWESSSFGFACFKFRVTSTSSFPRTCIPSFPRKWESSSFGFACFKFRVTSTSSFPRRRESSFL

SEQ ID NO: 30005 - protein, 279 aa, Neisseria meningitidis
MKQLRDNKAQGSALFTLVSGIVIVIAVLYFLIKLAGSGSFGDVDATTEAATQTRIQPVGQLTMGDGIPVGERQGEQIFGKICIQCHAADSNVPNAPKLEHNGDWAPRIAQGFDTLFQHALNGFNAMPAKGGAADLTDQELKRAITYMANKSGGSFPNPDEAAPADNAASGTASAPADGAAPAEAKAEDKGAAAPAVGVDGKKVFEATCQVCHGGSIPGIPGIGKKDDWAPRIKKGKETLHKHALEGFNAMPAKGGNAGLSDDEVKAAVNYMANQSGAKF

SEQ ID NO: 30006 - protein, 127 aa, Neisseria meningitidis; identical to SEQ ID NO: 4145

SEQ ID NO: 30007 - protein, 290 aa, Neisseria meningitidis
VGINANPNCADEAGKLIWENDPNKNWWANRMDDIRGIVQGAVNPFLMGFQGVGIGAITDSAVSPVTDTAAQQTLQGINHLGNLSPEAQLAAATALQDSAFAVKDGINSARQWADAHPNITATAQTALAVAEAAGTVWRGKKVNLNPTKWDWVKNTGYKTPAARPMQTLDGEMAGGNRPPKSITSNSKADASTQPSLQAQLIGEQISSGHAYNKHVIRQQEFTDLNINSPADFARHIENIVSHPTNMKELPRGRTAYWDDKTGTIVIRDKNSDDGGTAFRPTSGKKYYDDL

SEQ ID NO: 30008 - protein, 71 aa, Neisseria meningitidis; identical to SEQ ID NO: 2068

SEQ ID NO: 30009 - protein, 209 aa, Neisseria meningitidis
LVKTADGYKAIARIRAGESVLSKDEASGKMGYKPVTARYGNPYEETVYIKVSDGIGNSQTLISNRIHSFYSGGKWIKTEDLKAGIRLLSESGKTQTVRNIVVKPKPLKAYNLTVADWHTYFVKGSQAETEGVWVHNACPPKRTGSSKNEKHGDGGRSQISAESRIAELKNKIIPGMHKNERLKIEKTIRNIAKNANRKAKGEEHGRHGR

SEQ ID NO: 30010 - protein, 133 aa, Neisseria meningitidis; identical to SEQ ID NO: 2967

SEQ ID NO: 30011 - protein, 216 aa, Neisseria meningitidis; identical to SEQ ID NO: 15161

SEQ ID NO: 30012 - protein, 124 aa, Neisseria meningitidis; identical to SEQ ID NO: 2472

SEQ ID NO: 30013 - protein, 350 aa, Neisseria meningitidis; identical to SEQ ID NO: 22139

SEQ ID NO: 30014 - protein, 120 aa, Neisseria meningitidis; identical to SEQ ID NO: 6941

SEQ ID NO: 30015 - protein, 284 aa, Neisseria meningitidis; identical to SEQ ID NO: 6849

SEQ ID NO: 30016 - protein, 117 aa, Neisseria meningitidis; identical to SEQ ID NO: 6607

SEQ ID NO: 30017 - protein, 114 aa, Neisseria meningitidis; identical to SEQ ID NO: 53

SEQ ID NO: 30018 - protein, 307 aa, Neisseria meningitidis; identical to SEQ ID NO: 7794

SEQ ID NO: 30019 - protein, 144 aa, Neisseria meningitidis; identical to SEQ ID NO: 1668

SEQ ID NO: 30020 - protein, 103 aa, Neisseria meningitidis; identical to SEQ ID NO: 3787

SEQ ID NO: 30021 - protein, 305 aa, Neisseria meningitidis; identical to SEQ ID NO: 1198

SEQ ID NO: 30022 - protein, 71 aa, Neisseria meningitidis; identical to SEQ ID NO: 1785

SEQ ID NO: 30023 - protein, 131 aa, Neisseria meningitidis; identical to SEQ ID NO: 7720

SEQ ID NO: 30024 - protein, 684 aa, Neisseria meningitidis
MTRKILVTSALPYANGSIHLGHMVEHIQTDVWVRFQKLRGNECHYCCADDTHGTPVMLAAQKQGIAPEDMIAKVREEHLADFTGFFIGYDNYYSTHSPENKQFSQDIYRALKANGKIESRVIEQLFDPEKQMFLPDRFVKGECPKCHAQDQYGDNCEVCGTTYSPTELINPYSAVSGAKPELRESEHFFFKLGECADFLKAWTSGNNPHDGKPHLQAEALNKMKEWLGEGEETTLSDWDISRDAPYFGFEIPDAPGKYFYVWLDAPVGYMASFKNLCDRIGVDFDEYFKAGSQTEMYHFIGKDILYFHALFWPAMLHFSGHRAPTGVYAHGFLTVDGQKMSKSRGTFITAKSYLEQGLNPEWMRYYIAAKLNSKIEDIDLNLQDFISRVNSDLVGKYVNIAARASGFIAKRFEGRLKDVADSALLAKLTAQSEAIAECYESREYAKALRDIMALADIVNEYVDANKPWELAKQEGQDARLHEVCSELINAFTMLTAYLAPVLPQTAANAARFLNLDAITWANTRVTLGEHAINKYEHLMQRVEQKQVDDLIEANKQSIQTTPAPVEDSKYEKVAEQAGFDDFMKIDMRVAKVLNCEAVEGSTKLLKFDLDFGFEKRIIFSGIAAFYPNPAELNGRMVIAVANFAPRKMAKFGVSEGMILSAATADGKLKLLDVDAGAQPGDKVG

SEQ ID NO: 30025 - protein, 105 aa, Neisseria meningitidis; identical to SEQ ID NO: 3792

SEQ ID NO: 30026 - protein, 247 aa, Neisseria meningitidis; identical to SEQ ID NO: 15777

SEQ ID NO: 30027 - protein, 326 aa, Neisseria meningitidis
MAMAENGKYLDWAREVLHTEAEGLREIAAELDENFVLAADALLHCKGRVVITGMGKSGHIGRKMAATMASTGTPAFFVHPAEAAHGDLGMIVDNDVVVAISNSGESDEIAAIIPALKRKDITLVCITARPDSTMARHADIHITASVSKEACPLGLAPTTSTTAVMALGDALAVVLLRARAFTPDDFALSHPAGSLGKRLLLRVADIMHKGGGLPAVRLGTPLKEAIVSMSEKGLGMLAVTDGQGRLKGVFTDGDLRRLFQECDNFTGLSIDEVMHTHPKTISAERLATEALKVMQANHVNGLLVTDADGVLIGALNMHDLLAARIV

SEQ ID NO: 30028 - protein, 124 aa, Neisseria meningitidis; identical to SEQ ID NO: 3797

SEQ ID NO: 30029 - protein, 99 aa, Neisseria meningitidis; identical to SEQ ID NO: 1679

SEQ ID NO: 30030 - protein, 101 aa, Neisseria meningitidis
MKKMFVLFCMLFSCAFSLAAVNINAASQQELEALPGIGPAKAKAKAIAEYRAQNGAFKSVDDLTKVKGIGPAVLAKLKDQASVGAPAPKGPAKPVLPAVKK

SEQ ID NO: 30031 - protein, 288 aa, Neisseria meningitidis; identical to SEQ ID NO: 7747

SEQ ID NO: 30032 - protein, 757 aa, Neisseria meningitidis; identical to SEQ ID NO: 1692

SEQ ID NO: 30033 - protein, 185 aa, Neisseria meningitidis; identical to SEQ ID NO: 7750

SEQ ID NO: 30034 - protein, 308 aa, Neisseria meningitidis
MKVIFAGTPDFAAAALRAVAAAGFEIPLVLTQPDRPKGRGMQLTAPPVKQAALELGLRVAQPEKLRNNAEALQMLKEVEADVMVVAAYGLILPQEVLDTPKHGCLNIHASLLPRWRGAAPIQRAIEAGDAETGVCIMQMDIGLDTGDVVSEHRYAIQSTDTANEVHDALMNLGAAAVVADLQQLQSKGRLNAVKQPEEGVTYAQKLSKEEARIDWSESAAVIERKIRAFNPVPAAWVEYQGKPMKIRRAEVVAQQGAAGEVLSCSADGLVVACGENALKITELQPAGGRRMNIAAFAAGRHIEAGTKL

SEQ ID NO: 30035 - protein, 106 aa, Neisseria meningitidis; identical to SEQ ID NO: 7757

SEQ ID NO: 30036 - protein, 166 aa, Neisseria meningitidis; identical to SEQ ID NO: 987

SEQ ID NO: 30037 - protein, 185 aa, Neisseria meningitidis; identical to SEQ ID NO: 5793

SEQ ID NO: 30038 - protein, 290 aa, Neisseria meningitidis; identical to SEQ ID NO: 7766

SEQ ID NO: 30039 - protein, 483 aa, Neisseria meningitidis; identical to SEQ ID NO: 5802

SEQ ID NO: 30040 - protein, 674 aa, Neisseria meningitidis
MNDMTLYLIIALVPLAGSLIAGLFGNKIGRAGAHTVTILGVAVSAVLSAYVLWGFIDGSRAKFDENVYTWLTMGGLDFSVGFLVDTMTAMMMVVVTGVSLMVHIYTIGYMHDEKVGYQRFFSYISLFTFSMLMLIMSNNFIQLFFGWEAVGLVSYLLIGFYFKRPSATFANLKAFLINRVGDFGFLLGIGLVLAYFGGSLRYQDVFAYLPNVQTATIQLFPSVEWSLITVTCLLLFVGAMGKSAQFPLHVWLPDSMEGPTPISALIHAATMVTAGLFMVSRMSPIYEMSSTALSVIMVIGAITALFMGFLGVIQNDIKRVVAYSTLSQLGYMTVALGASAYSVAMFHVMTHAFFKALLFLAAGSAIIGMHHDQDMRHMGNLKKYMPVTWLTMLIGNLSLIGTPFFSGFYSKDSIIEAAKYSTLPGSGFAYFAVLASVFVTAFYAFRQYFMVFHGEEKWRSLPEHHSDGHGEEHHGLGKNDNPHESPLVVTLPLILLAIPSVIIGYVAIGPMLYGDFFKDVIFVNADAHPTMHIMKEEFHGALAMVSHSLHSPVLYLAIAGVLSAWLLYVKLPHMPAKIAQTFRPIYVLFENKYYLDALYFNVFAKGTRALGTFFWKVGDTAIIDNGIVNGSAKLVGAIAAQVRKAQTGFIYTYAAAMVFGVLVLLGMTFWGLFR

SEQ ID NO: 30041 - protein, 387 aa, Neisseria meningitidis
MMKIKALMIAAALLAAADVHAAPQKAKTASAKAAKAAKAAKAAKAAKVAKVAKVAKVAKVAKVAKVAKVAKVAKVAKVAKVAKVAKVAKVAATAQKEAAPAQQQGGIRFSDGIAAVADNEVITRRRLAEAVAEAKANLPKDAQISESELSRQVLMQLVNQSLIVQAGKRRNIQASEAEIDAVVAKNPALKNLSPAQRRDFADNIIAEKVRQQAVMQNSRVSEAEIDAFLEQAQKQGITLPEGAPLRQYRAQHILIKADSENAAVGAESTIRKIYGEARSGTDFSSLARQYSQDASAGNGGDLGWFADGVMVPAFEEAVHALKPGQVGAPVRTQFGWHIIKLNEVRDAGTPQERIRNSVRQYIFQQKAEQATVNLLRDLHSGAYVDIR

SEQ ID NO: 30042 - protein, 792 aa, Neisseria meningitidis; identical to SEQ ID NO: 5804

SEQ ID NO: 30043 - protein, 65 aa, Neisseria meningitidis; identical to SEQ ID NO: 3913

SEQ ID NO: 30044 - protein, 473 aa, Neisseria meningitidis
MTTIYNTLTRQKEPFAPIDPENVRMYVCGMTVYDYCHLGHARVMVVFDMIARWLRECGYPLTYVRNITDIDDKIIARAAENGETIGELTARFIQAMHEDADALGVLRPDIEPKATENIPQMIAMIETLIQNGKAYPAANGDVYYAVREFAAYGQLSGKSLDDLRAGERVEVDGFKRDPLDFVLWKAAKAGEPAWESPWGNGRPGWHIECSAMSENLFGDTFDIHGGGADLQFPHHENEIAQSVGATGHTCGHHHAQTHHGQSIASHVKYWLHNGFIRVDGEKMSKSLGNFFTIREVLKQYDPEVVRFFILRAHYRSPLNYSDAHLDDAKGALTRLYTTLKNTPAAAFDLSENANDYTRRFYAAMNDDFGTVEAVAVLFELAGEVNKTNDAQLAGCLKALGGIIGLLQRDPTEFLQGGAASDGLSNEEIEDLIARRKQARADKNWAESDRIRDLLNEHKIILEDNAGGTTWRRG

SEQ ID NO: 30045 - protein, 464 aa, Neisseria meningitidis; identical to SEQ ID NO: 15830

SEQ ID NO: 30046 - protein, 99 aa, Neisseria meningitidis; identical to SEQ ID NO: 2699

SEQ ID NO: 30047 - protein, 288 aa, Neisseria meningitidis; identical to SEQ ID NO: 7747

SEQ ID NO: 30048 - protein, 316 aa, Neisseria meningitidis; identical to SEQ ID NO: 5807

SEQ ID NO: 30049 - protein, 480 aa, Neisseria meningitidis; identical to SEQ ID NO: 15835

SEQ ID NO: 30050 - protein, 96 aa, Neisseria meningitidis; identical to SEQ ID NO: 1755

SEQ ID NO: 30051 - protein, 625 aa, Neisseria meningitidis
MSQALPYRPDIDTLRAAAVLSVIVFHIEKDWLPGGFLGVDIFFVISGFLMTTILHREMSGGGRFSLKAFYIRRIKRILPAFFAVLAATLAGGFFLFTKDDFFLLWKSALTALGFASNLYFARGKDYFDPAQEEKPLLHIWSLSVEEQFYFVFPILLLLVARKSLRVQFGFLAALCALSLAASFMPSAFDKYYLPHLRACEMLVGSLTAVWMRYRQQRNLAVGRCCAAAGALFSSCILSACLFAYSEQTAYFPGPAALIPCLAVAALIYFNHYEHPLKKFFQWKITVAAGLISYSLYLWHWPILAFMRYIGPDNLPPYSPAAAVVLILLLSLFSYHCIEKPFKKWQGSFAQSVLWIYALPMLILGAGSFFAMRLPFMAQYDRLGLTRSNTSCHNNTGKQCLWGDTEKQPELLVLGDSHADHYKTFFDAVGKKEKWSATMVSADACAYVEGYASRVFQNWAACRAVYRYAEEHLPRYSKVVLAMRWGSQMPENSRSLAYDAGFFQKFDRMLHKLSSEKQAVYLMADNLASSYNVQRAYILSSRIPGYRQALRPDDESTLKANARIRELAAKYPNVYIIDAAAYIPADFQIGGLPVYSDKDHINPYGGTELAKRFSEKQRFLDTRHNH

SEQ ID NO: 30052 - protein, 68 aa, Neisseria meningitidis; identical to SEQ ID NO: 3821

SEQ ID NO: 30053 - protein, 125 aa, Neisseria meningitidis
MCEFKDFRRNIPCFEEYDENSFIGKWYDDGVWDDEEYWKLENALIEVRRKYPYPMDIPRDIVIGIGTIIEFLMVPNWKLFTIKSSPWLPKSIKINERYERFRVMLRYIFTEIDIVNVQFDYYNKK

SEQ ID NO: 30054 - protein, 369 aa, Neisseria meningitidis; identical to SEQ ID NO: 15839

SEQ ID NO: 30055 - protein, 180 aa, Neisseria meningitidis; identical to SEQ ID NO: 11795

SEQ ID NO: 30056 - protein, 155 aa, Neisseria meningitidis; identical to SEQ ID NO: 3828

SEQ ID NO: 30057 - protein, 186 aa, Neisseria meningitidis; identical to SEQ ID NO: 7798

SEQ ID NO: 30058 - protein, 106 aa, Neisseria meningitidis; identical to SEQ ID NO: 15845

SEQ ID NO: 30059 - protein, 399 aa, Neisseria meningitidis; identical to SEQ ID NO: 15846

SEQ ID NO: 30060 - protein, 86 aa, Neisseria meningitidis; identical to SEQ ID NO: 15847

SEQ ID NO: 30061 - protein, 129 aa, Neisseria meningitidis; identical to SEQ ID NO: 11676

SEQ ID NO: 30062 - protein, 511 aa, Neisseria meningitidis
VSDSKTKERATFGTRRAFMIAAIGSAVGLGNIWRFPYIAFENGGGAFILPYLVALLTAGIPLLLLDYAIGHRYRGSAPLAFRRLGRWFEPVGWWNVMTNIVICIYYAVIIGWAASYTYYSVNAAWGADPQGFFFKDFLQMAGPEALGLDFVGKVAGPLAGVWVFTAAIMALGVQKGVARASSFFMPLLLVMFLIMVGISLTLPGAAKGLDALFTPDWSKLADSKVWVAAYGQIFFSLSICFGIMVTYSSYLKKKTDLGGTGLVVGFANSSFELLAGIGVFAALGFMAQAGGKAVNEVASGGIGLAFIAFPTIINQAPMGWLIGILFFGSLVFAGVTSMISILEVIVAAIQDKLNIGRVNATLLVCIPMGIVSTLLFGTATGLPVLDVMDKFVNTYGIVAAGFAYVAAIIISGRLPELRKHLNALSSIRIGGLWTVCVVVTVVMLGYMLFKDTSGLMEKNYEGYPDGFLSIFGWGMSAALVVFGLLLSLLPWKHGQDFNVKDEHEHEQGEEK

SEQ ID NO: 30063 - protein, 121 aa, Neisseria meningitidis; identical to SEQ ID NO: 7805

SEQ ID NO: 30064 - protein, 451 aa, Neisseria meningitidis
MSDFFHSDVLSVSELNAFAKSILENHLAGLWIAGEVSNLTRAASGHYYFSLKDSRAQVRCAMFKGAAARLAKPLKEGDHIEVSGKISIYEARGEFQITVNEVRLKGLGQLYEAYERLKAQLQAEGAFAAERKKPLPARPQCIGIVTSLAAAALRDVVTTLKRRAPEIPVIVYPTVVQGTGSELQIAQVIKTASQRAECDVLIVCRGGGSIEDLWAFNEEPVVRAIEACTIPVVSGVGHETDFTLADFVADVRAPTPTGAAELVSPNRQESLHRLAQAQGRLKTVLEQRYFDASQKFDWLARQIRHPRQKLDEQRTYIHKLAQTLSYSMTQNLRAHAARFERQTQALQHYRPDISVCKKNIDRFQTALPAAFSQLLARRRQSLSAQAALLEAVSPQHILERGFSVVKNTRGQVIRNADVLKQGQKLHIIFADGETDVRVSKEQGQQDLFDCI

SEQ ID NO: 30065 - protein, 117 aa, Neisseria meningitidis; identical to SEQ ID NO: 3854

SEQ ID NO: 30066 - protein, 90 aa, Neisseria meningitidis; identical to SEQ ID NO: 11808

SEQ ID NO: 30067 - protein, 391 aa, Neisseria meningitidis; identical to SEQ ID NO: 2276

SEQ ID NO: 30068 - protein, 37 aa, Neisseria meningitidis; identical to SEQ ID NO: 970

SEQ ID NO: 30069 - protein, 154 aa, Neisseria meningitidis; identical to SEQ ID NO: 15862

SEQ ID NO: 30070 - protein, 834 aa, Neisseria meningitidis; identical to SEQ ID NO: 15863

SEQ ID NO: 30071 - protein, 92 aa, Neisseria meningitidis; identical to SEQ ID NO: 3856

SEQ ID NO: 30072 - protein, 101 aa, Neisseria meningitidis; identical to SEQ ID NO: 15864

SEQ ID NO: 30073 - protein, 122 aa, Neisseria meningitidis; identical to SEQ ID NO: 2373

SEQ ID NO: 30074 - protein, 694 aa, Neisseria meningitidis
MDYLSRLSFGFNKKLPVILQTEVAECGLACLTSILSYYGFHTDLRTLRQKYTLSLKGANLADIMRFGNEMNLTPRALRLELDELSNLQLPCILHWNLNHFVVLCSISKDSIVIMDPAVGMRKIKMDEVSQKFTGIALELFPNTHFEEKKETKKIKILSLLRGAGLKRSLIQMLILAISLEVFALVSPFFMQWVIDHVIVTADKNLLLTLTLGFGLLTILQQLISLLQAWVGMHLSTTLNLQWKANIFKRLLDLPNDYFSKRHLGDVISRFGSIDHIQETLTSTFFVLVLNSLMAVFTFVLMTIYSTQLSLIVLLTLVLYILIRWLAYYPLRNATEENIVHEAKQNSYFMETIRGIQSVKLFDKHYQRHGTWMSLFVNTVNTKLTTDKLSALFEFSNKLLFSMENVIIIYLGASAILDGSFTVGVLMAFLAYKGQFESRTASLVDQYIQIKMLGLHAERLADITLNETETEIIKYNHIPKLDNEQLVLKVENVSFRYADNEPYLFENINLEFKDNEAVVLTGQSGRGKSTLLNILTGSLKPETGTVSINGHDIYQVSPSFIRGLSGIVRQDDVLFAGSIGENISFFDESPNMELIEQCAKMAQIHDDILKMPMGYETLIGDMGNILSGGQKQRVILARALYKRPKILFLDEASSHLDVENEQKINHNLKSLGIMKIMVAHRQETIQSADKILNLG

SEQ ID NO: 30075 - protein, 346 aa, Neisseria meningitidis; identical to SEQ ID NO: 15897

SEQ ID NO: 30076 - protein, 421 aa, Neisseria meningitidis; identical to SEQ ID NO: 7830

SEQ ID NO: 30077 - protein, 333 aa, Neisseria meningitidis; identical to SEQ ID NO: 7831

SEQ ID NO: 30078 - protein, 454 aa, Neisseria meningitidis
MSSPSNTNRQTSSRLTYILTVAGATVGFGATWRFPYLVGENGGGAYVFLFCIAMLVIGIPMILVENVIGRRKGVNALDAFGGSMNGKPVAKIWKLVGWAGLLGAFGIMAYYMVLGGWVISYIVNIIGGNLDISSPVDGMVTKNFFTEHIENSPWEIAFYTLLFVAVNQWILVKGVIGGIEKAAKLMPLLFLFLIAMVVRNVTLPGAMEGVAFYLKPDFSKITAELFVFVLGQVFFALSLGFGVMITLSSYLDKNENLVQTAVITAITNTIIAILAGFMIFPSLFSFGVAPDSGPTLVFQSLPIVFSHMWAGSVFAVIFFSLLLIAALTTSLTIYEVLITTIQEKTKIRRTAAITIVLAAIFIFGNIPSILSYGPWKDVSVFGKNIFDAFDYISGNILFMLTALGSALFVGFVMKDEAKEELLYKGNHTTVNIWFAYVKYLVPLVILLIFISNLF

SEQ ID NO: 30079 - protein, 241 aa, Neisseria meningitidis
MNRPKQPFFRPEVAVARQTSLTGKVILTRPLSFSLWTTFASISALLIILFLIFGNYTRKTTAEGQILPASGVIRVYAPDTGTITAKFVEDGEKVKAGDKLFALSTLRFGAGGSVQQQLKTEAVLKKTLAEQELGRLKLIHGNETRSLKATVERLENQKLHISQQIDGQKRRIRLAEAVAKTALGRQELSGLGMVSSDLAKSNEPVYLVKIKPDKSTITAYGEEKPLQIGMTLEADILHEKR

SEQ ID NO: 30080 - protein, 1043 aa, Neisseria meningitidis
MNKTWKRQVFRHTALYTAILMFSHTGGGGGQAQTHKYAIVMNAQNLPEVKWGQDYRKLAQKSNERQFTHTTNFYTKKNVSLSFNNTDEVVAKKNGTVVFGAATYLPPYGKVSGFDDKRLKERGNAVNWIHTTDPGLVGYSYEDVTCNSGNCPEVSYKTQFIFDNHQLAKKKTDSKLDIYEDKSRDNSPIYKLQDYPWLGVSFNLGGESSFKPKRQGSLVSSFSEDVTQQNGTQDQYKGKNLVYTTEDYNNQGNRNHQDKHHAIAFYLNAKLHLLDKKGIKDITDKTVQLGVLKPRIDLTEAWKNRHGSFFGNGNWTFEDKGAVSVKLILPEVKAGRCINKPNPNPKAQALSPALTAPALWFGPVQNGKMEMYSASVSTYPDSSSSRIFLQNLKRKNDPNKPGRYSLADLSASEIKSKEPTFTGRQTVIRLDKGVHQIKLKGNEVEGFKGNNGNDTFGIVSEGSFMPDDSEWKKVLLPWTVRAFNDDGQFNTVNKEENNGKPKYSQKYRSRNNGKHERNLGDIVNSPIVAVGEYLATSANDGMVHIFKKSGGDDRNYSLKLSYIPGTMPRKDIQSQDSTLAKELRAFAEKSYVGDRYGVDGGFVLRQVEWKGQNRVFMFGAMGFGGRGAYALDLTKAENGDPTAVSLFDVKHDNNGKNSNNSVQLGYTVGTPQIGKTHNGKYAAFLASGYATKDINNGDNKTALYVYDLESNNGTPIAKIEVPNGKGGLSSPTLVDKDLDGTVDIAYAGDRGGSMYRFDLSGNNPTSWSARAIFSGNKPITSAPAISQLKDKRVVIFGTGSDLSEEDVDSKEIQHVYGIFDNETDTGTAKDGQGNGLLEQVLSEENKTLFLTDYKRSDGSGSKGWVVKLKEGQRVTVKPTVVLRTAFVTIRKYNDGGCGAETAILGINTADGGKLTKKSARPIVPDTNTAVAQYSGHKKGTNGKSIPIGCMQKGNEIVCPNGYVYDKPVNVRYLDEKKTDGFSTTADGDAGGSGIDPAGKRAGKNNRCFSQKGVRTLLMNDLDSLDITGPMCGMKRISWREVFY

SEQ ID NO: 30081 - protein, 289 aa, Neisseria meningitidis; identical to SEQ ID NO: 6858

SEQ ID NO: 30082 - protein, 157 aa, Neisseria meningitidis; identical to SEQ ID NO: 2384

SEQ ID NO: 30083 - protein, 320 aa, Neisseria meningitidis
MNPAMIERLKAVENQAEAMGRGARSAYLKQQAQELGISLATLYRKLEAVSIKPTRKRRSDAGKTELKTEEAKLISAVLVEAMRRNGKRLMSVRQAVEMLRANGKIEAARIDGETGEVIPSVRTAFRPLARHRPHRPVMAHPRRRHEDQTPLYRPTVGLGGRNTPRAAHTDRRQHPPFPRHPPTAQTPPHPDHISIKFAHNAIRRLGYDGSTPGKSKHTMHGFRHLFTNISLTAGKDTLTTDLALGHISRAALQRAGFSSLHHYTADSYRLQERRELAEWYSRRHRQAYEAAAKTPQNKKPPEKNSDGILPKTLAIKPKRY

SEQ ID NO: 30084 - protein, 675 aa, Neisseria meningitidis
MLPTQPNPTQPNPTQASDTAGANTEAIYTSDGITANSTQLEQLKKLFPACFDADGNFLIDRLQAEIAPQTDIGREFYEMNWLGKSYARLLRNLPPETLISEDKTHNAKPENAGSQNLLIRGDNLEVLKHLKNAYTNSVKMIYIDPPNTGSDGFVYQDDRKFTPAELARLANIDEDEAARILDFTDKGSNSHSAWLTFMYPRLYVARELLKDDGVIFISIDDNEAAQLKLLCDEVFGEGNFVAQLPWRKRTAKSDVPFGISQDYEWIFVFAKSCQFIAATKGKERRYYETDDFPDRPWRTHDLTKQTTAAERPNSFFTMVDPKTGKKYPANPNATWRVTKDTFQDYYNKGKIVFPDDYDFLNISNPVMRYFKDDDMKKAGEDFGKVAVSSRLPENVGTLADAVAEYLAIFSRTLPENIGMTKEGTKEITDLFGSKIFTFPKPSQLIKFLVSISSKSNDLILDFFAGSGTTAHAVMQLNAEGQNGNRRYICVQLPEKTAEKSEARKAGYPTIFDITKARIEKAAAKIRVEHPDYTGDSGFKIFQTADNFRQHPDKDFSPEQPDLPLNDELSEEQLQTLLTTWTLYDGAALTTPVEPVRLGAYTAYLCEKRLYLMNAGFTSADLLAFIRKLDDDADFNPNRVIVFGSNMASAMQHELDQAVRGYANKKEIELNVVIRV

SEQ ID NO: 30085 - protein, 700 aa, Neisseria meningitidis; identical to SEQ ID NO: 22264

SEQ ID NO: 30086 - protein, 508 aa, Neisseria meningitidis
MDYPPLKGAALAWITLSLGLAVFMEVLDTTIANVAVPVIAGNLGAATTQGTWVITSFAVANAVSVPLTGFLAKRIGEVKLFTAAAVGFVITSWLCGIAPNLQSLVVFRILQGFIAGPLIPLSQSLLMASYPPAKRTLALALWAMTVVVAPVLGPILGGWISGNWHWGWIFFINIPIGIISAWITWKHLKCRETETVKMPTDYVGLTLMVVGIGALQMMLDRGKELDWFASGEIITLGVVALVCLSYFIVWELGEKYPIVDLSLFKDRNFTVGVIATSLGFMVYMGTLTLLPLVLQTNLGYTSTWAGLAAAPVGILPVFLSPLIGRFGNKIDMRLLVTASFLTFAFTFYWRTDFYADMDIGNVIWPQFWQGAGVAMFFLPLTTITLSHMKGGQIAAAGSLSNFLRVLMGGVGVSVVSTLWERREALHHTRFAEHITPYSATLHETAAHLSQHGVSDIQTLGIINNTITQQGFIIGSNEIFMAGSLLFIIMIPVIWLAKPPFHNGGGGGH

SEQ ID NO: 30087 - protein, 209 aa, Neisseria meningitidis; identical to SEQ ID NO: 7848

SEQ ID NO: 30088 - protein, 380 aa, Neisseria meningitidis; identical to SEQ ID NO: 314

SEQ ID NO: 30089 - protein, 291 aa, Neisseria meningitidis
MNYAKEINALNNSLSDLKGDINVSFEFFPPKNEQMETMLWDSIHRLQTLHPKFVSVTYGANSGERDRTHGIVKRIKQETGLEAAPHLTGIDASPDELRQIAKDYWDSGIRRIVALRGDEPPGYEKKPFYAEDLVKLLRSVADFDISVAAYPEVHPEAKSAQADLINLKRKIDAGANHVITQFFFDVERYLRFRDRCVMLGIDVEIVPGILPVTNFKQLGKMAQVTNVKIPSWLSQMYEGLDDDQGTRNLVAASIAIDMVKVLSREVKDFHFYTLNRSELTYAICHILGVRP

SEQ ID NO: 30090 - protein, 325 aa, Neisseria meningitidis
MQENPTVWLFDLDNTLHNADAGIFTLINRAMTRYMARRLKLSESAASDLRQDYWHRYGATLAGLQIHHPEIDIAEFLRESHPIDEVLTRLHGMPKTQNTLSRLKGRKAVFSNGPSFYVRAIVGALGLENRFDALFGTDDFGLLYKPNPQAYLNVCRLLDVPPECCIMVDDSADNLHQAKALGMKTVRFGAKVHDLPFIDASVSDMAQLARYAETLSEHRQNHYNTPQPPKIRKNVMRKTFLILMTAAALLSGCAWETYQDGNGKTAVRQKYPAGTPVYYQDGSYSKNMNYNQYRPERHAVLPNQTGNNADEEHRQHWQKPKFQNR

SEQ ID NO: 30091 - protein, 343 aa, Neisseria meningitidis; identical to SEQ ID NO: 7589

SEQ ID NO: 30092 - protein, 141 aa, Neisseria meningitidis; identical to SEQ ID NO: 7863

SEQ ID NO: 30093 - protein, 119 aa, Neisseria meningitidis; identical to SEQ ID NO: 7865

SEQ ID NO: 30094 - protein, 517 aa, Neisseria meningitidis
LIKSDIFALAPQIKNSHINSEILSVGNYIEWLRPTLNKLPSWQEHLYSGLDPFHYIEVTDNSHVIGQTISLDEFRLENSLWEPRWDSDVGELKTTNADIRFNTKSESLLVKEDYAGGARFRFAYGLKDKVPETPILTFEKNITGTSDIIFEGKALDNLKHLDGHQIIKVNGTADKHAFRLSGKHQKGIYTLSLQQRPEGFFTKVQERDDIAIYAQQAQAANTLFALRLNDKNSDIFDRTLPRKGLWLRVIDGHSNQWVQGKTAPVKGYRKGVQLGGEVFTWQNESNQLSVGLMGGQAEQRSTFRNPDTDNLTTGNVKGFGAGVYATWHQLQGKQTGAYADSWMQYQRFRHRINTEDATERFTSKGITASIEAGYNALLAEHVTKKGNSLRVYLQPQAQLTYLGVNGKFSDSENAHVNLLGSRQLQSRVGVQAKAQFSLYKNIAIEPFAAVNALYHNKPFGVEMDGERRVINNKTAIESQLGVAVKIKSHLTLQATFNRQTGKHHQTKQGALNLQWTF

SEQ ID NO: 30095 - protein, 106 aa, Neisseria meningitidis; identical to SEQ ID NO: 7868

SEQ ID NO: 30096 - protein, 124 aa, Neisseria meningitidis; identical to SEQ ID NO: 1868

SEQ ID NO: 30097 - protein, 127 aa, Neisseria meningitidis; identical to SEQ ID NO: 15907

SEQ ID NO: 30098 - protein, 78 aa, Neisseria meningitidis; identical to SEQ ID NO: 1011

SEQ ID NO: 30099 - protein, 63 aa, Neisseria meningitidis; identical to SEQ ID NO: 5865

SEQ ID NO: 30100 - protein, 66 aa, Neisseria meningitidis; identical to SEQ ID NO: 3905

SEQ ID NO: 30101 - protein, 96 aa, Neisseria meningitidis; identical to SEQ ID NO: 15909

SEQ ID NO: 30102 - protein, 160 aa, Neisseria meningitidis; identical to SEQ ID NO: 3906

SEQ ID NO: 30103 - protein, 119 aa, Neisseria meningitidis; identical to SEQ ID NO: 24070

SEQ ID NO: 30104 - protein, 80 aa, Neisseria meningitidis; identical to SEQ ID NO: 1154

SEQ ID NO: 30105 - protein, 67 aa, Neisseria meningitidis; identical to SEQ ID NO: 5222

SEQ ID NO: 30106 - protein, 68 aa, Neisseria meningitidis; identical to SEQ ID NO: 3911

SEQ ID NO: 30107 - protein, 64 aa, Neisseria meningitidis; identical to SEQ ID NO: 9896

SEQ ID NO: 30108 - protein, 142 aa, Neisseria meningitidis
MKWLLNMIMRPIKFSMVNTLLFIVICSSFFDLLVQLCTILFHSQKIYFITLFLLFIFNFVTKSIYMAIIYPILYFFTIKNIILTLGKFYYHHYLYILVLWTFTFFPYIQITLAMKRSLYIYTSLLLLIFSHFFLILFYLLST

SEQ ID NO: 30109 - protein, 264 aa, Neisseria meningitidis
MADILPSDKRRQPPKTKGNPMNIIEQETKRAELRKIDAEIAKIIADAHKINAESVKIAQESRWYPMIAATGLVTAIAAVLALIFKFAPQAPQGALSHEQNEQSRAIQPLPRMDYRARRRKPFHYPLPLSPPDCQNPQADRRRMPGQALPPFRKRHHPLRFYFFRRKTGRRSPICRRPYRNLPPGSQKNMRNKINRNDMELGYTPYNLRNRCKLIQAELAQIVGVKHYIQVGRWEAEPDTETRRADMPLEKWRQFLDWTEKTNAV

SEQ ID NO: 30110 - protein, 83 aa, Neisseria meningitidis; identical to SEQ ID NO: 15899

SEQ ID NO: 30111 - protein, 90 aa, Neisseria meningitidis; identical to SEQ ID NO: 1889

SEQ ID NO: 30112 - protein, 73 aa, Neisseria meningitidis; identical to SEQ ID NO: 1891

SEQ ID NO: 30113 - protein, 72 aa, Neisseria meningitidis; identical to SEQ ID NO: 202

SEQ ID NO: 30114 - protein, 97 aa, Neisseria meningitidis; identical to SEQ ID NO: 7898

SEQ ID NO: 30115 - protein, 65 aa, Neisseria meningitidis; identical to SEQ ID NO: 1894

SEQ ID NO: 30116 - protein, 219 aa, Neisseria meningitidis
MDRHFGRRRFLTVAAVAAAGAAVSFLPNPFAADGEKRNGDEKRNENVFFWKGVALGSGAELRLFGVDNRQAADLVNKVLAEVARLEKMFSLYREDSLISRLNRDGYLTSPSADFLELLSLCRDIHALTDGAFDPTVQALWKLYADYFAARPDAETPPPQNSVKEALKRVGFGKVSFDDREIRFAEKGMGLSLNGIAQGYSGLTKTSTSLPRLSSKRTIL

SEQ ID NO: 30117 - protein, 74 aa, Neisseria meningitidis; identical to SEQ ID NO: 3918

SEQ ID NO: 30118 - protein, 690 aa, Neisseria meningitidis; identical to SEQ ID NO: 24089

SEQ ID NO: 30119 - protein, 410 aa, Neisseria meningitidis; identical to SEQ ID NO: 20025

SEQ ID NO: 30120 - protein, 137 aa, Neisseria meningitidis; identical to SEQ ID NO: 3923

SEQ ID NO: 30121 - protein, 71 aa, Neisseria meningitidis; identical to SEQ ID NO: 3925

SEQ ID NO: 30122 - protein, 71 aa, Neisseria meningitidis; identical to SEQ ID NO: 3926

SEQ ID NO: 30123 - protein, 376 aa, Neisseria meningitidis
MKIVFITTVASSIYGFRAPVIKKLIGKNHQVYAFVSEFSDNELDIIREMGVTPVTYRSNRSGLNPFSDIKSTFLIFKELKKISPDLVFPYFAKPVIFGTFAAKLAGVPRIVGMLEGLGFAFTPQPEGIPLKTKIIKGILIALYHIALPMLESLIVLNPDDKDELTDKYGIKIKNIHILGGIGLDLRQYPYSEADIPDEKEPVKFLFIGRLLKEKGIDEFIRAAEQVKDKYPDTVFTALGAIDKSRGGGGDLERLIARDIIRFPGFVNNVSEVIKAHHIFVLPSYYREGVPRSTQEAMAVGRAVITTDVPGCRETVADKVNGFLIEPWNPRILAEKMIYFIENREAVRLMGNASYAIAKDKFDAEKVDLKLLDILKA

SEQ ID NO: 30124 - protein, 381 aa, Neisseria meningitidis
MPTMGAEMNTRNMRYILLTGLLPMASAFGETALQCAALTDNVTRLACYDRIFAAQLPSSAGQEGQESKAVLNLTETVRSSLDKGEAVIVVEKGRDALPADSAGETADIYTPLSLMYDLDKNDLRGLLGVREHNPMYLMPLWYNNSPNYAPGSPTRGTTVQEKFGQQKRAETKLQVSFKSKIAEDLFKTRADLWFGYTQRSDWQIYNQGRKSAPFRNTDYKPEIFLTQPVKADLPFGGRLRMLGAGFVHQSNGQSRPESRSWNRIYAMAGMEWGKLTVIPRVWVRAFDQSGDKNDNPDIADYMGYGDVNQYRLNDRQNVYSVLRYNPKTGYGAIEAAYTFPIKGKLKGVVRGFHGYGESLIDYNHKQNGIGIGLMFNDLDGI

SEQ ID NO: 30125 - protein, 132 aa, Neisseria meningitidis; identical to SEQ ID NO: 18005

SEQ ID NO: 30126 - protein, 357 aa, Neisseria meningitidis; identical to SEQ ID NO: 15940

SEQ ID NO: 30127 - protein, 132 aa, Neisseria meningitidis
MANRFRQRKSAYRRLSGKPLFSDGIAANLCGGRKTLSYNLSRFKISIRSEMQKISFNLLKPATPIGKRRPGLNGAPHIPMPSPRYLPASPEMPSNNIHPAKIRNNTPGGRQSQTAPQSIRHQKNKPPPRASS

SEQ ID NO: 30128 - protein, 218 aa, Neisseria meningitidis; identical to SEQ ID NO: 3932

SEQ ID NO: 30129 - protein, 373 aa, Neisseria meningitidis
MDLSIVVPIYNVESYLEACLNSIEPILSNENVELILVNDGSKDGSEDICYKYIDNNKQQTTNNKQQTTNNKQQTTNNKQQTTNNKQQTTNNKQQTTNNKQQTTNNKHRTPNIKYIYQDNQGLSEARNTGIKNSNGKYIVFIDSDDFINCQVLLDFLSKDDIDMPDVVFLNAVKYDKGSVSYFGEDYQPEKILNQSKVEVLKGLCRFRKFPGSAWNKIIKRELIIKEKLFFEKGIYSEDVEWSMRLFNAATTFSYLDGCYYYYRQGREDSITGTVSEKSIKSLLYILEKNAEMEFNRDISSYLYSFLSYEYLVLLFIMTSKNIACDADIKRRAYHLRFMLLKSNKLIYKLIFPIITLFGVDITGRILKAIRGNI

SEQ ID NO: 30130 - protein, 385 aa, Neisseria meningitidis
MKRQALAAMIASLFALAACGGEPAAQAPAASAEAASSAAQTAAETPTGELPVIDAVTTHAPEVPPAIDRDYPAKVRVKMETVEKLTMEDGVEYRYWTFDGDVPGRMIRVREGDTVEVEFSNNPSSTVPHNVDFHAATGQGGGAAATFTAPGRTSTFSFKALQPGLYIYHCAVAPVGMHIANGMYGLILVEPKEGLPKVDKEFYIVQGDFYTKGKKGAQGLQPFDMDKAVAEQPEYVVFNGHVGAIAGDNALKAKAGETVRMYVGNGGPNLVSSFHVIGEIFDKVYVEGGKLINENVQSTIVPAGGSAIVEFKVDIPGSYTLVDHSIFRAFNKGALGQLKVEGAENPEIMTQKLSDTAYAGNGAAPAASAPAASAPAASASEKSVY

SEQ ID NO: 30131 - protein, 243 aa, Neisseria meningitidis; identical to SEQ ID NO: 20036

SEQ ID NO: 30132 - protein, 391 aa, Neisseria meningitidis
MDIQSKAKKLIEMIQTAPVEWKPLGEVASIGKGKQLNKSLLREKDKYPVINGGINPSGYWHEYNNEAGTIVISQGGASAGFVNWMDIPFFAGAHAYTIKANEDKLLQRFAYFFKNEANYIHAMSIRSSIPALAKSELQNLLIPIPPLETQQKIVKILDKFTELEATLEAELALRKRQYRYYRDFLLDFDNQIGGVADGYQCRLKDVVWKTLGEIAEYSKNRICSDKLNEHNYVGVDNLLQNREGKKLSGYVPSEGKMTEYIANDILIGNIRPYLKKIWQADCTGGTNGDVLVIRVTDEKVNPKYLYQVLADDKFFAFNMKHAKGAKMPRGSKAAIMQYKIPIPPLPEQEKIVAILDKFDTLTHSVSEGLPYEIALRRKQYEYYREQLLAFR

SEQ ID NO: 30133 - protein, 350 aa, Neisseria meningitidis; identical to SEQ ID NO: 7917

SEQ ID NO: 30134 - protein, 122 aa, Neisseria meningitidis; identical to SEQ ID NO: 15951

SEQ ID NO: 30135 - protein, 160 aa, Neisseria meningitidis
MFVNEKYPYAALFAGLVFLTLPFALAVHDAFALAFGRTGLLVSVSDGGFGWRGGWDGTVWFVFGVFAFLNVVVSAGLTKLAYKKMMRRHSRYTLFLSGVAACAAAAVAWIFELLLGSGALGGLGEAVLEYAFAVWLVAMLTLPKRLTRAPVQPVVFHRKK

SEQ ID NO: 30136 - protein, 382 aa, Neisseria meningitidis; identical to SEQ ID NO: 24107

SEQ ID NO: 30137 - protein, 180 aa, Neisseria meningitidis
MINHIEKYIGTISHGSKSDSGSQYKLNIAAIPSSPNRDLKTYITLGLSKHDLNYKSRFEILFVCSLKYDENQIFPFLRWLAETIIENKKILLRGEVVYLPRSIVDSTKMDALYVSAPFYFDDDFQVCYGEHYNIVFPLLVPLYKQEAELVEKKGWNAFEQFLLDNEVGNLSDMNRKPFVW

SEQ ID NO: 30138 - protein, 523 aa, Neisseria meningitidis
MAQIQMSANVKTINAVFAAMLVGTVGYFIYWGLGYTHYNYAALFIIATMFGVFMAFNIGGNDVANSFGTSVGAGTLTIPQALLIAAVFEVSGAVIAGGEVTNTIRKGIVDLKGVDFEPIQFVFIMMSALLAAALWLLFASKKGLPVSTTHSIIGGIVGSAVCMAVMNDAASGDLIRWGKLGGIGVSWVLSPVLGGAVSYFLFSRVKKNVLDYNAWAEGTLKGIKQKKAYKERHRLFFEGLSEAEKVEYATKMAHDAQIYDEPEFDPQELQSEYYRGLYAFDNRKNNVDSYKALHSWIPFIASFGAMMISAMLIFKGLKNLHLGMSNVNSFLTIFMIGAAVWMGTFVFAKSLKRKDLGKSTFQMFSWMQVFTACGFAFSHGANDIANAIGPFAAIMDVLRTNSVAAQNVVPPIAMLTFGIALIVGLWFVGKEVIKTVGTSLAEMHPASGFTAELSAASVVMGASLMGLPVSSTHILVGAVLGIGLVNRNANWKLMKPIGLAWVITLPAAAVLSVVCYLVLQAVF

SEQ ID NO: 30139 - protein, 121 aa, Neisseria meningitidis
MKPLKRHPALIGLSRDHHHSLSLCVRLLRTPEERHRDELEPHFAELETHFREEEAKFAPIWQNVPELKQRFEKDHARLRQMMASPEYGNAAWNTAFATTLRDHARFEERELFPAAEPFLPA

SEQ ID NO: 30140 - protein, 242 aa, Neisseria meningitidis; identical to SEQ ID NO: 6039

SEQ ID NO: 30141 - protein, 173 aa, Neisseria meningitidis; identical to SEQ ID NO: 6851

SEQ ID NO: 30142 - protein, 202 aa, Neisseria meningitidis
MRRTALLLLALAAGTSLAAGFSQDTPINTRYRETPEEAAAREFKEHTAKLPPLPDTHSDGWFDIYVDENYGKQPKILLDSLQIMPAPDGSIRYILNIRSDKGYDNLTAEGIFCARFSIRFGNGKPSSYKVFGYGDTVNRRWIQPRNAEWKPIGGTLSRNDALRTVLYQAFCEGGVPADTKGLVQRLKERAGRYAPSIKPHNK

SEQ ID NO: 30143 - protein, 371 aa, Neisseria meningitidis
MVAVATAGVADKIGASALNNVSDKQWINNLTVNLANAGSAALINTAVNGGSLKDNLEANILAALVNTAHGEAASKIKQLDQHYIAHKIAHAIAGCAAAAANKGKCQDGAIGAAVGEILGETLLDGRDPGSLNVKDRAKIIAKAKLAAGAVAALSKGDVSTAANAAAVAVENNSLNDIQDRLLSGNYALCMSAGGAESFCESYRPLGLPHFVSVSGEMKLPNKFGNRMVNGKLIINTRNGNVYFSVGKIWSTVKSTKSNISGVSVGWVLNVSPNDYLKEASMNDFRNSNQNKAYAEMISQTLVGESVGGSLCLTRACFSVSSTISKSKSPFKDSKIIGEIGLGSGVAAGVEKTIYIGNIKDIDKFISANIKK

SEQ ID NO: 30144 - protein, 2513 aa, Neisseria meningitidis
MNKTLYRVIFNRKRGAVVAVAETTKREGKSCADSDSGSAHVKSVPFGTTHAPVCRSNIFSFSLLGFSLCLAVGTANIAFADGIIADKAAPKTQQATILQTGNGIPQVNIQTPTSAGVSVNQYAQFDVGNRGAILNNSRSNTQTQLGGWIQGNPWLARGEARVVVNQINSSHSSQMNGYIEVGGRRAEVVIANPAGIAVNGGGFINASRATLTTGQPQYQAGDLSGFKIRQGNVVIAGHGLDARDTDFTRILSYHSKIDAPVWGQDVRVVAGQNDVVATGNAHSPILNNAAANTSNNTANNGTHIPLFAIDTGKLGGMYANKITLISTAEQAGIRNQGQLFASSGNVAIDANGRLVNSGTMAAANAKDTDNTAEHKVNIRSQGVENSGTAVSQQGTQIHSQSIQNTGTLLSSGEILIHNSGSLKNETSGTIEAARLAIDTDTLNNQGKLSQTGSQKLHIDAQGKMDNRGRMGLQDTAPTASNGSSNQTGNSYNASFHSSTTTPTTATGTGTATVSISNITAPTFADGTIRTHGALDNSGSIIANGQTDVSAQQGLNNAGQIDIHQLNAKGSAFDNHNGTIISDAVHIQAGSLNNQNGNITTRQQLEIETDQLDNAHGKLLSAEIADLAVSGSLNNQNGEIATNQQLIIHDGQQSTAVIDNTNGTIQSGRDVAIQAKSLSNNGTLAADNKLDIALQDDYVERNIVAGNELSLSTRGSLKNSHTLQAGKRIRIKANNLDNAAQGNIQSGGTTDIGTQHNLTNRGLIDGQQTKIQAGQMNNIGTGRIYGDNIAIAATRLDNQDENGTGAAIAARENLNLGIGQLNNRENSLIYSGNDMAVGGALDTNGQATGKAQRIHNAGATIEAAGKMRLGVEKLHNTNEHLKTQLVETGREHIVDHEAFGRHELLREGTQHELGWSVYNDESDHLRTPDGAAHENWHKYDYEKVTQKTQVTQTAPAKIISGNDLTIDGKEVFNTDSQIIAGGNLIVQTEKDGLHNEQTFGEKKVFSENGKLHSYWREKHKGRDSTGHSEQNYTLPEEITRNISLGSFAYESHRKALSHHAPSQGTELPQSNGISLPYTSNSFTPLPSSSLYIINPVNKGYLVETDPRFANYRQWLGSDYMLDSLKLDPNNLHKRLGDGYYEQRLINEQIAELTGHRRLDGYQNDEEQFKALMDNGATAARSMNLSVGIALSAEQVAQLTSDIVWLVQKEVKLPDGGTQTVLVPQVYVRVKNGDIDGKGALLSGSNTQINVSGSLKNSGTIAGRNALIINTDTLDNIGGRIHAQKSAVTATQDINNIGGMLSAEQTLLLNAGNNINSQSTTASSQNTQGSSTYLDRMAGIYITGKEKGVLAAQAGKDINIIAGQISNQSEQGQTRLQAGRDINLDTVQTSKHQATHFDADNHVIRGSTNEVGSSIQTKGDVTLLSGNNLNAKAAEVSSANGTLAVSAKNDINISAGINTTHVDDASKHTGRSGGGNKLVITDKAQSHHETAQSSTFEGKQVVLQAGNDANILGSNVISDNGTQIQAGNHVRIGTTQTQSQSETYHQTQKSGLMSAGIGFTIGSKTNTQENQSQSNEHTGSTVGSLKGDTTIVAGKHYEQIGSTVSSPEGNNTIYAQSIDIQAAHNKLNSNTTQTYEQKGLTVAFSSPVTDLAQQAIAVAQSSKQVGQSKNDRVNAMAAANAGWQAYQTGKSAQNLANGTTNAKQVSISITYGEQQNRQTTQVQANQAQASQIQAGGKTTLIATGAAEQSNINIAGSDVAGKAGTILIADNDITLQSAEQSNTERGQNKSAGWNAGAAVSFGQGGWSLGVTAGGNVGKGYGNGDSITHRHSHIGDKGSQTLIQSGGDTTIKGAQVRGKGVQVNAKNLSIQSVQDRETYQSKQQNASAQVTVGYGFSAGGDYSQSKIRADHVSVTEQSGIYAGEDGYQIKVGNHTDLKGGIITSTQSAEDKGKNRFQTATLTHSDIKNHSQYKGESFGLGASASISGKTLGQGAQNKPQNKHLTSVADKNSASSSVGYGSDSDSQSSITKSGINTRNIQITDEAAQIRLTGKTAAQTKADIDTNVTTDTAERHSGSLKNTFNKEAVQSELDLQRTVSQDFSKNVQQANTEINQHLDKLKADKEAAETAAAEALANGDMETAKRKAHEAQDAAAKADNWQQGKVILNMLASGLAAPTQSGAGIAAATASPAVSYAIGQHFKDLAGQNANGKLTASQETAHVLAHAVLGAAVAAVGDNNALAGALSAGGSEAAAPYISKWLYGKEKGSDLTAEEKETVTAITNVLGTATGAAVGNSATDAAQGSLNAQSAVENNDTVEQVKFALRHPRIAIAIGSVHKDPGSTLEPNISTIASTFQLNLFPNSEFGGEGGVGNAFRHVLWQATITREFGKDIAVKVGNSHESGEKINYSIRRNLSLDKADEMIDQLNNEIGREIALNTNRLNTKELVGLILETYKNNGFYQAERNSNGNYDVVRKRLSEKDYQNTSNILIHLDNTGAGFKIQQRRKQIRAQISARQWRR

SEQ ID NO: 30145 - protein, 137 aa, Neisseria meningitidis
MKTSTVVFGGFFMADNGERIQIPVLENPDIREINHFFVSNFEKKAGVLVFRIIPEPEFGDTELTIYFEKGYYLPMIQTILEDGDIEVKNLKTENYSGKAREILGDSYPIEHISKNISTIQNIISEFMIQKQTPAPII

SEQ ID NO: 30146 - protein, 335 aa, Neisseria meningitidis
LQPLVSVLICAYNAEKYFAQSLAAVVNQTWRNLEILIVDDGSTDGTPSIARRFQEQDGRIRIISNPRNLGFIASLNIGLDELVKSGGNIARTDADDIAAPGWIEKIVGEMEKDADIAAMGSYLEILAEENNKSVLAAIARNGEIWKNPLTHQEITSAFPLRNPIHNNTMIMRRSVIDGGLRFDPAYIHAEDYKFWYEAGKLGRLANYPEALVKYRFHQDQTSSKHNLQQRKTAWKIKEEIRAGYWKAAGITVGSDCLNYGLLKSTAYALHEKALSGQDIGYLRLFLYEYFLSLEKYSLTDLLDFLTDRVMRKLFAAPQYRKILKKMLRPWKYRGY

SEQ ID NO: 30147 - protein, 170 aa, Neisseria meningitidis; identical to SEQ ID NO: 9874

SEQ ID NO: 30148 - protein, 100 aa, Neisseria meningitidis; identical to SEQ ID NO: 2893

SEQ ID NO: 30149 - protein, 167 aa, Neisseria meningitidis
MKLEASKQKFKKSFIISLFFSILYTSPLLAVDYVYDNSKLTNEQIDRLKKLRDKSSEYWKQETYLLKPTNGSSQNSLKVPALYSKTHQFKNINNSKKISFYDKEYTEDYLVGFARGFGVEKRNGEEEKTLQQYFKDCVNTGNSNNDKCEQPSFENSGPRLGRVLNLT

SEQ ID NO: 30150 - protein, 696 aa, Neisseria meningitidis
MTLKASKQASKQASKHGRVNLLTLSVLSLFCTPYVGSDAYDPVKEAEIKNKFILEAAEDRNSHVWRGPCSISFDCFGMFRAQLGSNTRSTKIGDDADFSFSDKPKPGTSHYFSSGKTDQNSSEYGYDEINIQGKNYNSGILAVDNMPVVKKYITDTYGDNLKDAVKKQLQDLYKTRPEAWAENKKRTEEAYIEQLGPKFSILKQKNPDLINKLVEDSVLTPHSNTSQTSLNNIFNKKLHVKIENKSHVAGQVLELTKMTLKDSLWEPRRHSDIHMLETSDNARIRLNTKDEKLTVHKAYQGGADFLFGYDVRESDEPALTFEDKVSGQSGVVLERRPENLKTLDGRKLIAAEKADPNSFAFKQNYRQGLYELLLKQCEGGFCLGVQRLAIPEAEAVLYAQQAYAANTLFGLRAADRGDDVYAADPSRQKLWLRFIGGRSHQNIRGGAAADGRRKGVQIGGEVFVRQNEGSRLAIGVMGGRAGQHASVNGKGGAAGSYLHGYGGGVYAAWHQLRDKQTGAYLDGWLQYQRFKHRINDENRVERYKTKGWTASVEGGYNALVAEGVVGKGNNVRFYLQPQAQFTYLGVNGGFTDSEGTAVGLLGSGQWQSRAGIRAKTRFALRNGVNLQPFAAFNVLHRSKSFGVEMDGEKQTLAGRTALEGRFGIEAGWKGHMSARIGYGKRTDGDKEAALSLKWLF

SEQ ID NO: 30151 - protein, 896 aa, Neisseria meningitidis
MSDNRLDTARHHSLFLARQLDNGKLKPEIFLPMLDKVLTEADFQAFADWDKIRAEENEEELARQLRELRRYVVSQIIVRDINRISDLNEVTRTITLFADFAVNTALDFAYAYYRDMYGTPIGRYTKSPQHLSVVAMGKAGGYELNVSSDIDLIFVYPESGDTDGRRERGNQEFFTKVGQKLIALLNDITADGQVFRVDMRLRPDGDSGALVLSETALEQYLITQGREWERYAWCKGRVVTPYPNDIKALVRPFVFRKYLDYGAYEAMRKLHRQIRSEVSKKGMADNIKLGAGGIREVEFIAQIFQMIRGGQMRALQLKGTQETLKKLAETGIMPSENVETLLAAYRFLRDVEHRLQYWDDQQTQTLPTSPEQRQLLAESMGFDSYAAFSDDLNVHRNKVNQLFNEILSEPEEQTQSNSEWQWTWQEKPDEEERLGRLKEYGFDAETIATRLDQIRNGHKYRHLSAHAQPRFDAIVPLFVQAAAEQNNPTDTLMRLLDFLENISRRSAYLAFLNEHPQTLAQLAQIMGQSSWVAAYLNKYPILLDELISAQLLDTAFDWQALAAALSDDLKACGGDTEAQMDTLRRFQHAQVFRLAVQDLAGLWTVESLSDQLSALADTILAAALLCAWADMPKKHRDTPQFAVVGYGKLGGKELGYASDLDLVYLYDDPHPDAGDVYSRLARRLTNWLSAATGAGSLYETDLRLRPNGDAGFLAHSIAAFEKYQRENAWTWEHQSLTRARFICGTPEIQTAFDRIRTEILTAERDQTALSGEIIEMREKMFPTHPPADSNVKYARGGVVDVEFIVQYLILAHARQYPQLLDNYGNIALLNISADCGLIDKTLAGQSRTAYRFYRRQQHNTKLRDAAKTEVSDELLSHYGNVRKLWREVFGEEAATA

SEQ ID NO: 30152 - protein, 469 aa, Neisseria meningitidis
MKYISTRGETAHKPFSEVLLMGLAPDGGLMLPEHYPQIGREALDKWRGLAYPELAFEIMRLFVTDIPEDDLRDILNRTYTEAAFGTKEITPVRTLSDGIKIQALSNGPTLAFKDMAMQFLGNAFEYVLNKEGKKLNILGATSGDTGSAAEYALRGKKGVNVFMLSPDGKMSAFQRAQMYSLQDGNIHNIAVKGMFDDCQDIVKAVQNDAAFKEKYHIGTVNSINWGRIVAQVVYYFAGYFKATQSNDEQVSFCVPSGNFGNVCAGHIAKQMGLPVRRLIVATNENDVLDEFFKTGAYRPRNSAHTYVTSSPSMDISKASNFERFVFDLMDRDPQEINTLWAEVAAGKGFDLRFALEKVGGKYGFTSGKSTHPDRLATIRQVYEQDQELIDPHTADGVKVAREVREEGETVVCLETALAAKFDATIREAVGDAAIPRPAALEGLENLPQRVQTVPNSADAVKGIIEQTLA

SEQ ID NO: 30153 - protein, 284 aa, Neisseria meningitidis; identical to SEQ ID NO: 17222

SEQ ID NO: 30154 - protein, 274 aa, Neisseria meningitidis
MDGAQPKTNFFERLIARLAREPDSAEDVLNLLRQAHEQEVFDADTLLRLEKVLDFSDLEVRDAMITRSRMNVLKENDSIERITAYVIDTAHSRFPVIGEDKDEVLGILHAKDLLKYMFNPEQFHLKSILRPAVFVPEGKSLNALLKEFREQRNHMAIVIDEYGGTSGLVTFEDIIEQIVGEIEDEFDEDDSADNIHAVSSERWRIHAATEIEDINTFFGTEYSSEEADTIGGLVIQELGHLPVRGEKVLIDGLQFTVARADNRRLHTLMATRVK

SEQ ID NO: 30155 - protein, 236 aa, Neisseria meningitidis; identical to SEQ ID NO: 2130

SEQ ID NO: 30156 - protein, 105 aa, Neisseria meningitidis
MSTFFRQTAQAMIAKHIDRFPLLKLDRVIDWQPIEQYLNRQKTRYLRDHRGRPAYPLLSMFKAVLLGQWHSLSDPELEHSLITRIDFNLFCRFDELSIPDYSIVD

SEQ ID NO: 30157 - protein, 354 aa, Neisseria meningitidis
MKAARFYDKGDIRIEYIPEPTVAPGTVGINVAWCGICGTDLHEFMEGPIFIPPCGHPHPISGESAPVTMGHEFSGVVYAVGEGVDDIKVGQHVVVEPYIVHDDVPTNPGSNYHLSKDMNFIGLGGCGGGLSEKIAVKRRWVHPISDKIPLDQAALIEPLSVGHHAYVRSGAKEGDVALVGGAGPIGLLLSAVLKAKGIKVIITELSKARKDKARESGVADYILDPSEVDVVEEVKKLTNGEGVDVAFECTSVNKVLDTLVEACKPAANLVIVSIWSHPATVNVHSVVMKELDVRGTIAYCNDHAETIKLVEEGKINLEPFITQRIKLDELVSEGFERLIHNNESAVKIIVSPNL

SEQ ID NO: 30158 - protein, 157 aa, Neisseria meningitidis
MSRNTEELQGISLLGNQKTRYPTGYAPEILEAFDNKHPDNDYFVKFVCPEFTSLCPMTGQPDFATIYIRYIPHIKMVESKSLKLYLFSFRNHGDFHEDCVNIIMKDLIALMDPKYIEVFGEFTPRGGIAIHPFANYGKAGTEFEALARKRLFEHDSQ

SEQ ID NO: 30159 - protein, 176 aa, Neisseria meningitidis
MQGFELEDLTLWLIRDAGEDQMWIDRWAVSYPVVQMSEVSAGQSIEEWQAGLQTAFERIQGRHIAVVAHGAGAAAFLAWLYRADILTREKIANIILVPQRPDIFSDDAEHTFRRVRCPCRAALVVSEHGGVPHGWAQKQADLWNARLLVSPHSGSLNGMLGGWQWGMKLMQEMLLA

SEQ ID NO: 30160 - protein, 242 aa, Neisseria meningitidis; identical to SEQ ID NO: 4670

SEQ ID NO: 30161 - protein, 336 aa, Neisseria meningitidis; identical to SEQ ID NO: 7100

SEQ ID NO: 30162 - protein, 485 aa, Neisseria meningitidis
MHKILPIAHVLSRLGMLFSFILLIPAALSYAFSDGAYTAFATTATVTLSGSYIVRLATLRFRRELRPRDGFTLVLMLWLAFAAMAAMPMYLYFPNMGFTDAFFESMSGLTTTGATVIPHVDGLAPSVNFWRHMLNWLGGMGIIVLAVAILPMLGVGGTQLFKAEIPGIDKESKMSPRISQVAKKLWFGYTLITILAAACLHFAGMGWFDAVCHAMATLSLGGFSTHDASIAYYNSPLIEAVIIVFTIVGGINFASHFSALNSRSLKTYWKDEECRTMLLLLSGSILTAALYLWHTGYYAGFTESLRYTAFNFVSIGLANGLANTDFAQWPLLISLWMFFLANILANSGSTGGGIKTIRALVLFKFSLREMMVLLHPKAVRTVKISGKAIPDRLALTVMSFIFIYFMTVVLFSFLLMASGMEFTTAFTAVIACITNAGPGLGEVGPAGNYAGLDVMQKWICVTAMLLGRLEIFTVFILFTPAYWKK

SEQ ID NO: 30163 - protein, 124 aa, Neisseria meningitidis
LAEGQKSAVTEYYLNHGEWPANNSSAGVASTPSDIKGKYVQKVEVAKGVITAQMASSNVNNEIKGKKLSLWAKRQDGSVKWFCGQPVTRTGTTTNNDEVTAASDKQIDTKHLPSTASTRKSTPN

SEQ ID NO: 30164 - protein, 162 aa, Neisseria meningitidis; identical to SEQ ID NO: 15210

SEQ ID NO: 30165 - protein, 130 aa, Neisseria meningitidis
MPTSTKPYILRALCEWCSDNSLTPHILVWVNEHTRVPMQYVRDNEIMLNIGATATQNLQIDNDWISFSARFGGQAHDIWIPVGHVLSLFARETGEGMGFELEAYRPDTSPENTSAETAPRPAKKGLKLVK

SEQ ID NO: 30166 - protein, 558 aa, Neisseria meningitidis
MSFKTDAEIAQSSTMRPIGEIAAKLGLNADNIEPYGHYKAKINPAEAFKLPQKQGRLILVTAINPTPAGEGKTTVTIGLADALRHIGKDSVIALREPSLGPVFGVKGGAAGGGYAQVLPMEDINLHFTGDFHAIGAANNLLAAMLDNHIYQGNELNIDPKRVLWRRVVDMNDRQLRNIIDGMGKPVDGVIRPDGFDITVASEVMAVFCLAKDISDLKERLGNILIAYAKDGSPVYAKDLKAHGAMAALLKDAIKPNLVQTIEGTPAFVHGGPFANIAHGCNSVTATRLAKHLADYAVTEAGFGADLGAEKFCDIKCRLADLKPDAAVVVATVRALKYNGGVERANLGEENLEALAKGLPNLLKHISNLKNVFGLPVVVALNRFVSDSDAELAMIEKACAEHGVEVSLTEVWGKGGVGGADLARKVVNAIENQPNNFNFSYDVELSIKDKIRAIAQKVYGAEDVDFSAEASAEIASLEKLGLDKMPVCMAKTQYSLSDNAKLLGCPEGFRIAVRGITVSAGAGFIVALCGNMMKMPGLPKVPAAEKIDVDEHGVIHGLF

SEQ ID NO: 30167 - protein, 1389 aa, Neisseria meningitidis
MTDTAPTDTDPTENGTRKMPSEHRPAPPAKKRRPLLKLSAALLSVLILAVCFLGWLAGTEAGLRFGLYQIPSWFGVNISSQNLKGTLLDGFDGDNWSIETEGEDLKISRFRFAWKPSELMRRSLHITEISAGDIAIVTKPTPPKEERPPLSLPDSIDLPAAVYLDRFETGKISMGKAFDKQTVYLERLDASYRYDRKGHRLDLKAADTPWSSSSGAASVGLKKPFALDTAIYTKGGLEGKTIHSTARLSGSLKDVRAELAIDGGNIRLSGKSVIHPFAESLDKTLEEVLVKGFNINPAAFVPSLPDAGLNFDLTAIPSFSDGIALEGSLDLENTKAGFADRNGIPVRQVLGGFVIRQDGTVHIGNTSAALLGRGGIRLSGKIDTEKDILDLNIGINSVGAEDVLQTAFKGRLDGSIGIGGTTASPKISWQLGIGTARTDGSLAIASDPANGQRKLVLDTVNIAAGQGSLTAQGCLELFKDRLLKLDIRSRAFDPSRIDPQLPAGNINGSINLAGELAKEKFTGKMRFLPGTFNGVPIAGSADIVYESRHLPRAAVDLRLGRNIIKTDGGFGKKGDRLNLNITAPDLSRFGFGLAGSLNVRGHLSGDLDGGIRTFETDLSGAARNLHIGKAADIRSLDFTLKGSPDTSRPIRADIKGSRLSLSGGAAVVDTADLMLDGTGVQHRIRTHAAMTLDGKPFKFDLDASGGINRELTRWKGSIGILDIGGAFNLKLQNRMTLEAGAERVAASAANWQAMGGSLNLQHFSWDKKTGISAKGGAHGLHIAELHNFFKPPFEHNLVLNGDWDVAYGRNARGYLNISRQSGDAVLPGGQALGLNAFSLKTRFQNDRIGILLDGGARFGRINADLDIGNAFGGNMANTPLGGRITASLPDLGALKPFLPAAAQNITGSLNAAAQIGGRVGSPSVNAAVNGSSNYGKINGNITVGQSNSFSTSPLGGKLNLTVADAEVFRNFLPVGQTVKGSLNAAVTLGGSIADPHLGGSINGDKLYYRNQTQGIILDNGSLRSHIAGRKWVIDSLKFRHEGTAELSGTVGMENSGPDVDIGAVFDKYRILSRPNRRLTVSGNTRLRYSPQKGISVTGMIKTDQGLFGSQKSSMPSVGDDVIVLGEVKKEAAAPLPVNMNLTLDLNDGIRFAGYGADVTIGGKLTLTAQSGGSVRGVGTVRVIKGRYKAYGQDLDITKGTVSFVGPLNDPNLNIRAERRLSPVGAGVEILGSLNSPRITLTANEPMSEKDKLSWLILNRAGSGSSGDNAALSAAAGALLAGQINDRIGLVDDLGFTSKRSRNAQTGELNPAEQVLTVGKQLTGKLYIGYEYSISSAEQSVKLIYRLTRAIQAVARIGSRSSGGELTYTIRFDRLFGSDKKDSAGNGKGK

SEQ ID NO: 30168 - protein, 279 aa, Neisseria meningitidis; identical to SEQ ID NO: 343

SEQ ID NO: 30169 - protein, 92 aa, Neisseria meningitidis; identical to SEQ ID NO: 510

SEQ ID NO: 30170 - protein, 161 aa, Neisseria meningitidis
MRFFGIGFLVLLFLEIMSIVWVADWLGGGWTLFLMAATFAAGVLMLRHTGLSGLLLAGAAMRNGGRVSVYQMLWPIRYTVAAVCLMSPGFVSSVLAVLLLLPFRGGAVLQAGGAENFFNMNQSGRKEGFSRDDDIIEGEYTVEEPYGGNRSRNAIEHKKDE

SEQ ID NO: 30171 - protein, 101 aa, Neisseria meningitidis
MIYSENKQSVIDGMLGMTFSSEEDEIPWISEKLTELSKHKDLDIARLSLTCFGHLARMHENIGDCDKVIALLLSKQGDPDFQGFAEDALDEISLFIFKKRP

SEQ ID NO: 30172 - protein, 259 aa, Neisseria meningitidis
MKEHKARKRFGQNFLQDTRIISDIVNAVRPQADDVVIEIGPGLAAITEPLAKKLNRLHVVEIDRDIVCRLKTLPFADKLVIHEGDVLQFDFNNIEGKKKIVGNLPYNISTPLLFKLAEVADDVVDMHFMLQKEVVERMVAAPKSNDYGRLGVMLQYFFDMEMLIDVPPESFDPAPKVDSAVVRMIPVKHRIGRADDFEHFAKLVKLAFHQRRKTIRNNLKELAGDDDLQAVGINPQDRAEHIAPEKYVALSNYLAGKAV

SEQ ID NO: 30173 - protein, 322 aa, Neisseria meningitidis
MTAKPFSLNLTNLLLLAVLFAVSLSVGVADFRWSDVFSLSDSQQVMFISRLPRTFAIVLTGASMAVAGMIMQILMRNRFVEPSMAGAGQSAALGLLLMSLLLPAAPLPVKMSVAAVAALIGMLVFMLLIRRLPPTAQLMVPLVGIIFGGVVEAVATFIAYENEMLQMLGVWQQGDFSSVLLGRYELLWITGGLAVFAYLIADRLTILGLGETVSVNLGLNRTAVLWSGLIIVALITSLVIVTVGNIPFIGLVVPNIISRLIGDRLRQSLPAVALLGASLVLLCDIIGRVIVFPFEIPVSTVFGVLGTALFLWLLLRKPAYAV

SEQ ID NO: 30174 - protein, 365 aa, Neisseria meningitidis; identical to SEQ ID NO: 11

SEQ ID NO: 30175 - protein, 299 aa, Neisseria meningitidis; identical to SEQ ID NO: 167

SEQ ID NO: 30176 - protein, 120 aa, Neisseria meningitidis; identical to SEQ ID NO: 19563

SEQ ID NO: 30177 - protein, 287 aa, Neisseria meningitidis
MRILLTGSKSQLARCLRDRLPEDWETIATDSASLDITDADAVCNMVKSFQPDAIVNTAAYTAVDKAEGDAAAAFAVNASAVYNLALAAHRAHARFIHISTDYVFDGKGKRPYQESDFTNPSNVYGQSKTAGELLALSANPDSLILRTSWLFSEYGNNFVRTMLNLARERSPLSAVHNQIGCPTYAGDLAAAIIRLLQQTSPVRGIYHYAGGKSVSWYEFVQHIFQAASQQQTSFPIPELTAVSDKEYPTAAPRPAYSILDCRKIENDFSIKPSDWQKALAQVVSKLL

SEQ ID NO: 30178 - protein, 243 aa, Neisseria meningitidis
LQDRTGQKVPSVVFRTRVGDTWKDVSTDDLFKGKKVVVFSLPGAFTPTCSSSHLPRYNELSGAFKENGVDAIYCVSVNDTFVMNAWAAEEESDNIYMIPDGNGEFTEGMGMLVGKEDLGFGKRSWRYSMLVNDGVVEKMFIEPEEPGDPFKVSDADTMLKFVAPDWKAQESVAIFTKPGCQFCAKAKQALQDKGLSYEEIVLGKDATVTSVRAITGKMTAPQVFIGGKYIGGSEDLEAYLAKN

SEQ ID NO: 30179 - protein, 480 aa, Neisseria meningitidis; identical to SEQ ID NO: 23574

SEQ ID NO: 30180 - protein, 294 aa, Neisseria meningitidis; identical to SEQ ID NO: 4254

SEQ ID NO: 30181 - protein, 366 aa, Neisseria meningitidis
MTRIAILGGGLSGRLTALQLAEQGYQIALFDKGCRRGEHAAAYVAAAMLAPAAEAVEATPEVVRLGRQSIPLWRGIRCRLNTHTMMQENGSLIVWHGQDKPLSNEFVRHLKRGGVADDEIIRWRADDIAKREPQLGRRFSDGIYLPTEGQLDGRQILSALADALDELNVPCHWEHECAPEDLQAQYDWLIDCRGYGAKTAWNQSPEHTSTLRGIRGEVARVYTPEITLNRPVRLLHPRYPLYIAPKENHVFVIGATQIESESQAPASVRSGLELLSALYAVHPAFGEADILEIATGLRPTLNHHNPEIRYNRARRLIEINGLFRHGFMISPAVTAAAVRLAVALFDGKDAPERDEESGLAYIRRQD

SEQ ID NO: 30182 - protein, 522 aa, Neisseria meningitidis; identical to SEQ ID NO: 968

SEQ ID NO: 30183 - protein, 181 aa, Neisseria meningitidis
MGKTVTLTAGHSNTDPGAVNGSDREADLAQDMRNIVASILRNDYGLTVKTDGTGKGNMPLREAVKLIRGSDVAIEFHTNAAVSKAATGIEALSTVKNKRWCQVLSKAVAKKTGWKLRGEDGFKPDNAGQHSRLAYAQAGGIVFEPFFISNDTDLALFKTTKWGICRAIADAIAMELGAARV

SEQ ID NO: 30184 - protein, 464 aa, Neisseria meningitidis
MTVKTRFAPSPTGYLHIGGVRTALFSWAFARHHKGEFLLRIEDTDLARSTAESVNIILDGMKWVGLYYDNADNVVYQTRRFDRYKEVIAELLEKGHAYYCYCSKEELEAMREKAEKEGTATYDRRWRPEEGKTLPEIPADVQPVVRFKTPLDGVTKWTDLVKGEISIPNEALDDLIIARADGTPTYNFCVVVDDYDMGVTHVIRGDDHVNNTPKQINILKAIGATLPEYGHLPMILNEQGKKISKRSGDTVAITDFGAMGILPEAMLNYLARLGWAHGDDEFFTMEQFIEWFDLKDVSPSPSRMDLKKLYWNNGEHIKITTNEKLAEMVKPRLALRDIHETSKPALEDVLALVKDRAQDLNALADECLYFYKKQVPAEADVAKHWDDEAAARMLRFAERLEGLEDWNTEAIHDLFKPFCDEEGIKMGKLGMPLRLAVCGTAKTPSVDAVLALIGKEEVLKRIRA

SEQ ID NO: 30185 - protein, 193 aa, Neisseria meningitidis; identical to SEQ ID NO: 1378

SEQ ID NO: 30186 - protein, 482 aa, Neisseria meningitidis
MKGDIGVIGLAVMGQNLILNMNDCGFKVVAYNRTIGKVDEFLNGAAKGTDIVGAYSLQDLVDKLAKPRKIMMMVRAGSVVDDFIEQLLPLLDEEDIIIDGGNANYPDTTRRTHYLAEKGILFVGAGVSGGEEGARHGPSIMPGGDKRAWEAVKPIFQAIAAKTPQGEPCCDWVGKDGAGHFVKMVHNGIEYGDMQLICEAYQFMKDGLGLSYDEMHRVFAEWNKTELDSYLIEITAAILGYKDEGGEPLVEKILDTAGQKGTGKWTGINALDLGIPLTLISEAVFARCVSSFKEQRVQTGKLFARTVTPVEGGKQEWVEALRQALLASKIISYAQGFMLIREAGESYGWDLDYGNTALLWREGCIIRSAFLGNIRDAYENNPDLVFLGADPYFKNILENCLPAWRKVVAKAVECGIPMPCMASAITFLDGYTTERLPANLLQAQRDYFGAHTYERTDKPRGEFFHTNWTGKGGDTASTTYDI

SEQ ID NO: 30187 - protein, 403 aa, Neisseria meningitidis
MNQLKLAVSGAQILFVAFGAMVLVPLLTGLNPALALLGAGLGTLLFQITTKRKVPIFLGSSFAFIAPIIYSVGEWGLPSTMFGLFAAGFMYFVFAALIRWRGLAAVHKLLPPVVIGPVIMVIGLSVAVAASSMAMGQADGKQVIDYTDSLILSGFTFAVTAIVSVFGSRMMKLIPILIGVASGYVLALLMGLVDTASIAHAPWFAVPHFETPQINWQAALFMLPVAVAPAIEHIGGIMAIGNVTGKDYTKDPGLDKTLAGDGLGVCVAGLIGGPPVTTYGEVTGAVMITKNSNPVIMTWAAVFAVCMAFFGKFNAFLASIPMPVMGGIMLLLFGTIASLGVKTLIDAKVDLMLPKNLVIVSSVLTTGIGGMTLKLSSFSFAGVGLCAVLAIMLNSLLPDPKES

SEQ ID NO: 30188 - protein, 196 aa, Neisseria meningitidis; identical to SEQ ID NO: 5310

SEQ ID NO: 30189 - protein, 149 aa, Neisseria meningitidis; identical to SEQ ID NO: 4552

SEQ ID NO: 30190 - protein, 178 aa, Neisseria meningitidis; identical to SEQ ID NO: 1831

SEQ ID NO: 30191 - protein, 210 aa, Neisseria meningitidis; identical to SEQ ID NO: 5679

SEQ ID NO: 30192 - protein, 262 aa, Neisseria meningitidis
MLTLYGETFPSRLLLGTAAYPTPEILKQSVRIAQPAMITVSLRRTGSGGEAHGQGFWSLLQETGVPVLPNTAGCQSVQEAVTTAQMAREVFETDWIKLELIGDDDTLQPDVFQLVEAAEILIKDGFKVLPYCTEDLIACRRLLDVGCQALMPWAAPIGTGLGAVHAYALNVLRERLPDTPLIIDAGLGLPSQAAQVMEWGFDGVLLNTAVSRSGDPVNMARAFALAVESGRLAFEAEPVEARDKAQASTPTVGQPFWHSAEY

SEQ ID NO: 30193 - protein, 539 aa, Neisseria meningitidis
MDNLVWDGIPDIRTLDQTIRKHAHPLNLIVCLPDNQIPDFQTAQDASDAECRLKHRLDQATQCLQFDSINLIEHILPDVRFWLVPPSRTRRLHEHFHHISWQTEAILQTESKPDKPWFALPQTSERQKPEHVLVIGAGIAGASTAHALASHGISVTVLETRKAAQAASGNRQGLLYAKISPHDTEQTELLLAGYGYTKRLLGHILPESETWGGNGIIHLNYSRIEQQRNHELGLQKHHNHLYRSITSAEAEKIAGIPLSVPYDHPSCGLYWQHGVWLNPPAFVRALLNHPLIGLHEDTPLTDISHDGEKWIASTPNGIFSATHIIYCTGAHSSCLPETNLAALPLRQIRGQTGLTPSTPFSEQLRCAVSGESYISPSWHGLHCYGASFIPNSSHTGWNEAEEASNRQALAQLSPALAESLFAANPIPQKHQGHAAMRCDSPDHLPLVGALGDIAAMQQTYAKLALDKNYRIDAPCPYLPNAYANTAHGTRGLATAPICAAAVAAEILGLPHPLSKRLRHALHPNRTIIRAIVRRKDLTP

SEQ ID NO: 30194 - protein, 556 aa, Neisseria meningitidis
MKKIWLDSYEKGVSAEIDITQYGSVSDVFCQSVKKFAGQPAFQNMGKTLTYAETGKLATDFASYLQNVLKLPRGERVAIMLPNVLQYPVALFGILQAGLVAVNTNPLYTPRELEHQLKDSGATAIIVLENFANTLELVLPRTQIKHVIIASVGEMFGLLKGSLINFIIRKIKKMVPEYRIRETISFQTALKEGAKHVFQPVALNREDTALLQYTGGTTGVAKGAVLSHGNICANMLQAKEWIKNQLREGKETVIAALPLYHIFALTVNLMIFANAGSKIVLITNPRDMKGFIGELKKQRVNVFIGVNTLFNAMVNRPDFAEVDFSGLRLTLGGGMATQKAVAEKWKKITDTPIVEAYGLTEASPGVCCNPLNIESYSGSIGLPVSSTEVELRDANGKEVPVGQPGELWVKGPQVMQGYWNRPEETAKAIDARGFLETGDIAVMDEKGWLKLVDRKKDLVVVSGFNVYPNEIEEVIAHHGKVMEVACIGVPDEKTGEALKVFVVKKDPSLTKEELIAFCRTELTAYKVPKNIEFRDELPKSNVGKILRRELRQSTGK

SEQ ID NO: 30195 - protein, 421 aa, Neisseria meningitidis; identical to SEQ ID NO: 3461

SEQ ID NO: 30196 - protein, 146 aa, Neisseria meningitidis
VRAFQTALRPSRILNILTVSLHAASLAVCLTWFYGRMMWFGLAALVASYAYSLRITNLKHRHAITAITIDRDGQAEIVSGKDKTAATLAGSSMVTPYALFLQWDTGGKTVRHCITPDMADKESYRRLKVWVLWRQPKKTAETDTPS

SEQ ID NO: 30197 - protein, 464 aa, Neisseria meningitidis
MLEFPGNTFGLAMNLERDSVGAVVLGEYEHIKEGDTVTCTGRILEVPVGRELVGRVVDALGRPIDGKGPINTTLTAPIEKIAPGVIARKSVDQPMQTGLKAIDSMVPVGRGQRELIIGDRQTGKTAVALDAIVNQKGTGVICIYVAIGQKASSIANVVRKLEEHGAMEHTIVVAATASEAAALQYIAPYSGCTMGEFFRDRGEDALIVYDDLSKQAVAYRQISLLLRRPPGREAYPGDVFYLHSRLLERAARVNEHEVEKLTNGEVKGKTGSLTALPIIETQAGDVSAFVPTNVISITDGQIFLETDLFNAGIRPAINAGISVSRVGGAAQTKVIKKLGGGIRLALAQYRELAAFSQFASDLDEATRKQLEHGEVVTELMKQKQFSTLNTAEMALTLWAINNGSYSDVPVAKALAFESEFLSFVRTQHPEVLEAVNASGAMSDESEKTLEAAMKSFKSSYAYQA

SEQ ID NO: 30198 - protein, 195 aa, Neisseria meningitidis; identical to SEQ ID NO: 4477

SEQ ID NO: 30199 - protein, 124 aa, Neisseria meningitidis
MSTFFRQTAQAMIAKHIDRFPLLKLDQVIDWQPIEQYLNRQKNRYLRDHRGRPAYPLLSMFKAVLPGQWHSLSDPELEHSLITRIDFNLFCRFDELIIPDYSTLCRYRKLAGARRHPVRITQTD

SEQ ID NO: 30200 - protein, 118 aa, Neisseria meningitidis; identical to SEQ ID NO: 2492

SEQ ID NO: 30201 - protein, 256 aa, Neisseria meningitidis
MNFTDTHCHLADPALRENLPHILTAARKVGVKRFIVPATCPQDWQSVAELSEMPSEHGQIRIALGIHPWFSDGIAEQDFAGLAAVLARYPGAWVGEIGLDFYDKTQTPQQRERQIQVFSRQLEIAQTLRRRVIIHNLKAAADIAAAVKQTGFTRGGIVHAFSGSAEEARVLTKLGFKIGIGSLLLNPNARKIRDTLKALNDGDFVLETDSPFMLKKEINTPANILRIAEIAAQIRGTGAADIAAITERNADSLLRP

SEQ ID NO: 30202 - protein, 268 aa, Neisseria meningitidis
MNMKKWIAAALACSALALSACGGQGKDAAAPAANPDKVYRVASNAEFAPFESLDSKGNVEGFDVDLMNAMAKAGNFKIEFKHQPWDSLFSALNNGDADVVMSGVTITDDRKQSMDFSDPYFEITQVVLVPKGKKISSSEDLKKMSKVGVVTGYTGDFSVSKLLGNDNPKIARFENVPLIIKELENGGLDSVVSDSAVIANYVKNNPTKGMDFVTLPDFTTEHYGIAVRKGDEATVKMLNDALKKVRESGEYDKIYAKYFAKEDGQAAK

SEQ ID NO: 30203 - protein, 548 aa, Neisseria meningitidis
MKHFHDLPAWPKLWNHFDDSKTLHMREMFEQDPQRAERYWLQVGGLTLDYSKNRINDETMSLLFELAREAGVPERMRQMFHGEKINTTENRAVLHVALRNRTNSPIVVDGEDVMPKVNRVLQRMGEFAHEVRSGSWLGYTNQVITDVVNIGIGGSDLGPLMMCTALKPFGHPRLNMHFVSNVDGSQLRDVLSKVHPETTLFIIASKTFTTQETLTNALTAREWFLNHAGDEEAVAKHFAAVSTNQKAVAEFGIDTANMFEFWDWVGGRYSLWSAIGLPIMLYLGEENFIEMLNGAHLMDQHFINTPLERNLPVILALIGIWYINYYGGGSHVIAPYDQHLHRLPKFIQQLDMESNGKQVTLDGKAVGHETSPIIWGETGINGQHAFFQLLHQGTHITPIDLIASLEKRSNLPGHHEILLANVFAQAEAFMRGKTPDEVRAELKAQGMDEARIEELVPHKTFSGNRPTNLILMDKVNPRNMGSLIAMYEHKTFVQGIIWGINSFDQWGVELGKQLAKTILGELTGETEPQKHDSSTERLINLYLQTNRK

SEQ ID NO: 30204 - protein, 160 aa, Neisseria meningitidis
MKYLNLAAITLAATFAAHTASADELAGWKDNTPQSLQSLKAPVRIVNLWATWCGPCRKEMPAMSKWYKAQKKGSVDMVGIALDTSDNIGNFLKQTPVSYPIWRYTEANSRNFMKSYGNNIGVLPFTVVEAPKCGYRQTITGEANEKSLTDAVKLAHSKCR

SEQ ID NO: 30205 - protein, 356 aa, Neisseria meningitidis; identical to SEQ ID NO: 19837

SEQ ID NO: 30206 - protein, 59 aa, Neisseria meningitidis; identical to SEQ ID NO: 642

SEQ ID NO: 30207 - protein, 151 aa, Neisseria meningitidis
LRGLLKEGAHEKSPKCLGGNLGDFGEFCKGLSLRDTVCYPDIDKQHPELAEAMNTCRLGYLIDKLDKTDDWQHKLSPGELQRVAFVRALLSQPKIILLDEATAALDEPTEAMLYRALKQKLPDSIIISIGHRSTLNAFHNMHLDVGNVACG

SEQ ID NO: 30208 - protein, 66 aa, Neisseria meningitidis; identical to SEQ ID NO: 421

SEQ ID NO: 30209 - protein, 404 aa, Neisseria meningitidis
MTVKTPVYLDYAATTTVDKRVAEKMIPYLTETFGNPASNSHAFGWEAEEAVEKARADIAALINADPKEIVFTSGATESDNLAIKGAANFYKTKGKHLITVKTEHKAVLDTMRELERQGFEVTYLGVQENGLIDLEELKAAIRDDTILVSVMWANNEIGVVQDIPAIGEICRERKIVFHVDAAQACGKVPVDVEAAKIDLLSMSAHKVYGPKGIGALYVRRKPRVRLEAQMHGGGHERGFRSGTLPTHQIVGMGEAFRIAKEELEQDMAHYRKLRDIFLKGIEGIEEVYINGDLEHRAPNNLNVSFNFVEGESLIMAVKELAVSSGSACTSASLEPSYVLRALGRNDELAHSSLRITFGRMTTEEEVQFSAELIKSKIGKLRELSPLWEMFKDGIDLNSIEWAAH

SEQ ID NO: 30210 - protein, 71 aa, Neisseria meningitidis; identical to SEQ ID NO: 22579

SEQ ID NO: 30211 - protein, 431 aa, Neisseria meningitidis
MSVIQDLQSRGLIAQTTDIEALDALLNEQKIALYCGFDPTADSLHIGHLLPVLALRRFQQAGHTPIALVGGATGMIGDPSFKAAERSLNSAETVAGWVESIRNQLTPFLSFEGGNAAIMANNADWFGKMNCLDFLRDIGKHFSVNAMLNKESVKQRIDRDGAGISFTEFAYSLLQGYDFAELNKRHGAVLEIGGSDQWGNITAGIDLTRRLNQKQVFGLTLPLVTKSDGTKFGKTEGGAVWLNAKKTSPYQFYQFWLKVADADVYKFLKYFTFLSIEEIDAVEAKDQASGSKPEAQRILAEEMTRLIHGEEALAAAQRISESLFAEDQSSLTESDFEQLALDGLPAFEVSDGINVVEALVKTGLASSNKEARGFVNSKAVLLNGKPAEANNPNHAAERPDDACLLNGEHKRFGKYTILRRGKRNHALLVWK

SEQ ID NO: 30212 - protein, 157 aa, Neisseria meningitidis
MQVTKNFSLRELTRSETARRAGVPNEPSPAEMDNIYYTAQQLEKIREYVGRPIIVTSCLRSEQVNKLVGGSPTSAHRHGLAADCDASGMTSPAFAKLLIKMRDEGALKFDQLILEFPERGDGAWVHIGFRRNSPQRNQILTATKKNGKTVYLPGLHP

SEQ ID NO: 30213 - protein, 208 aa, Neisseria meningitidis
MVIAAIMAMIALPNMSQWIASRRIASHAERIANLLRFSRGEAVRLNLPVYICPVQVKKDGTVNNKCDSGKKGQGMLAFGDKNGNKGYDNDTADVLLRSVVLNDDINDKRINYAFNHIAFGQTQPTTDRVVWTFNQNGTFGYTKDQHLTKQSSFFYSDGYIQIVLTDARAVSDADKKFRSAVVLIDSSGRVEVCPRGDRRTRRTMCQYK

SEQ ID NO: 30214 - protein, 167 aa, Neisseria meningitidis; identical to SEQ ID NO: 623

SEQ ID NO: 30215 - protein, 1421 aa, Neisseria meningitidis
MGGKSGGGQRTPYEAPNSLSSAQSLRIIDAVSEGVVSGFANGDDAPFKSVYFDDTPVQNSDGSYNFNGVTGYFQRGEQDQSYVPGFDASERTVAVSAAVKQNQPMVRAVTDELVSRLRITVAVERNAQVEDNGDTVPADTLMRVELINSNGVQASNQVRFNEKSSGTYYQDVEFDVVPQVPFNIRVFRISPDSKTDKVSNNTYFSSYVEIVDAKLSYPHTAFAALSIDSAQFGNQIPRRNYLMKGRLVKVPSNYNPETRQYTGGTWDGSFKTAWTNNPAWVFYDVLTQPRFSTLARRLNVADIDKWSLYQIGKYCDEPVDDGFGGKEPRFVCNAYITDLMQAGEFLNNLASVFTGLPVWNGQQVSVVMDADADPVAQYTNANVKDGLFNYAGAALKSIHTAVHVQYIDKYDGYRAKTEYVADNEAIARYGLNIKQITAFGCDSRGQAARFGAWTLQTELRQQNAVTFEIGREGLKHLPYDIVQIMDNQYAGAELSGRVAAISGNVLTLDRPVSDAVGALVFYSEGGSLKSAKITAAAGNKVTLEREVPLQAGDTWVLSGKVKPRLYRAIGIKENTDAGTYTVTALLHDPKKYAAVDSFAHFDHEITTLHNTAPVLTDAAVNTDGGTVVVTWDNLAANGQVLTYDIKIYRNNSLYRHIPDAQTAEIRLENLPNGNYRAEIRGRNARGVLSAPLVKAWSIDYTVTGLRTTPKTLSVTVDWVLPQTVVSDLVFELWYSKTNNLQTATKLASLAYPQNSYTLTGVGVADVYYFWVRIRDIAGNTGEFTAAVQGRADNNPAPIVQQIQGAIGKSALSRELIDTLNRDMAAAAGLKVSAEAAERAKALQEEARARTAAIQAESSARTAELARKSSEIGTRIAATEAVNEQQAQQIQTVTSAQGNTAAGLEAEKKARTDGDRAEAQARETLAVRLGNAESGISALRETVTRQDAARSSEINTLTAKLENVEVGGRNYALSTGTAGKVLTASENNQTKTVTIDVSSALDLKQGDSLIISCDIELVNATSPHGKPYPRIGAEFSVIYADNSVGYFAAWYGEAVSGTTKTLKQRIVAKHTVAKEVKALRSFIVQARYQTSESIKVSNVKLERGTVATDWSPAPEDSNADTSALTTLSAKVQQASSAVAEIGGKIQSLYTLKTEAIAGGRRAVAGVAVGADGKTGSGEILLMADKVAYVDPKDKTVTPAFVTVIENGKAKQALNGDLFATGSILAKHIAANQTIEAPTLNGATVNAGLIKGGTIRGARIEAVDLEVANIIGDVVAVRTFELKQSPLGYQELICQIPDSRKTRRTVIVPPVFAVAENGAVVSLQLHMDGVIQREVTIQSPEKRIARNKKFSVWVPGPPPLYIRTPQEVPLSFSVPFHLPKTGSISFQKGIDGAAHSLHILCRISGNFDYSPLGDLSGIVCLIV

SEQ ID NO: 30216 - protein, 300 aa, Neisseria meningitidis; identical to SEQ ID NO: 6138

SEQ ID NO: 30217 - protein, 671 aa, Neisseria meningitidis
MKSYPDPYRHFEDLDSAETQNFAAEANAETRARFLNNDKARALSDGILAQLQDTRQIPFCQEHRARMYHFHQDAEYPKGVYRVCTAATYRSGYPEWKILFSVADFDELLGDDVYLGGVSHLVEQPNRALLTLSKSGGDTAYTLEVDLEAGELVEGGFHFPAGKNHVSWRDENSVWVCPAWDERQLTESGYPREVWLVERGKSFEESLPVYQIAEDGMMVNAWRYLDPQGSPIDLIEASDGFYTKTYLQVSAEGEAKPLNLPADCDVVGYLAGHLLLTLRKDWNRANQSYPSGALVAVKLNRGELGAAQLLFAPDETQALESVETTKRFVVASLLENVQGRLKAWRFTDGKWQETELPRLPSGALEMTDQPWGGDVVYLAASDFTTPLTLFALDLNVMELTVMRRQPQQFNSDGINVQQFWTTSADGECIPYFHVGKNATPDTPTLVYAYGGFGIPELPHYLGSIGKYWLEEGNAFVLANIRGGGEFGPRWHQAAQGISKHKSVDDLLAVVRDLSERGISSPEHIGLQGGSNGGLITAAAFVREPQSIGALVCEVPLTDMIRYPLLSAGSSWTDEYGNPQKYEVCKRRLGELSPYHNLSDGIDYPPALITTSLSDDRVHPAHALKFYAKLRETSPQSWLYSPDGGGHTGNGTQREAADELACVLLFLKEFLG

SEQ ID NO: 30218 - protein, 157 aa, Neisseria meningitidis
MEQKGFTLIEMMIVVAILGIISVIAIPSYQSYIEKGYQSQLYTEMVGINNTVKQFILKNPLDNNQTIKSKLEIFVSGYKMNPKIAKKYSVSVRFVDKEKSRAYRLVGVPKAGTGYTLSVWMNSVGDGYKCRDAASARAYSETLSADAGCEAFSNRKK

SEQ ID NO: 30219 - protein, 150 aa, Neisseria meningitidis
MTGFNDAAGVASVSTDIKGKYVQSVTVANGVITAQMASSGVNNEIKGKKLSLWAKRQDGSVKWFCGQPVKRDGANATDAVTADTAAANKKIDTNHSHEPTSRHSRESGNDGGAVSVFSDKFLKLKISSFPQKHKTKNRNLKFVIPTKVGI

SEQ ID NO: 30220 - protein, 128 aa, Neisseria meningitidis; identical to SEQ ID NO: 605

SEQ ID NO: 30221 - protein, 197 aa, Neisseria meningitidis
MVDGMGNLIGWEKTGLVVGKQWITAKDDKVSDVCNANGEMGVIGLYEPFSHGALTIPGHPNCRCEVVSVSGGELGEFAEKKELRKAAMQYARDNFIGKSYVNKNSGHELKVTWQGVKHAASKANQAELSIITKLDDLLRYAKYEGSYSDRKGRPDIIAAHKYRAVTKVGNESLNVGVIVREFPDGHKHYDHFILKDE

SEQ ID NO: 30222 - protein, 492 aa, Neisseria meningitidis
MFSKLTPLAETGIPTLSCANAAGRLLHSDSRQIKQGDIFVACPGEYADGRSYIPAAVANGAAFVFWDDDGKFAWNPEWKVPNQGIKDLKHRAGILAAQVYGNVSDGLKVWGVTGTNGKTSITQWLAQAADLLGEKTAIVGTVGNGFWGALEETAHTTPAPVDVQTLLYRFRQQGATVAAMEVSSHGLDQSRVNGVSFRSAIFTNLTRDHLDYHGTMEAYGAIKSRLFYWHGLKHAVINVDDEYGAELVCRLKKDCPDLAVYSYGFSEQADIRIIDFTASSDGIAAVFQTPWGEGKCRTRLLGRFNAQNLAACIALLCANGYPLDNVLDVLAKIRPASGRMDCIMNSGKPLVVVDYAHTPDALEKALATLQEIKPQGAALWCVFGCGGNRDRGKRPLMGAAAVQGADKVVVTSDNPRLENPHDIINDILPAVPAPECVEADRAAAIRYAVEQAAANDIILIAGKGHENYQDVQGVKHRFSDLEIVGQALLTRK

SEQ ID NO: 30223 - protein, 146 aa, Neisseria meningitidis
VNIRRAVYADCEELAALDAVCNPSAWTQRQFESALVSPSEQVFLAEKDGGIAAFIVWQNLPDESELHLIATAPKCRRRGVASALLEYWYAHLPEGTQRLLLEVRAGNIGAQVLYAAHGFTDAGRRKNYYRTADGKTEDAVLMEKIC

SEQ ID NO: 30224 - protein, 103 aa, Neisseria meningitidis; identical to SEQ ID NO: 1510

SEQ ID NO: 30225 - protein, 384 aa, Neisseria meningitidis
MDTHTDETKLQNTQAKRKRRLTALTLLFALAAAAAGSAFFLWWQHEEETEDAYVAGRVVQVTPQKGGTVRKVLHDDTDAVKKGDVLAVLDDDNDVLAYERAKNELIQAVRQNRRQNAATSQAGAQVALRRADLARAQDDLRRRSALAESGAVSAEELAHARAAVSQAQAAVKAALAEESSARAALGGQVALREQPAVQTAIGRLKDAWLNLQRTQIRAPTDGQVAKRSVQVGQQVAAGAPLMAVVPLSDVWVDANFKETQLRHMKIGQPAELVSDLYGKQIVYRGMVAGFSAGTGSAFSLIPAQNATGNWIKVVQRVPVRIVLNREDVDRHPLRIGLSMTVKVDTSAASAPVSKTPGAALPEMESTDWSEVDRTVDEILGQSAP

SEQ ID NO: 30226 - protein, 100 aa, Neisseria meningitidis; identical to SEQ ID NO: 10168

SEQ ID NO: 30227 - protein, 797 aa, Neisseria meningitidis; identical to SEQ ID NO: 27797

SEQ ID NO: 30228 - protein, 185 aa, Neisseria meningitidis
MDALKLLTNRRSSKKLKHPAPDAAELEQIFKAATQVPDHGNMRPFRFTVIQGEVGLQRFRDVLKQTVAELNFGDDAMKKAEKVGNMAPMVIGVTFAPNRDVPKPKPEWEQMLTAGCAAYALQLAATAQGFDNVWITGMWVNSPLLREAFGCADKDKIIGLMMVGTPTEEVHKPKNTDLEAFVSHW

SEQ ID NO: 30229 - protein, 344 aa, Neisseria meningitidis
MNKTICRTAALLISGFSYANTVIPDVSPVAQGQHVFINIPQQRLFLYTDGKLTKVYPVAVGRAMTQTNLGEHKIGAKAYNPVWYIPKSIQKERGDGVKTIAAGPDNPLGPVFVRLGDPKLGLGIHGTNAPASVPGVRSHGCVRMKSPDALEFAKTIASGSPASVIYQMAGLNEDADRNLWLAAFRDPYGKNNLDIASLKKSIAQWAKTQGKTIAPEKVDAVLKDRTGSAVCLTCGKNGKMKMPLKSLAWIQGSSSYSQAEVIEQTEETNSAEISETRTPEVPDVHTPEAQPHLNTQSDGTPTAYTEPAADSSPQVETPDQAASEPVDVLFSIDVIRQGNLRLGN

SEQ ID NO: 30230 - protein, 709 aa, Neisseria meningitidis
MAYQVLARKWRPKTFSDLVGQEHVVKALQNALDEGRLHHAYLLTGTRGVGKTTIARILAKSLNCENAQHGEPCGVCESCTQIDAGRYVDLLEIDAASNTGIDNIREVLENAQYAPTAGKYKVYIIDEVHMLSKSAFNAMLKTLEEPPEHVKFILATTDPHKVPVTVLSRCLQFVLRNMTAQQVADHLAHVLDSEKIAYAPPALQLLGRAAAGSMRDALSLLDQAIAMGSGSVAEQDVRQMIGAVDKQYLYELLTGIVNQDGEALLAKAQEMAAYAVGFDNALGELAILLQHLALIQAVPNALAHDDPDSDILHRLAQTISGEQIQLYYQIAVHGKRDLSLAPDEYAGFMMTLLRMLAFAPLAATSCDANAVIENTELQSPSAQTAEKETAAKKPQPRPETETAQTSVQTASAAAMPSESKTAEPVSNQENNDVPPWEDAPDEAQTAAGTAQTSAKSIQTASEAETPPENQVSKNKAADNETNAPLSETPSENPIQATPNNEAVETETFAHEAPAEPFYGYGFPDNDCPVEDNAEIPPPDWEHAAPADTAGGGADEEAEAGGIGGNNTPSAPPPEFSTENWAAIVRHFARKLGAAQMPAQHSAWTEYHPDTGLMVLAMTAEARATADKKRLDKIRDTLAQAYGLQLTLQTQDWQDESGRETPAMQDKRVQAEDRQKAQALLEADPAAQKILQAFGAQWQPESLELAANRP

SEQ ID NO: 30231 - protein, 201 aa, Neisseria meningitidis
MILLHLDFLSALLYAAVFLFLIFRAGMLQWFWASIMLWLGISVLGAKLMPGIWGMTRAAPLFIPHFYLTLGSIFFFIGHWNRKTDGNGWQADSEHPLLGLFAVSNVSMTLAFVGICALVHYCFSGTVQVFVFAALLKLYALKPVYWFVLQFVLMAVAYVHRCGIDRQPPSTFGGSQLRLGGLTAALMQVSVLVLLLSEIGR

SEQ ID NO: 30232 - protein, 312 aa, Neisseria meningitidis
MLELNGLCKRFGGKTVADNICLTVGRGKILAVLGRSGCGKSTLLNMIAGIVRPDGGEIQLNGENITRMPPEKRRISLMFQDYALFPHMSALENAAFGLKMQKMPKAEAERLAMAALAEVGLENEVHRKPEKLSGGEKQRLALARALVVRPSLLLLDESFSSLDTHLRGTLRRMTAERIRKGGIPAVLVTHSPEEACTAADEIAVMHEGKILQCGTPETLVQTPAGVQVARLMGLPNTDDDRHIPQHAVRFDQDGMECRVLSHTCLPESFSLSVLHPEHGILWLNLDMPHAGEISGNDTVRIHIEDREIVRFR

SEQ ID NO: 30233 - protein, 406 aa, Neisseria meningitidis
MAVNLTEKTAEQLPDIDGIALYTAQAGVKKPGHTDLTLIAVAAGSTVGAVFTTNRFCAAPVHIAKSHLFNEDGVRALIINTGNANAGTGAQGRIDALAVCAAAARQIGCKPNQVLPFSTGVILEPLPADKIIAALPKMQPAFWNEAARAIMTTDTVPKAASREGKVGDKHTVRATGIAKGSGMIHPNMATMLGFIATDAKVSQPVLQLMTQEIADETFNTITVDGDTSTNDSFVIIATGKNSQSEIDNIADPRYAQLKELLCSLALELAQAIVRDGEGATKFITVRVENAKTRDEARQAAYAVARSPLVKTAFFASDPNLGRLLAAIGYAGVADLDTDLVEMYLDDILVAEHGGRAASYTEAQGQAVMSKDEITVRIKLHRGQAAATVYTCDLSHGYVSINADYRS

SEQ ID NO: 30234 - protein, 159 aa, Neisseria meningitidis; identical to SEQ ID NO: 6605

SEQ ID NO: 30235 - protein, 65 aa, Neisseria meningitidis; identical to SEQ ID NO: 127

SEQ ID NO: 30236 - protein, 110 aa, Neisseria meningitidis
MSSELIVHTGDAAFEQDVLKSDLPVLLDFWAPWCGPCKMIAPILDDIAAEFEGRLKVVKINIDDNEATPSRFGVRGIPTLMVFKNGEVVATKVGALAKGQLTTFVEASIA

SEQ ID NO: 30237 - protein, 244 aa, Neisseria meningitidis
LVKTADGYKAIAHIQAGDRVFAKDETSGKTGYKPVTAQYGNPYRETVYIEISDGIGNSQTLISNRIHPFYSQGKWIQAGRLKKGDTLLSESGAKQTVQNITLKQQPLKAYNLTVADWHTYFVKGDKAETEGVWVHNDCPYGKSPRKINAVINETNTQRGNITSKHTLSSDEALDAGIKYLGSEYKEIGKSGSGVYRNKAGTRQFRIDNNSLEGNHAPNVPHIHLERIDPNKKKPLTNNHIPIKD

SEQ ID NO: 30238 - protein, 371 aa, Neisseria meningitidis; identical to SEQ ID NO: 849

SEQ ID NO: 30239 - protein, 205 aa, Neisseria meningitidis; identical to SEQ ID NO: 2641

SEQ ID NO: 30240 - protein, 240 aa, Neisseria meningitidis
MKPAYFISDLHLSEKHPELTALLLRFLRSSAAGQARAIYILGDLFDFWVGDDEVSELNTSVAREIRKLSDKGVAVFFVRGNRDFLIGQDFCRQAGMTLLPDYSVLDLFGCKTLICHGDTLCTDDKAYQRFRKIVHRKRLQKLFLMLPLKWRTRLAAKIRRVSKMEKQVKPADIMDVNAAFTARQVRAFNAERLIHGHTHREHIHHENGFTRIVLGDWHNDYASILRVDGDGAVFVPLEKY

SEQ ID NO: 30241 - protein, 259 aa, Neisseria meningitidis
MAASPEAKFTEEKILWVKHHTPKLITFAISRPESYRFKAGQFSRLGFYEGEGFIWRAYSIVSAEYADTLEYFAVLIQDGPMSIRFAKMQQGDTILLDKNATGFLLPERFPDGKDLVMLCTGSGIAPFLSILEQPEIRQRFDTVNLIHSVSFPEELIFNDRLAALSEHPLVGEYGHSFRFVPVTTRAANPSGLSGKRIPELLKNGSIEQALHTKFTPESTRFMICGNPEMVKDTFQTLLDMGYAMHRNRIPGQIMMENGF

SEQ ID NO: 30242 - protein, 67 aa, Neisseria meningitidis; identical to SEQ ID NO: 966

SEQ ID NO: 30243 - protein, 135 aa, Neisseria meningitidis; identical to SEQ ID NO: 15633

SEQ ID NO: 30244 - protein, 94 aa, Neisseria meningitidis
MFGGRLKNAPSITAKHFLKENIMKFINTCRKYGAKLAVVTAAPLALAAHANATLPDTAKNALEAAKADGMEVGWIVVGVFAALFVFSIVKRVMK

SEQ ID NO: 30245 - protein, 356 aa, Neisseria meningitidis; identical to SEQ ID NO: 14549

SEQ ID NO: 30246 - protein, 204 aa, Neisseria meningitidis; identical to SEQ ID NO: 504

SEQ ID NO: 30247 - protein, 176 aa, Neisseria meningitidis; identical to SEQ ID NO: 21211

SEQ ID NO: 30248 - protein, 272 aa, Neisseria meningitidis; identical to SEQ ID NO: 15722

SEQ ID NO: 30249 - protein, 522 aa, Neisseria meningitidis
MKKSLFVLFLYSSLLTASEIAYRFVFGIETLPAAKMAETFALTFVIAALYLFARYKATRLLIAVFFAFSIIANNVHYAVYQSWITGINYWLMLKEITEVGGAGASMLDKLWLPALWGVLEVMLFCSLAKFRRKTHFSADILFAFLMLMIFVRSFDTKQEHGISPKPTYSRIKANYFSFGYFVGRVLPYQLFDLSKIPVFKQPAPSRIGQGSIQNIVLIMGESAAHLKLFGYGRETSPFLTQLSQADFKPIVKQSYSAGFMTAVSLPSFFNVIPHANGLEQISGGDTNMFRLAKEQGYETYFYSAQAENQMAILNLIGKKWIDHLIQPTQLGYGNGDNMPDEKLLPLFDKINLQQGRHFIVLHQRGSHAPYGALLQPQDKVFGEANIVDKYDNTIHKTDQMIQTVFEQLQKQPNGNWLFAYTSDHGQYVRQDIYNQGTVQPDSYIVPLVLYSPNKAVQQAANQAFAPCEIAFHQQLSTFLIHTLGYDMPVSGCREGSVTGNLITGDAGSLNIRDGKAEYVYPQ

SEQ ID NO: 30250 - protein, 392 aa, Neisseria meningitidis
MAFLKLTEQNVQGKTVLIRADMNVPFKDGKISDDTRIRASLASVKYCVDNGASVIVMTHLGRPTEGEFHPEDDVAPVAAHLGGLLGKDVKVLNDWRENKPALNAGDVVMLQNVRINKGEKKNDLELGKAYASLCDVFVNDAFGTAHRAQASTEAVAQAAPVACAGVLMAGELDALGKALKQPARPMVAIVAGSKVSTKLTILESLADKVDQLIVGGGIANTFLLAEGKAIGKSLAEHDLVEESKKIMAKMAAKGGSVPLPTDVVVAKAFAADAEAVVKDIADVAEDDMILDIGPKSAAELAELLKAAGTVVWNGPVGVFEFDQFAGGTKALAEAIAQSKAFSIAGGGDTLAAIAKFGVTDQIGYISTGGGAFLEFLEGKELPAVAALEKRGE

SEQ ID NO: 30251 - protein, 1017 aa, Neisseria meningitidis
  misc_feature 1011, 1012: 'Xaa' is any amino acid
MSAPIQAFDPLTVPIAGTNLIEASAGTGKTYGIAALFTRLIVLEQKNVERVLVVTFTKAATAELKTRLRARLDDVLQVLESKEIAKLGDDTLSDGIAAYCAEHHKGDTFLPALLKQALQKEGRTRLIVRLKAAIGQFDNAAIYTIHGFCQRILRDYAFLCQAPFDVELTEEDGDRLLVPAQDFWRERVSNDPVLAALAFKRKAVPQTVLAQIRAYLSRPYLNFRRPQADLKQAQRNAETSWQTVCRLLPELEAGFWRIHPDLNGNSYRKNSFGNLFKELAQKSAAGQLPFLDKDTHDRLLKLASDKLEAGLKKGKTPDAAVFAELQKLADFGRDLNALEEAEEATMIRLQLDLIGYLNRSLAEMKKSRRERGFDDLLLDVHTALTDNPHAETLARAVAENWETALIDEFQDTDPLQYEIFQKIFIAQNRPLFLVGDPKQAIYSFRGADIYAYLQAAEDARHRYTLATNYRSHAALIGSIGALFRLKERPFVLENIGYSEVGAARAESRLSPERPAVQVRWLHENDNEKANKDVLRRRAADYCADEIAHALNEAAGGRLNFKGRPLQSGDIAVLVRTHNEAVMVSAALKKRQVQSVLLSRESVFASPEAAALSALIGFWLEPRRAGTLRFVLTSGIFGYDAQQLHDFNQNESEILHWAESARTALDNWNQYGIFAAMQQFSQTHGIETRLLSRNNGRSLTNYFQLLELLAAEDAQNRNPAALHKWLRDQISLAGNNSGDNRAIRLESDEDLVKIVTMHASKGLQYPLVYCPFAWDAQDTGPSDWQILHQSANRTELLAKAQLSEDEQKQYADEEMAERLRLLYVALTRAEEQLNIYAAYSSDTADNPLAYLIEGLPQDSRETVRRAYACEKDGIAMLKRNWRRVADNAPSGTNFAFTEDAPPPAAYRGNAGQTAEFAANSIPERRFRFVRHTSFTALSRHTQTPDGGEEDACPSLDAAEISVAAMPSETPTASDGISIHNFPKGTQAGLCLHEILEDFKFGQAAAGQETPHXXTHLIN

SEQ ID NO: 30252 - protein, 192 aa, Neisseria meningitidis; identical to SEQ ID NO: 14811

SEQ ID NO: 30253 - protein, 117 aa, Neisseria meningitidis; identical to SEQ ID NO: 14752

SEQ ID NO: 30254 - protein, 384 aa, Neisseria meningitidis; identical to SEQ ID NO: 3277

SEQ ID NO: 30255 - protein, 283 aa, Neisseria meningitidis; identical to SEQ ID NO: 453

SEQ ID NO: 30256 - protein, 155 aa, Neisseria meningitidis; identical to SEQ ID NO: 5339

SEQ ID NO: 30257 - protein, 317 aa, Neisseria meningitidis; identical to SEQ ID NO: 4876

SEQ ID NO: 30258 - protein, 166 aa, Neisseria meningitidis
LGIHPNSAALFYRKIRMVINHHLALAADEVFEGSVEPDESDFGGRRKGRRGRGAAGKVVVFGILKHNGRVYTVVVDNAKSETLLPVIKKKIMPDSIVYTDSLSSGDKLDVSGFIHYRINHSKEFADRQNHINGIENFWNQAKRVLRKYSGLARTFPRIGSATGCAD

SEQ ID NO: 30259 - protein, 140 aa, Neisseria meningitidis
MNLEQLGRRDALLSGLLKQAGQWRRLDAAVKKLLPANLHPHFQTACIEDGRLVLLAANNMAASRLKMIAPSVLPQLAGLDASIRSVSVRLVPKPEKPPKTNTLHLSKAALESFGSAAVKLEKRHPELAEVLANLVRRHGA

SEQ ID NO: 30260 - protein, 190 aa, Neisseria meningitidis; identical to SEQ ID NO: 4848

SEQ ID NO: 30261 - protein, 419 aa, Neisseria meningitidis
MHVSELQTLHISKLLELAEEHGIENANRFRKQDLVFAIVRQMMKKGEGFTCSGTLEILPDGFGFLRSADTSYLAGPDDIYVSPTQIRRFNLHTGDTIEGSVRVPKDNERYFALVRLDTINGDHPEVCRHKILFENLTPLFPTEQLKLERDLKSEENLTGRAIDLISPIGKGQRALLVAPPKSGKTVMLQNIAHAVTSNYPEVELIVLLIDERPEEVTEMSHSVRGEVVSSTFDEPAQRHVQVAEMVLEKAKRMVEHKKDVVILLDSITRLARAYNTVVPTSGKILTGGVDANALHRPKRFFGTARNVEEGGSLTIIATALVETGSRMDDVIYEEFKGTGNMELHLDRRMAEKRLFPAININKSGTRREELLVPNDQLQRMWLLRKFLHPMDEIEAAEFLIGKIKASKNNDDFFELMRGK

SEQ ID NO: 30262 - protein, 268 aa, Neisseria meningitidis
MPTVFIFLTAVYAGLGAFAWHCQQQGRGRDYPWKTELPVLGAALTVHGAALLMPVIQDKIIIMGFGYSGSLIVWMMLFIYFAGSFFYPLRGVQLLLYPCAALMLLSGLVFPGKFSGYEITDLPFMLHIGTSLLAYGLFGIATLLSVLTLLLNRSLHRRNFSKLAGFLPSLLSLEKLMFQAMWAGFILLTYSVVSGTFFAEAVFGKPMTFTHKTVFGILSWLIYGGLLLKHSMTAWRGKKAAVWTIIGFVSLMIAYMGSKFVLEIILNR

SEQ ID NO: 30263 - protein, 156 aa, Neisseria meningitidis
MTDTDTQADRFEQMMWQAVDKLFEQHDGKLESMDGREQELVLIWRTEADIGNGGILQFVCNWGFPAAEKTCSVLKKIGAVHSAMLIHRAADALRKEIRHLQSEGKNLKEMWDITKHLDNKTASLPNSLDEQYWQDPDKLYLPGWQYYSGNPVQTLF

SEQ ID NO: 30264 - protein, 158 aa, Neisseria meningitidis
MNTIAPNLDGKHLRIGIVQARFTNEIGSEMLKVCCRTLKELGVADENITVATVPGALEIPIALMNLASSEKFDALIAIGVVIRGETYHFELVSNESGAGVSRVALDYNIPIANAVLTTENDAQAIERIEEKASDAAKVAVECANLVNLLLEEQFEDEE

SEQ ID NO: 30265 - protein, 378 aa, Neisseria meningitidis
MKNISLSPPAMLGILGGGQLGRMFTVAAKTMGYKVTVLDPDPDAPAAEFADCHLCAPFNDQAALDELAKCAAVTTEFENVNADAMRFLAKHTNVSPSGDCVAIAQNRIQEKAWIRKAGLQTAPYQVVCKAEDITEASAQFLPSILKTATLGYDGKGQIRVKTLDELKAAFAEHGGVDCVLEKMVDLRSEISVIVCRLNNDNVQTFDPAENIHENGILAYSIVPARLSADVQQQARQMAQRLADELDYVGVLAVEMFVVGDTHELVVNEIAPRPHNSGHHTIDACAADQFQQQVRLMCNLPPADTKLLSSCCMANILGDVWQEDGGKPDWFPLQSRPDARLHLYGKKTAHKGRKMGHFTVLTTDSDTAFQEAKKLHQSL

SEQ ID NO: 30266 - protein, 215 aa, Neisseria meningitidis; identical to SEQ ID NO: 4487

SEQ ID NO: 30267 - protein, 208 aa, Neisseria meningitidis
MTQERFPSFFNQAPTITVRDPLAAFLGAAENGILTYRYADAVRLCGHSCPTVAGAYLMVIKGLKALYGEELPERGGIEAAMQGARDEGTVGVTASVVQLLTGAAPETGFGGIGMQGRFARRNLLSFGAGEINGTLTLRRKDNGKTVAVSLNAALQPFAPEMRELMPKTVGGSASAEELERFGQLWQARVKAFLTESADDPQFVIVREV

SEQ ID NO: 30268 - protein, 144 aa, Neisseria meningitidis; identical to SEQ ID NO: 652

SEQ ID NO: 30269 - protein, 284 aa, Neisseria meningitidis
MKIVLISGLSGSGKSVALRQMEDSGYFCVDNLPLEMLPALVSYHIERADETELAVSVDVRSGIDIGQAREQIAYLRGLGHRVEVLFVEAEESVLVRRFSETRRGHPLSNQDMTLLESLKKEREWLFPLKEIAYCIDTSKMNAQQLRHAVRQWLKVERTGLLVILESFGFKYGVPNNADFMFDMRSLPNPYYDPELRPYTGMDKPVWDYLDGQPLVQEMVDDIEKFLTHWLPRLEDESRSYVTVAIGCTGGQHRSVYVVEKLARRLKGRYELLIRHRQAQNLPSR

SEQ ID NO: 30270 - protein, 397 aa, Neisseria meningitidis; identical to SEQ ID NO: 103

SEQ ID NO: 30271 - protein, 130 aa, Neisseria meningitidis
MYSFEANANAVKISETVSVDTGQGAKIHKFVPKNSKTYSSDLIKTVDLTHIPTGAKARINAKITASISRAGVLAGGGKLARLGAKFSTRAVSYVGTALLAHDVYETFKEDIQARGYQYDPETDKFAKVSG

SEQ ID NO: 30272 - protein, 98 aa, Neisseria meningitidis
LKIPVIVYLKYRKDDHFSVLRGIDGNTVLLADPSLGHVSMSRAQFLDAWQTREGNLAGKILAVVPKKAETISNKLFFTHHPKRQTEFAVGQIRQARAE

SEQ ID NO: 30273 - protein, 61 aa, Neisseria meningitidis
MSTFFRQTAQAMIAKHIDRFPLLKLDQVIDWQPIEQYLNRQKTRYLRDHRGYPAYPVAGIP

SEQ ID NO: 30274 - protein, 757 aa, Neisseria meningitidis; identical to SEQ ID NO: 9089

SEQ ID NO: 30275 - protein, 503 aa, Neisseria meningitidis
MKWLKRLTVIVGTFYRYRLAGLCASLMGSGWICALLKMMPQSSKLKNEPPAVRLRLALESLGPIFIKFGQVLSTRPDLIPHDYAVELAKLQDKVPPFDARLSREQIEKSLGQSIEKLYAEFETEPIASASIAQVHKARLHSGERVAVKVLRPNLLPLIEQDLSLMRFGAAWVERLFSDGRRLKPLEVVAEFDKYLHDELDLMREAANAGQLGRNFQNSNMLIVPKVFYDYCTSDVLTIEWMDGTPVADIAKLKADGIDLHKLADYGVEIFFTQVFRDGFFHADMHPGNILVAADNRYIALDFGIVGTLTDYDKRYLAINFLAFFNRDYRRVATAHIESGWVPADTRAEELEAAVRAVCEPVFNKPISQISFGLVLMRLFEVSRRFNVEIQPQLVLLQKTLLNIEGLGRQLDPDLDLWKTAKPFLVKWMNGQVGPKALWRNLKNEAPDWAQIIPSLPRKISALIDENRQQEMRDAYIHLVKVQQRQSLWLAAIAVVLLLILLLK

SEQ ID NO: 30276 - protein, 436 aa, Neisseria meningitidis; identical to SEQ ID NO: 6386

SEQ ID NO: 30277 - protein, 208 aa, Neisseria meningitidis
MKNIVILISGRGSNMQAIVNAAIPNVRIAAVLSNSETAAGLQWAAERGIPTDSLNHKNFESRLAFDTAMMEKIDAYQPDLVVLAGFMRILTPEFCARYEGRLMNIHPSILPSFTGLHTHERALEAGCRVAGCTIHFVTAELDCGPIVSQGVVPILDGDTADDIAARVLAVEHKLYPKAVADFAAGRLIIEGNRVRNSENADAARFLTA

SEQ ID NO: 30278 - protein, 208 aa, Neisseria meningitidis; identical to SEQ ID NO: 18822

SEQ ID NO: 30279 - protein, 302 aa, Neisseria meningitidis
MDKSAILTAITAAFRKEFQTGLESVKPDYTAVAMTIPSNTATNTYAWLGKFPQMREWVGSRQIEKMNKQAMSLDNKKFEATVGVARTDIEDDQVGMYRPMMAAMGESAAALPDTLVWGLLKKGKTTVGYDGQYFFDTDHPVYEKSDGTGQNTPHSNLTTGTDNDAPTFYVVDDTKTLKPLIFQNRTDSEFETKFDPSKSDRVFMEDEYLYGSRRRCNAGFGLWQLMHMAEKTALTRENLAAIIVKMQKIKADGGYVLNVKPSLLVVPPELEDKARELLEADKINGTTNTFKGRLKLHVCVHL

SEQ ID NO: 30280 - protein, 162 aa, Neisseria meningitidis
MTVLTVILALALIAVGTAGIVYPALPGLALMFAGTWLLAYAGGYQIYGAGVLWTVGLISLAGILADYVAGILGVKYTGAGRLAVRGALVGSIVGIFFSLPGLILGPFIGAAAGELIDRRNMLQAGKAGLGTLLGLIVGTAFKIGCAVSILFILLVKYIAYLF

SEQ ID NO: 30281 - protein, 83 aa, Neisseria meningitidis
MSLFITDECINCDVCEPECPNDAISQGEEIYEINPNLCTQCVGHYDEPQCQQVCPVDCILIDEEYPETHDELMAKYEKIIQFK

SEQ ID NO: 30282 - protein, 105 aa, Neisseria meningitidis; identical to SEQ ID NO: 15451

SEQ ID NO: 30283 - protein, 420 aa, Neisseria meningitidis
MSNTQKQLALAKAAKKSVNTADTEEKNRALLAMADSLEAAAADILAANRQDLEAAAGNIPESMTDRLLLDEKRIGAMADGIRAVAALPDPVGEILETSTLPNGLEIVKKRVAMGVIGIIYESRPNVTSDAAALALKSGSAVVLRSGKDAFQSARAIVAALKTGLAQTRIDPDALQLIEDTGRESSYEMMRAKDYLDLLIPRGGAGLIRAVVENAVVPVIETGTGIVHIYIDKDADWDKALRIVYNAKTSRPSVCNSMEVLLVHEDIAADFLPKLERLLVRDRIEAGLPPVRFRLDPQAARHIGGEAAGADDFDTEFLDYILAVKTVASVEEAVGHIEAHGTHHSDGIVTENRHAADYFTTHIDSAAVYVNASTRFTDGGEFGLGCEMGISTQKLHARGPMGLKELTSYKYIVQGTGQVRE

SEQ ID NO: 30284 - protein, 488 aa, Neisseria meningitidis
MAEATDVVLVGGGIMSATLGVLLKELEPSWEITLIERLEDVALESSNAWNNAGTGHSALCELNYAPLGANGIIDPARALNIAEQFHVSRQFWATLVAEGKLEDNSFINAVPHMSLVMNEDHCSYLQKRYDAFKTQKLFENMEFSIDRNKISDWAPLMMRGRDENQPVAANYSAEGTDVDFGRLTRQMVKYLQGKGVKTEFNRHVEDIKRESDGAWVLKTADTRNPDGQLTLRTRFLFLGAGGGALTLLQKSGIPEGKGYGGFPVSGLFFRNSNPETAEQHNAKVYGQASVGAPPMSVPHLDTRNVDGKRHLMFGPYAGFRSNFLKQGSLMDLPLSIHMDNLYPMLCAGWANMPLTKYLLGELRKTKEERFASLLEYYPEANPDDWELITAGQRVQIIKKDSEKGGVLQFGTEIVAHADGSLAALLGASPGASTAVPLMIRLMHQCFPERAPSWEDRLKELVPGYGIKLNENPERADEIIAYTAKVLDI

SEQ ID NO: 30285 - protein, 162 aa, Neisseria meningitidis
MKKILTAAVVALIGILLAIVLIPDSKTAPAFSLSDLHGKTVSNADLQGKVTLINFWFPSCPGCVSEMPKIIKTANDYKNKNFQVLAVAQPIDPIESVRQYVKDYGLPFTVMYDADKAVGQAFGTQVYPTSVLIGKKGEILKTYVGEPDFGKLYQEIDTALAQ

SEQ ID NO: 30286 - protein, 469 aa, Neisseria meningitidis
MPHIDFDTIPGSIRVPGQYIEFNTRNAVQGLPQNPQKVLMVAPMLTAGIQPALEPVQLFSDAEAADLFGQGSLAHLMVRQAFANNPYLDLTVIGIADHSAGVQATATVTLSGTATAPGVVEITIGGKQVSTVVNTGETAATVAGRLKTAITAADVTVTASGSGAAVTLTAKHKGEIGNESGLTVSTGNTGLTYQANAFTGGAKNADIATALSKVAGKHYHIICSPFSDDANAKALSNHITNVSNAIEQRGCIGVLGMSAALSTATTATGEINDGRITCAWYKGAVEPNGIIAAGYAAVLAFEEDPAKPLNTLEIKGLTVTPDAQWPLFAECNNALYNGLTPLTVVNNRVQIMRAVSTYTKSANNTDDPALLDITTIRTLDYVRRSVKERIALRFPRDKLSDRLLPKVKSEILDVLIKLDQAEIIENAEANKGKLVVARAQNDPNRVNAIIPADVVNGLHVFAGRIDLIL

SEQ ID NO: 30287 - protein, 484 aa, Neisseria meningitidis; identical to SEQ ID NO: 2793

SEQ ID NO: 30288 - protein, 85 aa, Neisseria meningitidis
MTTQMCASRDVSKSAKGWSVGIGLNVGKQLTDSVGLEFDPYYRHKTICKPREIVLDGDKTKMGRSKSNEYGFRVTATFYSQLKSK

SEQ ID NO: 30289 - protein, 214 aa, Neisseria meningitidis
VKKRLFCSRNGLRYYLLGGFCLSVFPLLLVFASSVWAVYRTGGQVLPPYVRADAALVLGAAAWDKRPSPVFRERINHAIALYQSRRVGKIIFTGGRSKKGYMTEAEVGRRYALKQGIPPRNILFENTSRNTYENLNNIRPVLRANGIASVVIVSDPYHLARAAEMAEDLGVRVYMSATPTTRFDAGNKKKIFMLQEGYALSLYRLEKWGRDFFN

SEQ ID NO: 30290 - protein, 138 aa, Neisseria meningitidis; identical to SEQ ID NO: 937

SEQ ID NO: 30291 - protein, 203 aa, Neisseria meningitidis; identical to SEQ ID NO: 352

SEQ ID NO: 30292 - protein, 389 aa, Neisseria meningitidis
MTAHKILPVLLSIILGVSHATAASPAPNKPAVHAAPTFQTPETLTAAHIVIDLQSKQILSAKNINTPVEPAALTQLMTAYLVFKNMKSGNIRSEENLKIPESAWASEGSRMFVRPGDTVSTDKLLKGMIALSANDAALTLAGRLGNGSIENFVQQMNKEARRLGMKNTVFKNPTGLSREGQVSTAKDLAQLSEALMRDFPEYYPLFSIKSFKFKNIEQNNRNILLYRDNNVNGLKAGHTESGGYNLAVSYSGNGRHILVITLGSESAETRASDNSKLLNWALQAFDTPKIYPKGKTVAQIQISGGSKKTVRAGFLKEAYITLPHKEAKMAEQILETIQPIPAPVKKGQILGKIKIRQNGYTIAEKEIVALENVEKRSRWQRLWARLTGQ

SEQ ID NO: 30293 - protein, 97 aa, Neisseria meningitidis; identical to SEQ ID NO: 26821

SEQ ID NO: 30294 - protein, 414 aa, Neisseria meningitidis; identical to SEQ ID NO: 461

SEQ ID NO: 30295 - protein, 405 aa, Neisseria meningitidis
MKTVVWIVVLFAAAVGLALASGIYTGDVYIVLGQTMLRINLHAFVLGSLIAVVVWYFLFKFIIGVFNIPEKMQRFGSARKGRKAALALNKAGLAYFEGRFEKAELEASRVLGNKEAGDNRTLALMLGAHAAGQMENIELRDRYLAEIAKLPEKQQLSRYLLLAESALNRRDYEAAEANLHAAAKMNANLTRLVRLQLRYAFDRGDALQVLAKTEKLSKAGALGKSEMERYQNWAYRRQLADAADAAALKTCLKRIPDSLKNGELSVSVAEKYERLGLYADAVKWVKQHYPHNRRPELLEAFVESVRFLGEREQQKAIDFADAWLKEQPDNALLLMYLGRLAYGRKLWGKAKGYLEASIALKPSISARLVLAKVFDETGEPQKAEAQRNLVLASVAEENRPSSETC

SEQ ID NO: 30296 - protein, 412 aa, Neisseria meningitidis; identical to SEQ ID NO: 12960

SEQ ID NO: 30297 - protein, 279 aa, Neisseria meningitidis
MLVAFLIMLREGIEAALIVGIVAGFLKQSGHSKLMPKVWFGVVLASLMCLGLGYGIHSATGEIPQKQQEFVVGIIGLVAVAMLTYMILWMKKAARSMKRQLQDSVQAALNRGSGQGWALVGMAFLAVALEGLESVFFLLAVFKQSPTWQMPAGAVAGVLAAAVIGALIYQGGMRLNLAKFFRWTGAFLIAVAAGLLAGSLRALHEAGIWNALQDIVFDSSKYLHEDSPLGVLLGGFFGYTDHPTQGEALVWLLYLIPVMTWFLCGSRPSETLTRKEELK

SEQ ID NO: 30298 - protein, 136 aa, Neisseria meningitidis
MPVYFRTPSRKRLHKMNRRQHKKLHLGEFQTLIFGVQGSLHQAEDDAEAFGRFMDELIAYLVVNGFEMAGGGDCGDFSCLFQKSGARSLGETEKKAIISWLADREDVATLYATPLVDGFYGDDGWENYSETYKQAD

SEQ ID NO: 30299 - protein, 131 aa, Neisseria meningitidis
VKLLANNWQPIAIIALVGTLLAVSHHQGYKSAFAKQQAVIDKMEKDKAQALLLSAQNYARELEQARAEAKKYEVKAHAVGMALAKKQAEVSRLKTERDLCKIPFLPDSRNPNTGFQLFPPQIPPNFTQIPP

SEQ ID NO: 30300 - protein, 51 aa, Neisseria meningitidis; identical to SEQ ID NO: 7347

SEQ ID NO: 30301 - protein, 143 aa, Neisseria meningitidis; identical to SEQ ID NO: 7535

SEQ ID NO: 30302 - protein, 228 aa, Neisseria meningitidis; identical to SEQ ID NO: 2819

SEQ ID NO: 30303 - protein, 601 aa, Neisseria meningitidis
MRYKPLLLALMLVFSTPAVAAHDAAHNRSAEVKKQTKNKKEQPEAAEGKKEKGKNGAVKDKKTGGKEAAKEGKESKKTAKNRKEAEKEATSRQSARKGREGDKKSKAEHKKAHGKPVSGSKEKNAKTQPENKQGKKEAKGQGNPRKGGKAEKDTVSANKKVRSDKNGKAVKQDKKYREEKNAKTDSDELKAAVAAATNDVENKKALLKQSEGMLLHVSNSLKQLQEERIRQERIRQERIRQARGNLASVNRKQREAWDKFQKLNTELNRLKTEVAATKAQISRFVSGNYKNSQPNAVALFLKNAEPGQKNRFLRYTRYVNASNREVVKDLEKQQKALAVQEQKINNELARLKKIQANVQSLLKKQGVTDAAEQTESRRQNAKIAKDARKLLEQKGNEQQLNKLLSNLEKKKAEHRIQDAEAKRKLAEARLAAAEKARKEAAQQKAEARRAEMSNLTAEDRNIQAPSVMGIGSADGFSRMQGRLKKPVDGVPTGLFGQNRSGGDVWKGVFYSTAPATVESIAPGTVSYADELDGYGKVVVVDHGENYISIYAGLSEISVGKGYMVAAGSKIGSSGLLPDGEEGLYLQIRYQGQVLNPSSWIR

SEQ ID NO: 30304 - protein, 347 aa, Neisseria meningitidis
MSKKIKVGIVGATGYTGVELLRLLAAHPDVEVAAVTSRSEAGTAVADYFPSLRGVYGLAFQTPDEAGLEQCDIVFFATPNGIAMKDALRLLEQGVRVIDLSADFRIRDIPTWEHWYGMTHAAPGLVSQAVYGLSELNREAVAQARLVANPGCYPTCVSLPLVPLLRQCRLKPGMPLIADCKSGVSGAGRKGNVGSLLCEAGDNFKAYGIAGHRHLPEIRQTIAGLQDGIAEGFVFTPHLAPMIRGMHATVYLHLSNGNCPETVLRDYYRDSLFVDILPAGSTPETRSVRGANLCRISIQQAAQSDVWVVLSVIDNLVKGAAGQAVQNMNIMFGLKETHGLGAIPLLP

SEQ ID NO: 30305 - protein, 74 aa, Neisseria meningitidis; identical to SEQ ID NO: 28527

SEQ ID NO: 30306 - protein, 128 aa, Neisseria meningitidis
  misc_feature 122, 123: 'Xaa' is any amino acid
VSISAPYANENSRISLSAANIEAENGKIKIQSYGDQYYYARQSELYTFERRSYKTGKWYNRKHITEVKEHKNAKPDAVTLSASQGIDIKSGGSIDAYATAFDAPKGSINIEAGRKLTLYAVXXTHLIN

SEQ ID NO: 30307 - protein, 190 aa, Neisseria meningitidis
LNAPAAALTKNSGRKGERSAGLSVNGTGDYRNETLLANPRDVSFLTNLIQTVFYLRGIEVVPPEYADTDVFVTVDVFGTVRSRTELHLYNAETLKAQTKLEYFAVDRDSRKLLIAPKTAAYESQYQEQYALWMGPYSVGKTVKASDRLMVDFSDITPYGDTTAQNRPDFKQNNGKNPDVGNEVIRRRKGG

SEQ ID NO: 30308 - protein, 64 aa, Neisseria meningitidis; identical to SEQ ID NO: 905

SEQ ID NO: 30309 - protein, 304 aa, Neisseria meningitidis
MTWRSLLIQNGGKLSLQRRQLLIQQNDESHTVPLEDIAVIIIENRETLITAPLLSALAEHGATLLTCDEQFLPCGQWLPYAQYHRQLKILKLQLNISEPLKKQFWQHIVRQKILNQAFVADETGNDLAAKRLRTLASEVRSGDTGNREAQAAALYFQALFGEKFTRNDNNAVNAALNYTYAVLRAAVARALTLYGWLPALGLFHRSELNPFNLADDFIEPLRPLADLVVIHLYEQGRLKTELTPSIKQHLIKTLHCQTSIERQHFSTLAAIDKMVSSFQAGVTDKNAKQLKLPEILPLKAYQYE

SEQ ID NO: 30310 - protein, 127 aa, Neisseria meningitidis; identical to SEQ ID NO: 4145

SEQ ID NO: 30311 - protein, 112 aa, Neisseria meningitidis
MNTRIIVSAAFVALALVGCGSINNVTVSDQKLQERAAFALGVSPNAVKISNRNNEGIRINFTATVGKRVSQCYVTSVISTIGVTTSDAICLGGGTHKGKSQCNALLKAAGRC

SEQ ID NO: 30312 - protein, 275 aa, Neisseria meningitidis; identical to SEQ ID NO: 2739

SEQ ID NO: 30313 - protein, 132 aa, Neisseria meningitidis
MAKTNNKPETAETAAPSFEDIKAELDAVQAELAAARNDVEMLTTALEKAEDDKKALSAELAELKVQHTQRAADALADSRDVMLVSTGADGKEFWRGGLLFDGGWREVKRAEVGEAVWKAICAEPMLQRKAVE

SEQ ID NO: 30314 - protein, 273 aa, Neisseria meningitidis; identical to SEQ ID NO: 15186

SEQ ID NO: 30315 - protein, 217 aa, Neisseria meningitidis
  misc_feature 212, 213: 'Xaa' is any amino acid
MSTFFRQTAQAMIAKHIDRFPLLKLDQVIDWQPIEQYLNRQKNRYLRDHRGRPAYPLLSMFKAVLLGQWHSLSDPELEHSLITRIDFNLFCRFDELIIPDYSTLCRYRNWLAQDDTLSELLKLINCQLTEKGLKIEKASAAVVDATIIQTAGSKQRQAIEVDEEGQISGQTTPSKDSDARWIKKNGLYKLGYKQHTRTDAEGYIEKLHITPXXHTLN

SEQ ID NO: 30316 - protein, 276 aa, Neisseria meningitidis
LQRSQVALVVTESTVGLEIPAAKAIRRAGIAVIIANPRQTHQFAQSQPLTKTDAKDAKMPAFFAQMTAQKEDSQTMPYQPPTEAEEVLEALVNRRNQPADMRTAEKNRLHQVHETQVGSVKQLIAHFDRLIDELDKQIDDHTHTHFDGKAQVAEQIKGIGSITTATLMAMLPELGRLSHKRIASLVGIAPHPRESGETKFKSRCFGGRSAVLKALYMATVAATRFEPLIRDFYQRLLSEGKPYKVAVTACMRKLLTISNARMRDYFAENDTAENGI

SEQ ID NO: 30317 - protein, 570 aa, Neisseria meningitidis
MKASQFFISTLKEAPAEAALASHKLMIRAGLIKANASGLYTWMPMGLRVLRKVENVVREEMARAGSVELLMPVVQPAELWQESGRWEFYGKELLRLKDRHDRDFCMGPTCEEVIADIVRKEINSYKQLPKNFYHIQTKFRDEVRPRFGVMRAREFVMKDAYSFHADYASLQTTYDAMYDAYCRIFTRLGLEFRPVAADTGSIGGTGSHEFQVLAESGEDVIAYSDTSDYAANIELAPTLPLKGERAAAQAELVKVHTPNVKTIESLVEFLNIPVEQTLKSIVVEGENEGEIVLLLLRGDHEFNDIKAEKLAGVKSPLTMASPAAIVEQFGANGGSLGPVSFAGKVYADFATEKGADWVIGANEDGYHYTSFNFGRDAAEPEFVDLRNVVEGDESPDGQGRLKLARGIEVGHVFQLRDKYTQAMNVSFLDNNGKSQIMEMGCYGIGITRVVAAAIEQNNDEKGIIWTKAMAPFEVVIVPMNYKKSDTVREAADKIYAELLAAGADVLLDDRDERAGVLLNDSELLGIPHRIVIGDRALKEGNVEYAERRNNEAQAVAIGEIVARVTASLNA

SEQ ID NO: 30318 - protein, 151 aa, Neisseria meningitidis
MKKPKILFVCLGNICRSPMAEYILRRRAAEAGIPLEADSAGTSGWHDGEDMHRETAKILKKYGIDASGFTSRKIRQSDAAAFDCIIAMDGKNLSELERTFGRRSEKIFKLTDLIPESGYDHVPDPWYTGDFEETFRLADAGCRALLEKISK

SEQ ID NO: 30319 - protein, 115 aa, Neisseria meningitidis; identical to SEQ ID NO: 1985

SEQ ID NO: 30320 - protein, 618 aa, Neisseria meningitidis
MLNKIFSWFESRIDPYPEAAPKTPEKGLWRFIWSNMAGVRKWIAALAALTAGIGIMEALVFQFMGKIVEWLGKYAPAELFAEKGWELAAMAAMMVFSVAWAFAASNVRLQTLQGVFPMRLRWNFHRLMLNQSLGFYQDEFAGRVSAKVMQTALALRDAVMTVADMVVYVSVYFITSGVILASLDSWLLLPFIGWIVGFASVMRLLIPKLGQTAAWQADARSLMTGRITDAYSNIATVKLFSHGAREAAYAKQSMEEFMVTVRAQMRLATLLHSCSFIVNTSLTLSTAALGIWLWHNGQVGVGAVATATAMALRVNGLSQYIMWESARLFENIGTVGDGMATLSKPHTILDKPNALPLKVSQGEIKFEHVDFCYEAGKPLLNGFNLTIRPGEKVGLIGRSGAGKSTIVNLLLRFYEPQSGTVSIDGQDISGVTQESLRAQIGLVTQDTSLLHRSVRDNIIYGRPDATDAEMVSAAERAEAAGFIPDLSDAKGRRGYDAHVGERGVKLSGGQRQRIAIARVMLKDAPILLLDEATSALDSEVEAAIQESLDKMMDGKTVIAIAHRLSTIAAMDRLVVLDKGRIIEEGTHAELLEKRGLYAKLWAHQSGGFLNEHVEWQHD

SEQ ID NO: 30321 - protein, 1043 aa, Neisseria meningitidis
MQNMKNQVRGSGMDARSNPANVSDGLQNSSGHIGTNTRYRLTKLGEQMARLPIDPKIARILLAAKKHDCMAEILVIASALSIQDPRERPLEARDAAAKAHERFTDKQSDFLAYLNIWDSFQRERDKGLSNKQLVQWCRQYFLSHLRMREWRELHHQLAQTAIEMGLTTKEAAFRQPPSQEQLRPSESQGDQDLAAKLKQKQLDKKQHRAQIRAAKEAGYEQIHRALLTGLIANVGMKSPDGNDYTGARGSRFHLFPASALFKAKPKWVMAAELVETTKLYARDVAAIQPEWIEQEAPHLVRYHYFEPHWEQKRGEVVASERVTLYGLTVLPRRPVPYGKVAPEEAREIFIRSALVAQECDLKADFFVHNKKLIKEITELEHKSRKQDVLVDDEALFAFYHERLPDFYTADAVSDDLHPTNPQQTAPSYAREERREGKTVAAQTNFSATAANPLPNPLPQEREQSAAASAVSNDLHPANPQQTAPSPVGEGRGEGKTVASQTNFSATTANPLPNPLPQEGEQSAAASAVSNDPKPKKQPAPPKGRLKPLPLADIRTFQAWIKTAERDNLRLLFLSRDDLMQHAAAHITEEQFPKFWQTADGKFKLSYRFEPHHPLDGVTLTLPLTVLNRISPAALEWLVPGMIREKIQIQIKALPKQIRRICVPVPEFITQFLSQNPDRNAPILPQLAQAIAKTAGDIRILEQINQDEWAAFRLPEHCYFNLRIIDDGGQELAIGRDLIQIQQQLGKAATTTFRDNTQEFERDNVTTWDIGILPESIKFARGKQQLTGYLGLQKEKDGRIALRLFDTSAAAEQAHRQGVIELMKLQLKEQVKDLNKGIQGQGFTQAAMLLKHINADTLRDDLTQAVCDRAFIGEDELPRNEKAFKEQIKRARSRLPAVKEALSRYLQETAAAYAELNGKLGKHPLTHLLRLRLQTLLAAGFATRTPWAQWPRLPIYLKTMTLRLEKYSSNPARDAAREADTQELEQMWQEKTDSLIKQGLPISDGLAAFKWMIEELRVSLFAQELKTPYPVSVKRLLKEWEDLN

SEQ ID NO: 30322 - protein, 102 aa, Neisseria meningitidis
MKTVPTILISILLATALPASAHGMHKSKPLTMDELPPICQQYFKRAETCYNKAGNKADFARNNTKFLFQALPAADLGQRKQMCQIAMDSFAEKTRISNSNAV

SEQ ID NO: 30323 - protein, 146 aa, Neisseria meningitidis
  misc_feature 140, 141: 'Xaa' is any amino acid
MEISPWTLRSAKLEKEHKRLQESLTSLGNGYMGMRGSFEETYSADSHLGNYIAGVWFPDKTRVGWWKNGYPKYFGKAINALNFSKVKIFVDGQEVDLAKNGVAGFSVELDMQHGVLRRSFTVFGVRFDVCKFLSVAQKEXXTHLIN

SEQ ID NO: 30324 - protein, 94 aa, Neisseria meningitidis; identical to SEQ ID NO: 30244

SEQ ID NO: 30325 - protein, 84 aa, Neisseria meningitidis; identical to SEQ ID NO: 3897

SEQ ID NO: 30326 - protein, 238 aa, Neisseria meningitidis
MKTKLPLFIIWLSVSAACSSPVSRNIQDMRLEPQAEAGSSDAIPYPVPTLQDRLDYLEGTLVRLSNEVETLNGKVKALEHAKTHPSSRAYVQKLDDRKLKEHYLNTEGGSASAHTVETAQNLYNQALKHYKSGRFSAAASLLKGADGGDGGSIAQRSMYLLLQSRARMGNCESVIEIGGRYANRFKDSPTAPEAIFKIGECQYRLQQKDIARATWRSLIQAYPSSPAAKRAAAAVRKR

SEQ ID NO: 30327 - protein, 280 aa, Neisseria meningitidis; identical to SEQ ID NO: 986

SEQ ID NO: 30328 - protein, 468 aa, Neisseria meningitidis
VEFSTKTEILQEQQAGAQLFVCTEEAQLNHPTALALLSSLEEGQNFADTKIPTGNGLQAVAVCCLKSTGRAALNKAAAEAAKWAQNQETVNVDIHAFDEAQAAAVAEAFAIAFGNAAYRFDRYKKEAKPAKFETAVFHSAHEAVVKEALRVAEAQVYGQSLCRDLGNAAPNECTPEFLARTAKAEAEKLGAHAKIIEKDYIKENMGSFWSVAKGSAEAPYLVELSYFGAADKEAAPVVLVGKGITFDTGGISLKPGLNMDEMKFDMCGAATVISTFCAAVKLQLPINLIAVVATCENMPSGAANKPGDVVKSMKGLTIEVLNTDAEGRLILCDALTYAEQFKPKAVIDVATLTGACIVALGHDVSGVMGNNQDLIDSLLAASYNVDDKAWQLPLFETYKDQLKSNFADIPNIGTPGAGTITAATFLSYFTEDYPWAHLDIAGTAWKSGAEKGATGRPVPLLLNYLRNL

SEQ ID NO: 30329 - protein, 94 aa, Neisseria meningitidis; identical to SEQ ID NO: 944

SEQ ID NO: 30330 - protein, 363 aa, Neisseria meningitidis; identical to SEQ ID NO: 22177

SEQ ID NO: 30331 - protein, 92 aa, Neisseria meningitidis
  misc_feature 87, 88: 'Xaa' is any amino acid
MTEYPGIGSSLFYGVFFAAVLVMIALDMFSLKKNGSHKVGVKEALAWSGLWVAVSCLFAGWLYFELAGNPGYGAAVAKRKSIGILYXXHTLN

SEQ ID NO: 30332 - protein, 201 aa, Neisseria meningitidis
MPSEMQIIRPIVLFVTFIFAACSAKNQPSDEDRQSFARIAVDLFRSACVLTQGSFESVSKFAAVGHFVPVGKEDLSRLPPAVAEPDVQALWTLERDGGIYYLSLPRDSCSVKAERADSAALLEHFDGLIRQPPKNTNIELRAEQSVQAPFETRQIGYAWRETGSPEETVLTAQTADSSDLPVQAVLNLTHRSHNGKPLILP

SEQ ID NO: 30333 - protein, 321 aa, Neisseria meningitidis
MSYTQLTQGERYHIQYLSRHCTVTEIAKQLNRHKSTISREIRRHRTQGQQYSAEKAQRQSQTIKQRKRQPYKLDSQLIQHIDTLIRRKLSPEQVCAYLCKHHQFTLHHSTIYRYLRQDKSNGSTLWQHLRICSKPYRKRYGSTWTRGKVPNRVGIENRPAIVDQKSRIGDWEADTIVGKGQKSALLTLVERVTRYTIICKLDSLKAEDTAWAAVRALKAHKDRVHTITMDNGKEFYQHTKITKALKAETYFCRPYHSWEKGLNENTNGLIRQYFPKQTDFRNISDREIRRVQDELNHRPRKTLGYETPSVLFLNLFQPLIH

SEQ ID NO: 30334 - protein, 462 aa, Neisseria meningitidis; identical to SEQ ID NO: 5225

SEQ ID NO: 30335 - protein, 184 aa, Neisseria meningitidis
  misc_feature 3, 4: 'Xaa' is any amino acid
VCXXFSCIGVDPHGINDHPDLSGLRYGKIAILSDADVDGSHIQVLLLTLFYRHFPKLVADGHIYVAQPPLFRVDVNAQGKSKPARKFYALDQNELDSILERLQKEGVKETAYSISRFKGLGEMNPDQLKDTTMHPDTRRLLQVQIPEGADDETRDIFVKLMGKGEAAARRAWMEREGDTAELDI

SEQ ID NO: 30336 - protein, 179 aa, Neisseria meningitidis
MNIIDTAIPDVKLLEPQVFGDARGFFMETFRDEWFKTQVCERTFVQENHSKSGKGVLRGLHYQTENTQGKLVRVVVGEVFDVAVDMRKDSPTFGKWVGEILSAENKRQLWVPEGFAHGFYVLSDEAEFVYKCTDYYKPEAEQVLIWNDPAIGIDWPLQTEPNLSPKDLAGKVLAEAVTF

SEQ ID NO: 30337 - protein, 163 aa, Neisseria meningitidis
MKYRRFYRNGGTYFFTVVANKRQRILTDDAVRLALRQAVMAVRERYPFEILAWVLMPDHLHTIWRLPDNDSAYSERWRQIKRHSKYLIGGNLRLWQKRFWEHTIRDEADFACHFDYLHFNPVKHGYVGQISDWRFSTFHRYVKQGIYPHNWGGGNADFSIEYD

SEQ ID NO: 30338 - protein, 108 aa, Neisseria meningitidis
LDQARALNVNGRFVFESVNFQGHINKESPRVAMQRAGLDTTAHGLRLLARTYLREVLKVDNDVAEKLLAHSLGTRTQTAYNRSELWEERKDALERWGNDVLRLAKNGK

SEQ ID NO: 30339 - protein, 260 aa, Neisseria meningitidis
  misc_feature 3, 4: 'Xaa' is any amino acid
VCXXVQDIAILTGGTVIAEEVGLSLEKATLDDLGQAKRIEIGKENTTIIDGFGDAAQIEARVAEIRQQIETATSDYDKEKLQERVAKLAGGVAVIKVGAATEVEMKEKKDRVEDALHATRAAVEEGVVAGGGVALLRARAALENLHTGNADQDAGVQIVLRAVESPLRQIVANAGGEPSVVVNKVLEGKGNYGYNAGSGEYGDMIEMGVLDPAKVTRSALQHAASIAGLMLTTDCMIAEIPEEKPAMPDMGGMGGMGGMM

SEQ ID NO: 30340 - protein, 225 aa, Neisseria meningitidis; identical to SEQ ID NO: 25428

SEQ ID NO: 30341 - protein, 214 aa, Neisseria meningitidis; identical to SEQ ID NO: 3176

SEQ ID NO: 30342 - protein, 501 aa, Neisseria meningitidis
MCCSLSFAEPARIDDRIIKFRPSKSKFFESTGYRKINNEFSKFTEAANVEHIPTGAKARINAKITASVSRAAVLSGVGKLVRQGAKFSTRAVPYVGTALLAHDVYETFKEDIQARGYQYDTETDKFVKGYEYSNCLWYEDERRINRTYGCYGVDSSIMRLMSDYSRFPEVKELMESQMERLARPYWEKLRNRPDMYYFKNYNFKRCYFGLNGGDCLVAKGDDGRTFISFSLQGNSKYKEEMDAKKLEEILSLKVDANPDKYIKATGYPGYSEKVEVAPGTKVNMGPVTDRNGNPVQVVATFGRDSQGNTTVDVQVIPRPDLTPGSAEAPNAQPLPEVSPAENPANNPAPNENPGTRPNPEPDPDLNPDANPDTDGQPGTSPDSPAVPDRPNGRDGKDGGLLCKFFPDILACDRLPEPNPAEDLNLPSETVNVEFKKSGIFQDSAQCPAPVTFTITVLDSSKQFAFSFENACTIAERLRYMLLALAWAVAAFFCIRTVSREV

SEQ ID NO: 30343 - protein, 45 aa, Neisseria meningitidis; identical to SEQ ID NO: 645

SEQ ID NO: 30344 - protein, 68 aa, Neisseria meningitidis
MAIVSTPHPALSALIILAHYHGIAAKSLGLKAKVVRQPVKRLAMVTLPALVWCDDGNHFKEKWLFSAF

SEQ ID NO: 30345 - protein, 245 aa, Neisseria meningitidis
MIILDKVSKHYQTRDKTRFAAVEPTSLEIRDGEIFGLMGYSGAGKSTLLRLINLLERPDTGKVNVCGQELTALDAAALRQARQNIGMVFQQFNLLSNRTVADNVAFPLEIAGWPSEKIKARVAECLEIVGLTERAGHYPAQLSGGQKQRVGIARALAPKPQVILADEPTSALDPATTRSVLECLEDINKRFNVTIVIVTHEMSVIRRLCDRAALLDKGKVVEIVEVRGNQIHAQSDIGRELIRED

SEQ ID NO: 30346 - protein, 170 aa, Neisseria meningitidis; identical to SEQ ID NO: 2052

SEQ ID NO: 30347 - protein, 107 aa, Neisseria meningitidis; identical to SEQ ID NO: 2467

SEQ ID NO: 30348 - protein, 323 aa, Neisseria meningitidis; identical to SEQ ID NO: 3380

SEQ ID NO: 30349 - protein, 108 aa, Neisseria meningitidis; identical to SEQ ID NO: 3002

SEQ ID NO: 30350 - protein, 103 aa, Neisseria meningitidis
MFDGEVEVDESYFGGQRKGKRGRGAADKVAVFGLLKRNGKVYTVTVPNTQTATLFPIIREQVKPDSIVYTDCYRSYDVLDVREFSHFSFAETSFSYQSQPPFC

SEQ ID NO: 30351 - protein, 716 aa, Neisseria meningitidis
MLTDLEKNAIRDHYQNIGKNLPGFRPRASQREMIAAVANAFSRTLAREEGGEPPKREGESIAVIEGPTGVGKSLAYLLAGGIMAQTRGKRLIVSSATVALQEQLVDRDLPFLVEKSGLELSFALAKGRGRYLCPYKLYQLTQSNAQQNLLGFEAPAVLWDSKPKPEELKLLRDIADEFSARRFNGDRDAWPEKIDDAIWLKVTNDRHGCLKTACPNRPECPFYLARDVLETVDVVVANHDLLLADISMGGGVILPAPENSFYCIDEAHHLPKKALSRFAAEHSWNIAVWTLEKLPQLTGKIAALTDKAELANLADEAAASLLDSLHEWQFHLAEEPSLSMGPSENDRRTNSEPTWLWEDGKIPEGLETTVSNTAIAARSLLKHVIGLNDALSAARREKEQDGALLDRLTGEFGIFIVRIEQISAVWDLLSTVPLEGEEPLAKWITRRADDKNDYIFNASPISSASHLANSLWRRAAGAVLTSATLQSLGNFNLMLRQTGLQWLPETTTLALKSPFDFEKQGELYIPPIYASPKDPEAHTAAVIEWLPKLISPTEAIGTLVLFSSRKQMQDVALRLPGDYLPLLLVQGELPKAVLLQKHHRAIEEGKASIIFGLDSFAEGLDLPGTACVQVIIAKLPFAMPDNPIEKTQNRWIEQRGGNPFIEITVPEAGIKLIQAVGRLIRTEQDYGRVTILDNRIKTQRYGQQLLAGLPPFKRIG

SEQ ID NO: 30352 - protein, 335 aa, Neisseria meningitidis
MSTFFRQTAQAMIAKHIDRFPLLKLDQVIDWQPIEQYLNRQKNRYLRDHRGRPAYPLLSMFKAVLLGQWHSLSDPELEHSLITRIDFNLFCRFDELIIPDYSTLCRYRNWLAQDDTLSELLKLINCQLTEKGLKIEKASAAVVDATIIQTAGSKQRQAIEVDEEGQISGQTTPSKDSDARWIKKNGLYKLGYKQHTRTDAEGYIEKLHITPANAHECKHLPPLLEGLPKDTTVYADKGYDSAENRQHLEEHQLQDGIMRKTCRNRPLSEAQTKRNRYLSKTRYVVEQSFGTLHRKFRYARAAYFGLIKVSAQSHLKAMCLNLLKAANRLSAPAAA

SEQ ID NO: 30353 - protein, 227 aa, Neisseria meningitidis; identical to SEQ ID NO: 4916

SEQ ID NO: 30354 - protein, 157 aa, Neisseria meningitidis
LLDSHEGGYVNHPKDPGGETNWGITKRTAQANGYNGSMRAMTREQAIGIYRKAFWERYRADQMPEAVAFQFFDACVNHGYGNAARMLQRAAGVPDDGIIGEISLKAINSLPENDLLLRFNAERLVFYTKLGTFTSFGKGWVRRVAQNLIHASADNTD

SEQ ID NO: 30355 - protein, 693 aa, Neisseria meningitidis; identical to SEQ ID NO: 24210

SEQ ID NO: 30356 - protein, 525 aa, Neisseria meningitidis; identical to SEQ ID NO: 18544

SEQ ID NO: 30357 - protein, 311 aa, Neisseria meningitidis; identical to SEQ ID NO: 15099

SEQ ID NO: 30358 - protein, 474 aa, Neisseria meningitidis
MDTKEILGYAAGSIGSAVLAVIILPLLSWYFPADDIGRIVLMQTAAGLTVSVLCLGLDQAYVREYYAAADKDTLFKTLFLPPLLSAAAIAALLLSRPSLPSEILFSLDDAAAGIGLVLFELSFLPIRFLLLVLRMEGRALAFSSAQLVSKLAILLLLLPLTVGLLHFPANTAVLTAVYALANLAAAAFLLFQNRCRLKAVRRAPFSSAVLHRGLRYGIPIALSSIAYWGLASADRLFLKKYAGLEQLGVYSMGISFGGAALLFQSIFSTVWTPYIFRAIEANAPPARLSATAESAAALLASALCLTGIFSPLASLLLPENYAAVRFIVVSCMLPPLFCTLVEISGIGLNVVRKTRPIALATLGALAANLLLLGLAVPSGGARGAAVACAASFWLFFVFKTESSCRLWQPLKRLPLYMHTLFCLASSAAYTCFGTPANYPLFAGIWAAYLAGCILRHRKDLHKLFHYLKKQGFPL

SEQ ID NO: 30359 - protein, 290 aa, Neisseria meningitidis; identical to SEQ ID NO: 2039

SEQ ID NO: 30360 - protein, 216 aa, Neisseria meningitidis; identical to SEQ ID NO: 3431

SEQ ID NO: 30361 - protein, 915 aa, Neisseria meningitidis
MKQQHLFRLNILCLSLMTALPVYAENVQAGQAQEKQLDTIQVKAKKQKTRRDNEVTGLGKLVKTADTLSKEQVLDIRDLTRYDPGIAVVEQGRGASSGYSIRGMDKNRVSLTVDGLAQIQSYTAQAALGGTRTAGSSGAINEIEYENVKAVEISKGSNSVEQGSGALAGSVAFQTKTADDVIGEGRQWGIQSKTAYSGKNRGLTQSIALAGRIGGAEALLIHTGRRAGEIRAHEAAGRGVQSFNRLVPVEDTNQYANFIVEEECESGNYETCKANPKKDVVGKDERQTVSTRDYTGPNRFLADPLSYESRSWLFRPGFRFENKRHYIGGILERTQQTFDTRDMTVPAFLTKAVFDENKKQAGSLSGNGKYAGDHKYGGLFTNGENGALVGAEYGTGVFYDETHTKSRYGLEYVYTNADKDTWADYARLSYDRQGIGLDNHFQQTHCSADGSDKYCRPSADKPFSYYKSDRVIYGESHRLLQAAFKKSFDTAKIRHNLSVNLGFDRFGSDLRHQDYYYQNANRAYSSKIPTQNGNQNISPNGSQDKPYWVSIGGGNVVTGQICRLGNNTYTDCTPRSINGKSYYAAVRDNVRLGRWADVGAGLRYDYRSTHSDDGSVSTGTHRTLSWNAGIVLKPADWLDLTYRTSTGFRLPSFAEMYGWRSGDKIKAVKIDPEKSFNKEAGIVFKGDFGNLEASWFNNAYRDLIVRGYEAQIQNGKETAKGDPAYLNAQSARITGINVLGKIDWNGVWDKLPEGWYSTFAYNRVRVRDIKKRADRTDIQSHLFDAIQPSRYVVGLGYDQLEGKWGVNGMLTYSKAKEITELLGSRALLNGNSRNTKATARRTRPWYIVDVSGYYTIKKHFTLRAGVYNLLNYRYVTWENVRQTAGGAVNQHKNVGVYNRYAAPGRNYTFSLEMKF

SEQ ID NO: 30362 - protein, 139 aa, Neisseria meningitidis; identical to SEQ ID NO: 8720

SEQ ID NO: 30363 - protein, 106 aa, Neisseria meningitidis; identical to SEQ ID NO: 3331

SEQ ID NO: 30364 - protein, 429 aa, Neisseria meningitidis; identical to SEQ ID NO: 26325

SEQ ID NO: 30365 - protein, 130 aa, Neisseria meningitidis; identical to SEQ ID NO: 425

SEQ ID NO: 30366 - protein, 194 aa, Neisseria meningitidis
MHILTAGVDEAGRGPLVGSVFAAAVILPETFDLPGLTDSKKLSEKKRDALAEMIKNQAVAWHVAAATPEEIASLNILHATMLAMKRAVDGLAVRPERIFIDGNRIPEHLNIPAEAVVKGDSKIIEISAASVLAKTARDAEMYALAQRHPQYGFDKHKGYGTKQHLEALKQYGVLPEHRRDFAPVRNLLAQQALF

SEQ ID NO: 30367 - protein, 217 aa, Neisseria meningitidis
MKITHCKLKKKVQKELLRFFVLEVTARSAADILGIHPNSAALFYRKIRTVINHHLALAADEVFEDPVEPDESDFGGRRKGRRGRGAAGKVVVFGILKRNGRVYTVVVDNAKSETLLPVIKKKIMPDSIVYTDSLSSCDKLDVSGFIHYRINHSKEFADRQNHINGIENFWNQAKRVLRKYNGIDCKSFPLFLKECEFRFNFGTPSQQLKILRDWCGI

SEQ ID NO: 30368 - protein, 209 aa, Neisseria meningitidis
LVRTADGYKAIAHIQAGDRVLSKDEASGETGYKPVTTRYGNPYQETVYIEISDGIGNNQTLISNRIHPFYSGGKWIKAEDLKAGSRLFAESGKTQTVRNIIVKPKPLKAYNLTVADWHTYFVKGDRAETEGVWVHNSCPPKRTGSSKNEKHGDGGRSQISAESRIAELKNKIIPGMPKNKRLKIEKTIKNITKNANRKAKGEEHGRRGR

SEQ ID NO: 30369 - protein, 119 aa, Neisseria meningitidis; identical to SEQ ID NO: 9294

SEQ ID NO: 30370 - protein, 405 aa, Neisseria meningitidis
MTHTASKTPKFWLTITAAAFILLITIGMRMTLGLFVQPVVNTTELSIAQFSLIIAVFQLMWGISQPLSGALADRFGAFRVLSGGAVLLVCACLIAPNIPTYWGLMIAVGLLLAFGTGSGGFSIIMGQVAAQVPAHKRGLASGLVNAGGSAGQFLFAPLVQGLVVLPEVGWTGTFYVWGAIALLILPVSWWLAGGNNAAHTQHSQATHGQSLGEAVKTAFKTPSYILLHLSFFACGFHIAFLVTHLPTEVALCGLPATVASTAIAIIGLANIAGCVFSGWCTSRVRGKYVLFGLYASRAAMILIYIFSPKTDLNFYIFAAALGFTWLATVTPTASITGKLFGTRYLATLFGLTMLSHQIGGFLGSYIGGIVITQFGDYGWMWYADALLAGTAALLNLPIREPRTAA

SEQ ID NO: 30371 - protein, 212 aa, Neisseria meningitidis
MQTAIIDYGMGNLHSVLKSVRTAGQLAGKNTEIFLSGDPERVSRADKVIFPGQGAMPDCMAALTRDGLDEAVKDALKNKPFFGICVGAQLLFDHSEEGNTDGLGWFGGKVRRFARDLRDRQGCRLKVPHMGWNTVRQTQNHPLFKDIPQDTRFYFVHSYYFAPENPETILGESDYPSPFACIVGKDNVFATQFHTEKSHDAGLTMLKNFLNW

SEQ ID NO: 30372 - protein, 103 aa, Neisseria meningitidis
MFDGEVEVDESYFGGQRKGKRGRGAADKVAVFGLLKRNGKVYTVTVPNTQTATLFPIIREQVKPDSIVYTDCYRSYDVLDVREFSHFSFAETSFSYQSQHTFC

SEQ ID NO: 30373 - protein, 69 aa, Neisseria meningitidis; identical to SEQ ID NO: 4226

SEQ ID NO: 30374 - protein, 209 aa, Neisseria meningitidis; identical to SEQ ID NO: 1847

SEQ ID NO: 30375 - protein, 358 aa, Neisseria meningitidis
MKKSLIALTLAALPVAAMADVTLYGTIKAGVEVSRVKGANAYKAQGGKSKTATQIADFGSKIGFKGQEDFGNGMKAIWQLEQKASIAGTNSGWGNRQSFIGLKGDFGTVRAGNLNTVLKDSGDNVNAWESSSNTEDVLGLGTIGRVESREISVRYDSPVFAGFSGSVQYVPRDNANDVDKYTHKLSSRESYHAGLKYENAGFFGQYAGSFAKYADLNNDAERVAAGKDNPVKDYQVHRVVAGYDANDLYVSVAGQYEAAKNNDGSANQGKKHEQTQVAATAAYRFGNVTPRVSYAHGFKAKVNGVKDANRQYDQVIVGADYDFSKRTSALVSAGWLKEGKGAEKVEKTASMVGLRHKF

SEQ ID NO: 30376 - protein, 498 aa, Neisseria meningitidis
VKPLRRLTNLLAACAVAAAAFGQPALAADLAQDPFITDNAQRQHYEPGGKYHLFGDPRGSVSDRTGQINVIQDYTHQMGNLLIQQAAIQGNLGYTVRFSGHGHEEHAPFDNHAADSASKEQGNVDEGFTVYRLNWEGHEHHPADAYDGPKGGNYPKPTGARDEYTYHVNGTARSIKLNPTDTRSIRQRISDNYNNLGSNFSDRADEANRKMFEHNAKLDRWGNSMEFINGVAAGALNPFISAGEALGIGDILYGTRYAIDKAAMRNIAPLPAEGKFAAIGGLGSVAGFEKNTREAVDRWIQENPNAAETVEALVNVLPFAKVKNLTKAAKPGKAAVSGDFSAAYNTRTTRKVTTETEGLNRIRQNQKNSNIHEKNYGRDNPNHINVLSGNSIQHILYGDEAGGGHLFPGKPGKTTFPQHWSASKITHEISDIVTSPKTQWYAQTGTGGKYIAKGRPARWVSYETRDGIRIRTVYEPATGKVVTAFPDRTSNPKYNPVK

SEQ ID NO: 30377 - protein, 123 aa, Neisseria meningitidis
  misc_feature 118, 119: 'Xaa' is any amino acid
MNILLLDGGKAFGHSHGGLNRTLHKKAKEVLTALGHNVQETVIDAGYDVEAEIEKFVWMDAVIWQMPGWWMHEPWTVKKYIDEVLTAGHGKLYQSDGRHSVNPTEGYGTGGLLQGKKXXHTLN

SEQ ID NO: 30378 - protein, 181 aa, Neisseria meningitidis; identical to SEQ ID NO: 2183

SEQ ID NO: 30379 - protein, 458 aa, Neisseria meningitidis
MKHIHIIGIGGTFMGGIAAIAKEAGFEVSGCDAKMYPPMSTQLEALGIGVHEGFDAAQLEEFKADVYVIGNVAKRGMDVVEAILNRGLPYISGPQWLAENVLHHHWVLGVAGTHGKTTTASMLAWVLEYAGLAPGFLIGGVPENFSVSARLPQTPRQDPNSQSPFFVIEADEYDTAFFDKRSKFVHYRPRTVVLNNLEFDHADIFADLGAIQTQFHHLVRTVPSEGLIICNGQQQSLQDTLDKGCWTPVEKFGTEHGWQAGEANADGSFDVLLDGKTAGRVKWDLMGRHNRMNALAVIAAARHVGVGIQTACEALGAFKNVKRRMEIKGTANGITVYDDFAHHPTAIETTIQGLRQRVGGARILAVLEPRSNTMKLGTMKSALPVSLKEADQVFCYAGGVDWDVAEALAPLGGRLNVGKDFDAFVAEIVKNAEVGDHILVMSNGGFGGIHGKLLEALR

SEQ ID NO: 30380 - protein, 128 aa, Neisseria meningitidis; identical to SEQ ID NO: 1074

SEQ ID NO: 30381 - protein, 307 aa, Neisseria meningitidis
MTKTEPNNVQLDWLESESIHIIREVAAECENPALLFSGGKDSVVLLALACKAFRLGSRPVKLPFPLVHIDTGHNYPEVIAFRDAQAAKLNARLIVGRVEDSIAKGTVVLRKETDSRNAAQAVTLLETIEANGFDALMGGARRDEEKARAKERIFSFRDEFGQWDPKAQRPELWSLYNTRLHKGENMRVFPISNWTELDIWQYIARENLELPPIYYSHRREVVRRRGLLVPVTPLTPKMPSETSEILDVRFRTVGDISCTCPVESTASTPTEIIRETAVADISERSATRLDDQASEAAMEKRKKEGYF

SEQ ID NO: 30382 - protein, 103 aa, Neisseria meningitidis; identical to SEQ ID NO: 1558

SEQ ID NO: 30383 - protein, 467 aa, Neisseria meningitidis; identical to SEQ ID NO: 8430

SEQ ID NO: 30384 - protein, 444 aa, Neisseria meningitidis
MTDLNTLFANLKQRNPNQEPFHQAVEEVFMSLDPFLAKNPKYTQQSLLERIVEPERVVMFRVTWQDDKGQVQVNRGYRVQMSSAIGPYKGGLRFHPTVDLGVLKFLAFEQVFKNALTTLPMGGGKGGSDFDPKGKSDAEVMRFCQAFMTELYRHIGADTDVPAGDIGVGGREIGYLFGQYKKIRNEFSSVLTGKGLEWGGSLIRPEATGYGCVYFAQAMLQTRNDSFEGKRVLISGSGNVAQYAAEKAIQLGAKVLTVSDSNGFVLFPDSGMSEAQLAALIELKEVRRERVATYAKEQGLQYFENQKPWGVAAEIALPCATQNELDEEAAKTLLANGCYVVAEGANMPSTLGAVEQFIKAGILYAPGKASNAGGVATSGLEMSQNAIRLSWTREEVDQRLFGIMQSIHESCLKYGKVGDTVNYVNGANIAGFVKVADAMLAQGF

SEQ ID NO: 30385 - protein, 90 aa, Neisseria meningitidis; identical to SEQ ID NO: 1115

SEQ ID NO: 30386 - protein, 333 aa, Neisseria meningitidis; identical to SEQ ID NO: 7958

SEQ ID NO: 30387 - protein, 305 aa, Neisseria meningitidis; identical to SEQ ID NO: 6970

SEQ ID NO: 30388 - protein, 41 aa, Neisseria meningitidis
LTLLFRNFSHNYLPLPSNALLVTCFVSKMPSESRISFQTAF

SEQ ID NO: 30389 - protein, 344 aa, Neisseria meningitidis; identical to SEQ ID NO: 10896

SEQ ID NO: 30390 - protein, 521 aa, Neisseria meningitidis
MTQDKILILDFGSQVTQLIARRVREAHVYCELHSFDMPLDEIKAFNPKGIILSGGPNSVYESDYQADTGIFDLGIPILGICYGMQFMAHHLGGEVQPGNQREFGYAQVKTIDSGLTRGIQDDAPNTLDVWMSHGDKVSKLPDGFAVIGDTPSCPIAMMENTEKQFYGIQFHPEVTHTKQGRALLNRFVLDICGAQPGWTMPNYIEEAVAKIREQVGSDEVILGLSGGVDSSVAAALIHRAIGDQLTCVFVDHGLLRLNEGKMVMDMFARNLGVKVIHVDAEGQFMAKLAGVTDPEKKRKIIGAEFIEVFDAEEKKLTNAKWLAQGTIYPDVIESAGAKTKKAHAIKSHHNVGGLPENMKLKLLEPLRDLFKDEVRELGVALGLTREMVYRHPFPGPGLGVRILGEVKKEYADLLRQADDIFIQELRNTTDENGTSWYDLTSQAFAVFLPVKSVGVMGDGRTYDYVVALRAVITSDFMTAHWAELPYSLLRRVSNRIINEVKGINRVVYDVSGKPPATIEWE

SEQ ID NO: 30391 - protein, 140 aa, Neisseria meningitidis; identical to SEQ ID NO: 8860

SEQ ID NO: 30392 - protein, 322 aa, Neisseria meningitidis
MNEKTIILANPRGFCAGVDRAISIVERALEEFGAPIYVRHEVVHNKFVVDNLREKGAVFIEDLAEVPPGATLVYSAHGVSKAVRQEAAERGFRVFDATCPLVTKVHKEVARLDAQDCEIIMIGHKGHVEVEGTMGQLAPGKMLLVETVGDVAKLEIKNPDKLAYVSQTTLSVDETKDIIAALNARFPNIRNPHKEDICYATTNRQTAVKELAEQCDIVIVVGSPNSSNSNRLREVAASRGIDAYMVDNAGYLQRAWFEGKNKVGVTAGASAPEVLVREVLATIRGWGHETVREGEGEEESIVFVLPKELRREGETKPDLCKR

SEQ ID NO: 30393 - protein, 60 aa, Neisseria meningitidis
LYAGHYGGNTVWEAAASRGIGTAAASRGIGTAGDAPMPSGVKAGQSAVWKKAMESVGRRS

SEQ ID NO: 30394 - protein, 100 aa, Neisseria meningitidis
VVYVDRRRTEQETFDFPPTYRHTVRLVTLVCVQAAAGADELAEEMLSLIGQLFAEHSDLGVGDLENLVPDLLNIDSDESGEAVTVYYQQGWQAIYFDTAV

SEQ ID NO: 30395 - protein, 942 aa, Neisseria meningitidis; identical to SEQ ID NO: 7300

SEQ ID NO: 30396 - protein, 174 aa, Neisseria meningitidis; identical to SEQ ID NO: 3281

SEQ ID NO: 30397 - protein, 277 aa, Neisseria meningitidis
MAIVKMKPTSAGRRGMVRVVTEGLHKGAPYAPLLEKKNSTAGRNSNGHITTRHKGGGHKHHYRVVDFKRNKDGIPAKVERIEYDPNRTAFIALLCYADGERRYIIAPRGIQVGAVLVSGAEAAIKVGNTLPIRNIPVGTTIHCIEMKPGKGAQIARSAGASAVLLAKEGAYAQVRLRSGEVRKINVDCRATIGEVGNEEQSLKKIGKAGANRWRGIRPTVRGVVMNPVDHPHGGGEGRTGEAREPVSPWGTPAKGYRTRNNKRTDNMIVRRRYSNKG

SEQ ID NO: 30398 - protein, 393 aa, Neisseria meningitidis
MKWAAVAAVAAAAVWGGWSYLKPEPQASYITETVRRGDISRTVSATGEISPSNLVSVGAQASGQIKKLYVKLGQQVKKGDLIAEINSTSQTNTLNTEKSKLETYQAKLVSAQIALGSAEKKYKRQAALWKENATSKEDLESAQDAFAAAKANVAELKALIRQSKISINTAESELGYTRITATMDGTVVAILVEEGQTVNAAQSAPTIIQLANLDMMLNKMQIAEGDITKVKAGQDISFTILSEPDTPIKAKLDSVDPGLTTMSSGGYNSSTDTASNAVYYYARSFVPNPDGKLATGMTTQNTVEIDGVKNVLLIPSLTVKNRGGKAFVRVLGADGKAAEREIRTGMRDSMNTEVKSGLKEGDKVVISEITAAEQQESGERALAARRAINEYAV

SEQ ID NO: 30399 - protein, 122 aa, Neisseria meningitidis; identical to SEQ ID NO: 218

SEQ ID NO: 30400 - protein, 187 aa, Neisseria meningitidis
MRHLENNGYANVAGLERILAVKTDNYKEKENLLHEIFSKSRIGDTELFAVDENLVKRLFLSLRGEIVFPKNETAESEFEKSVHERRQEGNAGSGRKQLLDLVRRGHREYPYALPRLLAGAASYKPKKSKIRLFKEAYLRKSGTRLTDEIADGIHIYTCFSRADLEKAYSEYLELFKSESDAEGRKPR

SEQ ID NO: 30401 - protein, 582 aa, Neisseria meningitidis; identical to SEQ ID NO: 8569

SEQ ID NO: 30402 - protein, 223 aa, Neisseria meningitidis; identical to SEQ ID NO: 1391

SEQ ID NO: 30403 - protein, 240 aa, Neisseria meningitidis; identical to SEQ ID NO: 1969

SEQ ID NO: 30404 - protein, 409 aa, Neisseria meningitidis; identical to SEQ ID NO: 11572

SEQ ID NO: 30405 - protein, 159 aa, Neisseria meningitidis; identical to SEQ ID NO: 2265

SEQ ID NO: 30406 - protein, 483 aa, Neisseria meningitidis
MPLLSVEFALFFLAFLPIYWGLAKYPSVQNLLLLAAGMGWLYHIGPVFAAIVVLYSSCVYLLGELLRSDRENTRRFWLGCGIAVSLTVLGFFKYFDFFRPLIAQYAGQGGAIDILMPLGLSYYTFQSIAYLVYCFRAPHAARFEWHELLLHLSFFPTVTSGPIIRAAAFKSADGEQAGALAQIRTHQPRSPVRPALAVSLILLGIAKKWWLAGMLAENWVSPVFENPAQFDGWGVLAGVYGYTFQLFLDFSGYSDLVIGMAMLLGFRLPKNFSAPLRAANIRAFWDKWHISLSTWIRDYIYIPLGGSKKGFLRTQFNLMAAMVLSGIWHGYGWNFLIWGALHGTALVLLNTGDRYFGRNALCRLKYLAPLSWFVTFHFVCLTFVVFNTAKPRRCRRGFQCPLCQCQRLECAATGGYAAACLVCIRDAALPLPATRFRRRGQRFGKNPDVAVVYPRFRRPAADYRIGPLGDTRLYLCQFLRVWT

SEQ ID NO: 30407 - protein, 305 aa, Neisseria meningitidis; identical to SEQ ID NO: 1198

SEQ ID NO: 30408 - protein, 116 aa, Neisseria meningitidis; identical to SEQ ID NO: 4624

SEQ ID NO: 30409 - protein, 405 aa, Neisseria meningitidis
MALIVHKYGGTSVGSPERIKNVAKRVAKARAEGHDIVVVVSAMSGETNRLVALAHEMQEHPDPRELDVVLSTGEQVTIGLLAMALKDIGVEAKSYTGWQVALKTDTAHTKARIESIDDEKMRADLAAGKVVIVAGFQGISSEGDISTLGRGGSDTSAVALAAALKADECQIYTDVDGVYTTDPRVVPEAHRMDTVTFEEMIELASLGSKVLQIRSVEFAGKYKVRLRVLSSLQDGGNGTLITFEEDDNMERAAVTGIAFDKNQARINVRGVPDKPGVAYQILGAIADANIEVDMIIQNVGSEGTTDFSFTVPRGDYKQTLEILSERQDSIGAASIDGDDTVCKVSAVGLGMRSHVGVAAKIFRTLAEEGINIQMISTSEIKVSVLIDEKYMELATRVLHKAFNLG

SEQ ID NO: 30410 - protein, 90 aa, Neisseria meningitidis; identical to SEQ ID NO: 3546

SEQ ID NO: 30411 - protein, 274 aa, Neisseria meningitidis; identical to SEQ ID NO: 3058

SEQ ID NO: 30412 - protein, 88 aa, Neisseria meningitidis
MQVLKKVDWKMFVARSFWRWVPVGLTVGVWCFVAGMALHSCAKEPEPVAKEPTKVEAMERQADLEVKVWEGQYESMSVEEKMKGIVYE

SEQ ID NO: 30413 - protein, 213 aa, Neisseria meningitidis
MAVKLPNGATVHIATALAAEKKATVATNAAECVLTVTGHGFANGDLVLFKSGWGKLNERIFQIGDVKTDTFKLTGIDTSNADEFPAGSGIGAVQKITDWVQVSQIVEFSTSGGEQQYVDFGFLEDDFDQQIPSTKSAMSMSIKIADDTSLSGYKAAAKCSDKGGKWPLKVVLKGGGLICYNGYPSMNKTPELVRNQVMAVTLSYAISGEVNRY

SEQ ID NO: 30414 - protein, 158 aa, Neisseria meningitidis; identical to SEQ ID NO: 2471

SEQ ID NO: 30415 - protein, 93 aa, Neisseria meningitidis
VDWMGSLFLPGGALLFLSVVSTTLPARLGMPLLLVSPAGVLDGAAEALAIAAFLMLVARPPAVFGGLWKFNYSLREKAYISWLGLAEPCRFRR

SEQ ID NO: 30416 - protein, 169 aa, Neisseria meningitidis; identical to SEQ ID NO: 2049

SEQ ID NO: 30417 - protein, 198 aa, Neisseria meningitidis
  misc_feature 192, 193: 'Xaa' is any amino acid
MSTFFRQTAQAMIAKHIDRFPLLKLDQVIDWQPIEQYLNRQKTRYLRDHRGRPAYPLLSMFKAVLLGQWHSLSDPELEHSLITRIDFNLFCRFDELSIPDYSTLCRYRNWLAQDDTLSELLELINCQLTEKGLKVEKASAAVVDATIIQTETFAKFLSLPTAETPTQVFVYFRPKYRLILPKYPLNPPGYPXXTHLIN

SEQ ID NO: 30418 - protein, 352 aa, Neisseria meningitidis; identical to SEQ ID NO: 6670

SEQ ID NO: 30419 - protein, 186 aa, Neisseria meningitidis
MNRLLLLSAAVLLTACGSGETDKIGRASTVFNMLGKNDRIEVEGFDDPDVQGVACYISYAKKGGLKEMVNLEEDASDASVSCVQTASSISFDETAVRKPKEVFKHGASFAFKSRQIVRYYDPKRKTFAYLVYSDKIIQGSPKNSLSAVSCFGGGIPQTDGVQADTSGNLLAGACMISNPIENPDKR

SEQ ID NO: 30420 - protein, 219 aa, Neisseria meningitidis
LCASCLNVNKIVIIATFYRNPERPSEMRNEEKHALRRELRGWRSQMGWDVRAAATVKINRLLKRYIKHGRKIGVYWPMGKELRLDGFVRAAQKRGAKLYLPYIEPRSLRMWFTPYPESGMERERIRGRARLNVPQFAGRKIRVHGLSVLLVPLVGIDREGYRLGQAGGYYDATLAAMKYRLQAKTVGVGFACQLVDRLSVEAHDLPLDGFVSEAGILCF

SEQ ID NO: 30421 - protein, 335 aa, Neisseria meningitidis
MYSNNAITNNRNNITLGAYRDAIISIFSDENVVRAIGTINSMYEEYLTLSHKIDQRAFLREGERLSAKAREFQRTAEEAQKSLKEGIGRAASKFRGNSKEAFVARKVQSDLQKALNASNYNKQQYARRAATALENASKSKVMAANLGKFTYGATVAMGTLSMGSAWWKALDEEGNWSDVGLSSASFLGGLMGFQWGAALGVGAFGLLTGGAGWLVVGTIIGGGAGAWWGSLGAEKAWRWFEDFLNLNRSDKFHVTDPLALDLDGDSIETVATKGLAGALFDHRSQGIRTATGWIAAYDGFPVRKLNSNGGIISTTDTIFQSLHTWLDHQPNDTCH

SEQ ID NO: 30422 - protein, 100 aa, Neisseria meningitidis; identical to SEQ ID NO: 1476

SEQ ID NO: 30423 - protein, 431 aa, Neisseria meningitidis; identical to SEQ ID NO: 761

SEQ ID NO: 30424 - protein, 251 aa, Neisseria meningitidis; identical to SEQ ID NO: 8366

SEQ ID NO: 30425 - protein, 456 aa, Neisseria meningitidis
MPQNTLNIVILAAGKGTRMYSKMPKVLHEIGGETMLGRVINTAAALNPQNICVVVGHGKDQVLDTVKRDVVWVEQTEQLGTGHAVKTALPHLSAEGRTLVLYGDVPLIDVETLETLLEAAGNEVGLLTDVPADPTGLGRIIRDSSGSVTAIVEEKDASTAQKAVKETNTGILVLPNAKLENWLNSLSSNNAQGEYYLTDLIAKAVSDGIKVRPVRVRASHLAAGVNNKRQLAELERIFQTEQAQELLKAGVTLRDPARFDLRGRLKHGQDVVIDVNCIFEGKIELGDNVEIGANCVIKNAKIGANSKIAPFSHLEGCEVGENNQIGPYARLRPQAKLADDVHVGNFVEIKNAAIGKGTKANHLTYIGDAEVGSKTNFGAGTIIANYDGVHKHKTVIGDEVRIGSNCVLVSPVKIGNKVTTGAGSTITRNVEDGKLALARSRQTIIDGWVRPEKNKQ

SEQ ID NO: 30426 - protein, 298 aa, Neisseria meningitidis; identical to SEQ ID NO: 5738

SEQ ID NO: 30427 - protein, 237 aa, Neisseria meningitidis; identical to SEQ ID NO: 14709

SEQ ID NO: 30428 - protein, 423 aa, Neisseria meningitidis; identical to SEQ ID NO: 3498

SEQ ID NO: 30429 - protein, 316 aa, Neisseria meningitidis
MKLQQLKYALEVYQHNLNVSEAAEALFTSQPGISKQIKLLEEEIGIQIFIRSGKRVVSVSQPGKVVLDIAERILRDVQNIKNIGSEFTGQDSGSLTVATTHTQARYALPLIVADFVKRYPKVNLTIKQGSPAAIARMVTSGEADLAIVTERIDDHPELGKLPCYDWTHAVIVPNDHPLLECRNPLRIEDLAKFPLITYEFAFNTGSSIARAFSKARLEQPDVALAAADTDVLKTYVRLGLGVGLMAKMAYNPDTDGDLQLVDAAHLFEPSPTWIALRSDTYLRGYAYDFIQAFAPHLTREKVDRILYTPISEDFSI

SEQ ID NO: 30430 - protein, 149 aa, Neisseria meningitidis; identical to SEQ ID NO: 753

SEQ ID NO: 30431 - protein, 143 aa, Neisseria meningitidis
  misc_feature 2, 3: 'Xaa' is any amino acid
VXXTGADLVVNAAKEDAAKVIQEKTGGAHAAVVTAVSAAAFNSAVNCVRAGGRVVAIGLPPESMDLSIPRLVLDGIEVVGSLVGTRKDLEEAFQFGAEGLVVPKVQLRALDEAPAIFQEMREGKITGRMVIDMKKECGCGHHH

SEQ ID NO: 30432 - protein, 94 aa, Neisseria meningitidis
LKLDPKRSGKYHVYDPLALNLDGDGIETVAAKGFSGSLFDHTNNGIRTATGWIAAYDGFPVRKLNSNGGIISTTDTIFQSLHTWLDHQPNDTCH

SEQ ID NO: 30433 - protein, 658 aa, Neisseria meningitidis
MSKLKTIALTASGLSVCPGFLYAQNTSSHQIGLAIMRLNSSILDLPPTKQYFQSGSLWSELRQGFRMGEVNPELVRRHESKFIASHSYFNRVINRSRPYMYHIANEVKKRNMPAEAALLPFIESAFVTKAKSHVGASGLWQFMPATGRHYGLEKTPVYDGRHDVYAATDAALNYLQYLYGLFGDWPLAFAAYNWGEGNVGRAINRARAQGLEPTYENLRMPNETRNYVPKLLAVRNIIATPQSFGMNISDIDNKPYFQAVEPDRPLDNEAIARLAGITQSELLALNPAFNVPAFIPKSKRKLLLPVASVQTFQSNYLNAAPDSLFSWEVYTPAAKTSLSDISTATGMSIADIKRLNNLNGNLVNAGRSILVAKNGKTLHTASESVVSIDIDNTPDTYRSNMPAGTVNVGIARIRPAAAQTADITVAPLPQKTVRTEPDPLVRIAEPALATAAAQPQTEKQTAMPSETQTATLAQIIPQNDMQAADELMQLVARNNLRRQAEETISAVIGTPDTVAEHNISSSPQHTVAADGKRRARLETRVAKAADGEAEISPLHASIHRVVEGDTLFNIAKRYNVSVADLIVANNIKGNTIQKGQVLRLAQAAPAQTRIEKVSYTARKGDTFKSIAARFNIHIDDIRRLNPNLNTINPGQRVKLIGS

SEQ ID NO: 30434 - protein, 201 aa, Neisseria meningitidis
MPYQPPTEAEEVLEALVNRRNQPADMRTAEKNRLHQVHETQVGSVKQLIAHFDRLIDELDKQIDDHTHTHFDGKAQVAEQIKGIGSITTATLMAMLPELGRLSHKRIASLVGIAPHPRESGETKFKSRCFGGRSAVLKALYMATVAATRFEPLIRDFYQRLLSEGKPYKVAVTVCMRKLLTISNARMRDYFAENDTAENGI

SEQ ID NO: 30435 - protein, 242 aa, Neisseria meningitidis; identical to SEQ ID NO: 1952

SEQ ID NO: 30436 - protein, 150 aa, Neisseria meningitidis
MQIILLEKIGGLGNLGDIVTVKNGYARNFLIPAGKAKRATEANMKEFEARRAELEAKQAEILADARARQEKLDGQTITVAQKAGVDGRLFGSVTNADIAAAIVAAGIEAVKANVRLPNGPLKAVGEYEVEVALHTDAVAKITVAVVAVAE

SEQ ID NO: 30437 - protein, 594 aa, Neisseria meningitidis
MELMTVLLPLAALVSGVLFTWLLMKGRFQGEFAGLNAHLAEKAARCDFVEQAHGKTVSELAVLDGKYRHLQDENYALGNRFSAAEKQIAHLQEKEAESARLKQSYIELQEKAQGLAVENERLATQLGQERKAFADQYALERQIRQRIETDLEESRQTVRDVQNDLSDVGNRFAAAEKQIAHLQEKEAEAERLRQSHTELQEKAQGLAVENERLATQIEQERLASEEKLSLLGEARKSLSDQFQNLANTILEEKSRRFTEQNREQLHQVLNPLNERIHGFGELVKQTYDKESRERLTLENELKRLQGLNAQLHSEAKALTNALTGTQNKVQGNWGEMILETVLENSGLQKGREYVVQAASVRKEEDGGTRRLQPDVLVNLPDNKQIVIDSKVSLTAYVRYTQAADADAAARELAAHVASIRAHMKGLSLKDYTDLEGVNTLDFVFMFIPVEPAYLLALQNDAGLFQECFDKRIMLVGPSTLLATLRTVANIWRNEQQNQNALAIADEGGKLYDKFVGFVQTLESVGKGIDQAQNSFQTAFKQLAEGRGNLVGRAEKLRLLGVKANKQLARDLTERANETTALSESLEYAAEDEAV

SEQ ID NO: 30438 - protein, 315 aa, Neisseria meningitidis; identical to SEQ ID NO: 27766

SEQ ID NO: 30439 - protein, 282 aa, Neisseria meningitidis; identical to SEQ ID NO: 1323

SEQ ID NO: 30440 - protein, 295 aa, Neisseria meningitidis
MYTGRFAPSPTGLLHIGSLLTAAASYADARSNGGKWLVRMEDLDPPREMPGAASHILHTLEAFGFEWDGEVAYQSRRYALYEETLCRLKTAGLVYPCHCSRKDWQTGARRGADGFVYNGRCRNPQQRPALQGKQPAWRIRVPDRDIGFSDGIVGGYAQNLARDIGDFVLLRADGYWAYQLAVVADDAEQGVTHIVRGQDLLVSTPRQIYLQQCLHVPTPQYAHLPLLTNAQGQKWSKQTLAPALDLNRREQLLRQVFRYLNLPEAPEADRPAELLDWAVAHWDMGKVPKHAITAP

SEQ ID NO: 30441 - protein, 285 aa, Neisseria meningitidis; identical to SEQ ID NO: 6724

SEQ ID NO: 30442 - protein, 105 aa, Neisseria meningitidis; identical to SEQ ID NO: 15362

SEQ ID NO: 30443 - protein, 143 aa, Neisseria meningitidis; identical to SEQ ID NO: 9142

SEQ ID NO: 30444 - protein, 421 aa, Neisseria meningitidis
MFSFFRRKKKQETPALEEAQIQETAAKTESETDQVIENIKEDAESLAESVKGQVESAVETVSGAVEQVKEAVAEMLSEAEEAAEKAAEQVEAAKEAIAETVGEAVGQVQEAVATTEEHKLGWAARLKQGLTKSRDKMAKSLAGVFGGGQIDEDLYEELETVLITSDMGMEATEYLMKDVRDRVSLKGLKDGNELRGALKEALYDLIKPLEKPLVLPETKEPFVIMLAGINGAGKTTSIGKLAKYFQAQGKSVLLAAGDTFRAAAREQLQAWGERNNVTVISQTTGDSAAVCFDAVQAAKARGIDIVLADTAGRLPTQLHLMEEIKKVKRVLQKAMPDAPHEIIVVLDANIGQNAVNQVKAFDDALGLTGLIVTKLDGTAKGGILAALASDRPVPVRYIGVGEGIDDLRPFDARAFVDALLD

SEQ ID NO: 30445 - protein, 329 aa, Neisseria meningitidis; identical to SEQ ID NO: 247

SEQ ID NO: 30446 - protein, 187 aa, Neisseria meningitidis
  misc_feature 2, 3: 'Xaa' is any amino acid
VXXAVPYLNLSDGIKIHIAVGQGSRRALERCLGRTVIAPDDGNDSEAVLRLPVWNSLPEGARVLFVRGHGRRDFLMNALQEKGFRTEVAEVYFRRHKPLNFQNFQTENIAAAYITSTELVRLLFGQLPPQFSRFFKSLLYFTHHPRIAEALKREGVCSVETVPTLEAALSHSSISVSDGMVFPGTSN

SEQ ID NO: 30447 - protein, 874 aa, Neisseria meningitidis
MKTTELRQKFLKFFESKGHTIVRSSSLVPHDDPTLLFTNAGMNQFKDVFLGFDKRPYSRATTAQKCVRAGGKHNDLENVGYTARHHTFFEMMGNFSFGDYFKRDAIHFAWEFLTSPEWLNIPKDKLLATVYAEDDEAYNIWLNEIGMPSERIVRIGDNKGAKYASDNFWQMGDTGPCGPCSEIFYDHGEEIWGGIPGSPEEDGDRWIEIWNCVFMQFNRDEQGNMNPLPKPSVDTGMGLERMAAVMQHVHSNYEIDLFQDLLKAVARETGAPFSMEEPSLKVIADHIRSCSFLIADGVLPANEGRGYVLRRIIRRAVRHGYKLGQSKPFFHKLVADLVKEMGDAYPELKEKQAQIEEALKNEESRFAQTLETGMALLENALAKGGKTLDGEIIFKLYDTYGFPYDLTADICRERNIEPDEAGFEREMEAQRARARAAQSFKANAQLPYDGQDTEFKGYSERQTESKVLALYKDGEQVNELNEGDSGAVVIDFTPFYAESGGQVGDVGYIFSGENRFEVRDTQKIKAAVFGQFGVQTSGRLKVGDSVTAKVDDEIRNANMRNHSATHLMHKALRDVLGRHVEQKGSLVTAESTRFDISHPQAVTAEEIAEVERRVNEAVLANVAVNAAIMSMEDAQKTGAMMLFGEKYGDEVRVLQMGGFSTELCGGTHVSRTGDIGLFKIISEGGIAAGVRRIEAITGLNALKWAQEQERLVKDIIAETKAQTEKDVLAKIQAGAAHAKALEKELARAKAELAVHAGAKLLDDAKDLGAAKLVAAQIEADAAALREIVTDLTGKSEQAIVLLAAVNEGKVSLCAGVSKPLTGKVKAGDLVKFAAEQVGGKGGGRPDLAQAGGTDAGKLPAVLDSVKDWVGAKLV

SEQ ID NO: 30448 - protein, 309 aa, Neisseria meningitidis
  misc_feature 305, 306, 307: 'Xaa' is any amino acid
MSQALPYRPDIDTLRAAAVLSVIVFHIEKNWLPGGFLGVDIFFVISGFLMTEILLREMSGGGSLKAFYIRRIKRILPAFFAVLAATLAGGFFLFTKDDFFLLWKSALTALGFASNLYFARGKDYFDPAQEEKPLLHIWSLSVEEQFYFVFPILLLLVARKSLRVQFGFLAALCALSLAASFIPSALDKYYLPHLRACELLIGSLTAVWMRCRQPAVGRRCAAAGALFAVCILSTCLFSYSEQTAYFPGPAALIPCLAVAALIYFNHYEHPLKKFFQWKITVAAGLISYSLYLWHWPILAFMRYIXXXHT

SEQ ID NO: 30449 - protein, 343 aa, Neisseria meningitidis
MGIKVAINGYGRIGRQVLRAIYDYQIQDQLQIVAVNASGSLETNAHLTKFDTVHGRFEADVSHDGGNLIVNGDKIPFFSTRNPAELPWKELGVDLVMECTGAFTSKEKAKIHLKSGAKKVLISAPGGDDVDATVVYGVNDSILTADMTVVSNASCTTNCLSPVAKVLSESVGIVKGTMTTIHALTNDQTVTDVRHKDLRRARSGVENMIPTKTGAAKAVGLVLPELKGRLDGLAIRVPTVNVSLVDLSFQAARDTTVEEINALMKAASEAGALKGVLGYNTLPLVSMDFNHTTEASHFDATLTKVVDGNMVKVFAWYDNEWGFSCQMLNTARRMFELEVRPLK

SEQ ID NO: 30450 - protein, 107 aa, Neisseria meningitidis; identical to SEQ ID NO: 11673

SEQ ID NO: 30451 - protein, 126 aa, Neisseria meningitidis
  misc_feature 120, 121: 'Xaa' is any amino acid
MSTFFRQTAQAMIAKHINRFPLLKLDQVIDWQPIEQYLNRQRTRYLRDHRGRPAYPLLSMFKAVLLGQWHSLSDPELEHSLITRIDFNLFCRFDELSIPDYSTLCRYRNWLAQDDTLSEXXTHLIN

SEQ ID NO: 30452 - protein, 123 aa, Neisseria meningitidis; identical to SEQ ID NO: 3577

SEQ ID NO: 30453 - protein, 161 aa, Neisseria meningitidis; identical to SEQ ID NO: 555

SEQ ID NO: 30454 - protein, 361 aa, Neisseria meningitidis
MTVPHIPRGPVMADIAAFRLTEEEKQRLLDPAVGGIILFRRNFQNIEQLKTLTAEIKALRTPELIIAVDHEGGRVQRFIEGFTRLPAMNVLGQIWDKDGASAAETAAGQVGRVLATELSACGIDLSFTPVLDLDWGQCAVIGNRSFHRNPEAVARLALALQKGLAKGGMKSCGKHFPGHGFVEGDSHLVLPEDRRSLSELEAADLAPFHIMSREGMAAVMPAHVVYPQVDTKPAGFSEIWLKQILRRDIGFKGVIFSDDLTMEGACGAGGIKERARISFEAGCDIVLVCNRPDLVDELREDFRIPDNPALAQRWQYMANTLGSAAAQAVMQTADFQAAQAFVAGLASPQDTAGGVKVGEAF

SEQ ID NO: 30455 - protein, 89 aa, Neisseria meningitidis; identical to SEQ ID NO: 494

SEQ ID NO: 30456 - protein, 387 aa, Neisseria meningitidis; identical to SEQ ID NO: 30

SEQ ID NO: 30457 - protein, 168 aa, Neisseria meningitidis; identical to SEQ ID NO: 26354

SEQ ID NO: 30458 - protein, 223 aa, Neisseria meningitidis
MTFSAILFYILAAIVLYGAVRTVTAKNPVHAALHLVLTFCVSAMLWMLMQAEFLGVTLVVVYVGAVMVLFLFVVMMLNIDIEEMRAGFWRHAPVAGVVGTLLAVALILILVNPKTDLAAFGLMKDIPADYNNIRDLGSRIYTDYLLPFELAAVLLLLGMVAAIALVHRKTTNPKRMDPADQVKVRADQGRMRLVKMEAVKPQTESAEESEVSDGLKPEGEGKA

SEQ ID NO: 30459 - protein, 366 aa, Neisseria meningitidis
METQLYIGIMSGTSMDGADAVLIRMDGGKWLGAEGHAFTPYPGRLRRQLLDLQDTGADELHRSRILSQELSRLYAQTAAELLCSQNLAPSDITALGCHGQTVRHAPEHGYSIQLADLPLLAERTRIFTVGDFRSRDLAAGGQGAPLVPAFHEALFRDEKETRVVLNIGGIANISVLPSDAPAFGFDTGPGNMLMDAWTQAHWQLPYDKNGEKAAQGNILPQLLDRLLAHPYFAQPHPKSTGRELFALNWLETYLDGGENRYDVLRTLSRFTAQTVCDAVSHAAADTHQMYICGGGIRNPVLMADLAECFGTRVSLHSTADLNLDPQWVEAAAFAWLAACWINRIPGSPHKATGASKPCILGAGYYY

SEQ ID NO: 30460 - protein, 188 aa, Neisseria meningitidis; identical to SEQ ID NO: 2794

SEQ ID NO: 30461 - protein, 279 aa, Neisseria meningitidis
  misc_feature 3, 4: 'Xaa' is any amino acid
VCXXSLLARQVGVPYIIVFMNKCDMVDDAELLELVEMEIRDLLSSYDFPGDDCPIVQGSALKALEGDAAYEEKIFELAAALDSYIPTPERAVDKPFLLPIEDVFSISGRGTVVTGRVERGIIHVGDEIEIVGLKETQKTTCTGVEMFRKLLDEGQAGDNVGVLLRGTKREDVERGQVLAKLGTITPHTKFKAEVYVLSKEEGGRHTPFFANYRPQFYFRTTDVTGAVTLEEGVEMVMPGENVTITVELIAPIAMEEGLRFAIREGGRTVGAGVVSSVIA

SEQ ID NO: 30462 - protein, 106 aa, Neisseria meningitidis; identical to SEQ ID NO: 18989

SEQ ID NO: 30463 - protein, 206 aa, Neisseria meningitidis; identical to SEQ ID NO: 5374

SEQ ID NO: 30464 - protein, 89 aa, Neisseria meningitidis; identical to SEQ ID NO: 6952

SEQ ID NO: 30465 - protein, 300 aa, Neisseria meningitidis
MENMVTFSKIRPLLAIAAAVLLAACGTAGNNAARKPVQTAKPAAVVGLALGGGASKGFAHVGIIKVLKENGIPVKVVTGTSAGSIVGSLFASGMSPDRLELEAEILGKTDLVDLTLSTSGFIKGEKLQNYINRKVGGRRIQQFPIKFAAVATDFETGKAVAFNQGNAGQAVRASAAIPNVFQPVIIGRHTYVDGGLSQPVPVSAARRQGANFVIAVDISARPSKNISQGFFSYLDQTLNVMSVSALQNELGQADVVIKPQVLDLGAVGGFDQKKRAIRLGEEAARAALPEIKRKLAAYRY

SEQ ID NO: 30466 - protein, 379 aa, Neisseria meningitidis; identical to SEQ ID NO: 29081

SEQ ID NO: 30467 - protein, 628 aa, Neisseria meningitidis
MPSEAVFQMIDMNTENRSPEQFDIPLFLKNLPKLPGVYRFFDEGGKVLYVGKAVNLKRRVSGYFQKNDHSPRIALMVKQVRHIETTITRSEAEALILENNFIKALSPKYNILFRDDKSYPYLMLSGHQYPQMAYYRGTLKKPNQYFGPYPNSNAVRDSIQVLQKVFMLRTCEDSVFEHRDRPCLLYQIKRCTAPCVGHISEEDYRDSVRQAATFLNGKTDELTRTLQHKMQTAAANLQFEEAARYRDQIQALGIMQSNQFIDSKNPNNPNDIDLLALAVSDGIVCVHWVSIRGGRHVGDKSFFPDTKNDPEPNGQDYAEAFVAQHYLGKSKPDIIISNFPMPDALKEALESEHGKQMQFVTKTIGERKVWLKMAEQNAQMAIAQRRLQQSSQQHRIDELAKILGMDSDGLNRLECFDISHTQGEATIASCVVYDEQNIQPSQYRRYNITTAKPGDDYAAMREVLTRRYGKMQEAEANGETVKWPDVVLIDGGKGQIGVAVSVWEELGLHIPLVGIAKGPERKAGMEELILPFTGEVFRLPPHSPALHLLQTVRDESHRFAITGHRKKRDKARVTSSLGDIPGVGSKRRQALLTRFGGLRGVIAASREDLEKVEGISKALAETIYNHLH

SEQ ID NO: 30468 - protein, 375 aa, Neisseria meningitidis
MKHLLIDFENVQPQNLDKLPTENTHIWLFIGVLHKMLPISLVQSLLRFGERVHLVQLQKTGKNALDFYLSYYLGQITATDPNAQIGILSRDGGYDVLVEHILKNHQAKGIVRLANIDEVQHQKITTEPPSALLENTPQPETTLKPQQPLTSYFQAALTALRRPDAFRPCRLHNLRQNLRKHILSDLFKEKTDEECEITTANVINKLKAQNFISIDEQETVSYHLSDNDLLQRIQRHILSQRPKTYADFQAVVQNRADALHLTVGTNDIQSFARHLRDQNLIRQNNGEIEYAPFTEPKPQPTPKQPKKTAWEPDEIIWKKVIAALSLKNRPNKTKTLRNTIQALTKSNAQETDKLLQHLQDTQVLRIDGTKIVYIK

SEQ ID NO: 30469 - protein, 290 aa, Neisseria meningitidis
MSFSIALPLVYLFIGILIGKSPFRKIKGTFSVILSRWIIPFVIVYNITTYRDGMQYVMLWMIISMGLIILIGKRVNKDPVWNLCLCYLNIGWLGLPIVATLFGDEAAQVLISAYVGSSLFGNSVGVGLLLNNSNFISGLKKTLKSPPVVALVIGVSGIPLGHFVADYFGEVYFFSKMAMGILGMVILGIWLAEIKLNLNDLKKSIKPFLIKNILFIGIVFLFIQIAAYFDLKLILENQKTLYLIPLLPPAANIIVLETAYLKTGRSASMIAYGTIFSLIAISIYILLVQI

SEQ ID NO: 30470 - protein, 284 aa, Neisseria meningitidis
MFYQILALIIWSSSFIAAKYVYGGIDPALMVGVRLLIAALPALPACRRHVGKIPREEWKPLLIVSFVNYVLTLLLQFVGLKYTSAASASVIVGLEPLLMVFVGHFFFNDKARAYHWICGAAAFAGVALLMAGGAEEGGEVGWFGCLLVLLAGAGFCAAMRPTQRLIARIGAPAFTSVSIAAASLMCLPFSLALAQSYTVDWSVGMVLSLLYLSLGCGWYAYWLWNKGMSRVPANVSGLLISLEPVVGVLLAVLILGEHLSPVSALGVFVVIAATLVAGRLSHQK

SEQ ID NO: 30471 - protein, 123 aa, Neisseria meningitidis; identical to SEQ ID NO: 2701

SEQ ID NO: 30472 - protein, 375 aa, Neisseria meningitidis; identical to SEQ ID NO: 10113

SEQ ID NO: 30473 - protein, 75 aa, Neisseria meningitidis; identical to SEQ ID NO: 17033

SEQ ID NO: 30474 - protein, 352 aa, Neisseria meningitidis
MPSETRLPNFIRVLIFALGFIFLNACSEQTAQTITLQGETMGTTYTVKYLSDGQDKLPSPAEIQKRIDDALKEVNRQMSTYQTDSEISQFNQLRTVNQAMPISQDFAYVTGEALRLNKLTHGALDVTVGPLVNLWGFGPDKSVTREPSPEQIKQAASYTGIDKIILKQGKDYASLSKTHPKAYLDLSSIAKGFGVDKVAGELEKYGIQNYLVEIGGELHGKGKNARGEPWRIGIEQPNIIQGGNTQIIVPLNNRSLATSGDYRIFHVDKSGKRLSHIINPNNKRPISHNLASISVVADSAMTADGLSTGLFVLGETEALKLAEREKLAVFLIVRDKGGYRTAMSSEFEKLLR

SEQ ID NO: 30475 - protein, 63 aa, Neisseria meningitidis; identical to SEQ ID NO: 980

SEQ ID NO: 30476 - protein, 328 aa, Neisseria meningitidis; identical to SEQ ID NO: 372

SEQ ID NO: 30477 - protein, 591 aa, Neisseria meningitidis
MSIVLHGVAAGKGIAVGCAHLIARGTEEVPQYDVAEADTDAEAERFDAAVKATRKELEQLRSAIPENAPTELGAFISLHLMLLTDVTLSREPVDILREQKINAEWALKQQSDKLAAQFDNMDDAYLRERKQDMLQVVRRIHNNLIGQGNELEVADNLFDETVLIANDLSPADTVLFKEQRIAAFVTDAGGPTGHTAILGRSLDIPSVVGLHNARKLITEGETVIVDGINGVLIIAPDESVLDEYRRRAREYRSHKRDLNKLKKTAAATADGVCIELVGNIESAEDVKPLHNLGADGIGLFRSEFLYLNRDTMPSEDEQYEVYSAIVKKMKGKSVTIRTVDLGVDKNPRWFGKNSTPNGSLNPALGMTGIRLCLAEPVMFRTQMRAILRAAAHGPVRMMWPMITSVSEVRQCLIHLDTAQRQLAERGDAFGKVGIGCMIEIPSAALTVGSILKLVDFISVGTNDLIQYILSVDRGDDSVSHLYQPGHPAVLKMLQHVIRTANRMDKDVSVCGEMAGDTAFTRVLLGMGLRRFSMNPNNILPVKNIILHSNVGQLESDIVKVIRCEDEEKSEKLIKQMNSVSVEEEADFKGRK

SEQ ID NO: 30478 - protein, 308 aa, Neisseria meningitidis
MSFAFFFPGQGSQSLGMMNGFAEHAIVKNTFDEASAILGQDLWAMINGSDAEIIGQTVNTQPIMLTAGVAVYRAYSEAGGKTPAAVAGHSLGEYTALVAAGALDFADAVKLVRLRAELMQSAVPQGVGAMAAILGLEDEQVKQICAESTQGEVVEAVNFNSPGQVVIAGNTAAVERAMLAAKEAGAKRALPLPVSVPSHCSLMKPAADKLAEALKTVEIKQPQIRVIHNADVAAYDDADKIKDALVRQLYSPVRWTETVNALVSDGIAESAECGPGKVLAGLAKRINKAAACSALTDAGQVAAFIEAH

SEQ ID NO: 30479 - protein, 244 aa, Neisseria meningitidis; identical to SEQ ID NO: 7982

SEQ ID NO: 30480 - protein, 581 aa, Neisseria meningitidis
MERQTDEFAQAAARAAIWFLARYAGSSDEVLANCTERLFQALQNGHSFIRLSGGEADALSALAPVVGTSAAPLILEGRRLFLGRMWQLEYDLAAEIKRLAAADTSAPDAAGARQNLAKWFQGTGSEGQRDAAALALLQSFMVITGGPGTGKTTTVAKLLALICGEDENLPNIALAAPTGKAAAHMARALHRAINGFDAPEAVRRHLLKLEGQTVHRLLKLRPPKMQAAFDHIRPLPLDVLVIDEASMLDTALMLQLLKAVKTGARVILLGDENQLPSVGIGAVLSVLSQKTVLDGETHQRLAGFFPEHGFSVSANPPVLAQNTAHLSFSHRFGDNSGIGCLARAAVSGDEGAWALFDRFPDELEHSECSPNARVERLYRAHKAYWQAVKDGNIEAAYAGISDIVVLAAWRQDAEDFNEAYCSHVRRKMNIPEHQAYFAGEPIMIRQNDYALELFNGDIGLIMEDVGRQGSLAAYFADADGFKKVAVSCLPEFEPAFAMTVHKSQGSEYREVWLLPPSAAPSDEGDDALSGLSKELLYTAITRAREKFVFFGGEEAFRQAAATVKTRQTALGSMLERVFSQE

SEQ ID NO: 30481 - protein, 140 aa, Neisseria meningitidis; identical to SEQ ID NO: 5752

SEQ ID NO: 30482 - protein, 470 aa, Neisseria meningitidis
LLFEFKENKMIVASRWPLLEKVFLRFGMPVAVVDLESTGGNLYEDRVIEVALVKFEQGRVVRHEWLVNPQKPIPQFVAGLTGISDGMVADAPVFAEIAGELFSVLKGCVLVAHNSRFDYTFLKHEFHRVGIGFSSPALCSVQLSRCLYPQFYKHSLDSIIERLGIVVEDRHRAMADVSALCDYLEYSLSEHGVEAWIRQCFRLMNPKPLPAALPERLREQLYGLPDGMGVLACFDGGGKVNYIGTFERVYSEVSALLDSGKAPFDWCNTEEVRFFPALGSLHAYKIKAELVGRYHSGCYVSAKNLLKTFTTVRFEKGSDGMLNAKTAALKNGVTDNPPTGLFANKKAARRALSSWAETYGLCPAAAGILSDGYTEDEPCPVYVSDRCDKACGRSDEQVLAFAHKLPVLDWGKMNEVEITETDPLTREKVVLHGMGGALEMGDGLWYFDKDLPDAFKAKFKTDRKNIKEIG

SEQ ID NO: 30483 - protein, 313 aa, Neisseria meningitidis
MKRKMLNVPKGNYDGMKGFTIIEFLVAGMLSMIVLMAVGSSYFTSRKLNDAANERLSAQQDLRNAATLIVRDARMAGGFGCFNMSEHSATDVISDTTQQNSPFSLKRNSTNKLIPITESSNINYQNFFQVGSALIFQYGIDDVNASAATTVVSSCAAISKPGKQILTLENVKKELKISDQDKEQNGNIARQRHVVNAYAVGRIAGEEGLFRFQLDDKGKWGNPQLLAKKIRHMKVRYIYVSDCPEDDDAGKEETFRYTDKFNSAQDAVTPAGVEVLLSSGTDTEIAASSDNHIYAYRIDATIRGGNICANRTL

SEQ ID NO: 30484 - protein, 213 aa, Neisseria meningitidis
MKAFTKITAIVAPLDRSNVDTDAIIPKQFLKSIKRSGFGPNAFDEWRYLDHGEPGMDNSKRPLNPDFSLNQPRYQGAQILLTRKNFGCGSSREHAPWALDDYGFRAVIAPSFADIFFNNCYKNGLLPIVLTEEQVDRLFKEVEANEGYRLSIDLAGQTLTTPGGETFAFDITEHRKHCLLNGLDEIGLTLQHADEIHAFEEKRRQSQPWLFNG

SEQ ID NO: 30485 - protein, 242 aa, Neisseria meningitidis; identical to SEQ ID NO: 7658

SEQ ID NO: 30486 - protein, 194 aa, Neisseria meningitidis; identical to SEQ ID NO: 11648

SEQ ID NO: 30487 - protein, 318 aa, Neisseria meningitidis; identical to SEQ ID NO: 46

SEQ ID NO: 30488 - protein, 100 aa, Neisseria meningitidis; identical to SEQ ID NO: 1023

SEQ ID NO: 30489 - protein, 266 aa, Neisseria meningitidis
MNAFNLIIIGDEILHGSRQDKHFAFFKSLLESKGLKLNQVQYLPDEPDLLVRQLRRSFSDGIPTFVTGGIGATPDDHTRQAAAAALELPVVRHPEAAKFIEGVTLKRGEPLDSPEHAQRLKMADFPEGAELVPNPFNNIAGFSIREHYFFPGFPVMAHPMAEWVLDTYYVGRFNQTKRGSRSVYVFEQPESRITPIMEHIEQTYLGVRSYSLPSVGWTHSDGTQVKPHIEFGIKAEGEAVNLLDAAWAEVLHSLDGLGAELKNRVN

SEQ ID NO: 30490 - protein, 212 aa, Neisseria meningitidis
MSKLTPREILTAGAVVPVMAIDDLSTAVDLSHALVEGGIPTLEITLRTPVGLDAIRLIAKEVPNAIVGAGTVTNPEQLKAVEDAGAVFAISPGLHESLAKAGHNSGIPLIPGVATPGEIQLALEHGIDTLKLFPAEVVGGKAMLKALYGPYADVRFCPTGGISLATAPEYLALPNVLCVGGSWLTPKEAVKNKDWDTITRLAKEAAALKPKA

SEQ ID NO: 30491 - protein, 107 aa, Neisseria meningitidis
MDNCIFCKIAAKDILAQTVYEDGEMVCFKDINPAAPVHLLLIPKVHFDSLAHAAPEHQPLLGKMMLKVPEIAKAAGLADGFKTLINTGKGGGQEVFHLHIHIMGTPV

SEQ ID NO: 30492 - protein, 324 aa, Neisseria meningitidis
MIAKHIDRFPLLKLDQVIDWQPIEQYLNRQKNRYLRDHRGRPAYPLLSMFKAVLLGQWHSLSDPELEHSLITRIDFNLFCRFDELSIPDYSTLCRYRNRLAQDNTLSELLELINRQLTEKGLKIEKASAAVVDATIIQTAGSKQRQAIEVDEEGQVSGQTTPSKDSDARWIKKNGLYKLGYKQHTRTDEEGYIEKLHITPANAHECTHLSPLLEGIAEGTTVYADKGYDSAENRQHLKEHQLPDGIMRKACRNRPLSEVQTKRNRYLSKTRYVVEQSFGTLHRKFRYARAAYFGLIKVSAQSHLKAMCLNLLKAANRLSAPAAA

SEQ ID NO: 30493 - protein, 424 aa, Neisseria meningitidis
MPSETSSPRKENETEVHIPAAPFIVKQSGSNALAVCALVLAALGLGTSGFLFVQGQNVLKNQELAFNQKIDKAALGESENAALLKDNLNRQAAIQSELDRLDGNVKANGEQILEMQKSYRELTKGRADWLVDETETILNLAAQQLVLTGNIQTAVGVLEHIDSRLSRFNQAELLPIKQAVSSDLAELKNRPYVDISGTALRLDRLEIAVSGLPLILDGVLKPGVQVKNEAASASWWQNVWEKSLGTLKGLVEIRRLENNDAMLLSPEQAYFVRENLRLRLLDARIALMQRNGEVYQGDLNNAEAAVRQYFDAKSPATQSWLKELAELKALDVRMTADDGLKNSLNAVRAYRDGTRMTAAENQEAEQAASEPANENTASEPAAASDVKTIEAPSLPSERKPEQPAKKQSVPEKAGRSPSAKGERA

SEQ ID NO: 30494 - protein, 142 aa, Neisseria meningitidis; identical to SEQ ID NO: 4400

SEQ ID NO: 30495 - protein, 346 aa, Neisseria meningitidis; identical to SEQ ID NO: 20281

SEQ ID NO: 30496 - protein, 108 aa, Neisseria meningitidis; identical to SEQ ID NO: 1657

SEQ ID NO: 30497 - protein, 163 aa, Neisseria meningitidis
MKNGSRSYAPKAGELKQPVTNVSWFAANAYCAAQGKRLPTIDEWEFAGLASATQKNGSNEPGYNRTILDWYADGGRKGLHDVGKGRPNYWGVYDMHGLIWEWTEDFNSSLLSSGNANAQMFCSGASIGSSDSSNYAAFLRYGIRTSLQSKYVLHNLGFRCTSR

SEQ ID NO: 30498 - protein, 105 aa, Neisseria meningitidis; identical to SEQ ID NO: 895

SEQ ID NO: 30499 - protein, 93 aa, Neisseria meningitidis; identical to SEQ ID NO: 2125

SEQ ID NO: 30500 - protein, 192 aa, Neisseria meningitidis; identical to SEQ ID NO: 9025

SEQ ID NO: 30501 - protein, 124 aa, Neisseria meningitidis; identical to SEQ ID NO: 5947

SEQ ID NO: 30502 - protein, 324 aa, Neisseria meningitidis
MNILSKISSFIGKTFSLWAALFAAAAFFAPDTFKWAGPYIPWLLGIIMFGMGLTLKPSDFDILFKHPKAVIIGVIAQFAIMPATAWLLSKLLNLPAEIAVGVILVGCCPGGTASNVMAYLARGNMALSVAVTSVSTLISPLLTPAIFLMLAGEMLEIQAAGMLMSIVKMVLLPIVLGLIVHKVLGSKTEKLTDALPLVSVAAIVLIIGAVVGASKGKIMESGLLIFAVVVLHNGIGYLLGFFAAKWTGLPYDAQKTLTIEVGMQNSGLAAALAAAHFAAAPVVAVPGALFSVWHNISGSLLATYWAAKAGKHKKTLNAFHHNAV

SEQ ID NO: 30503 - protein, 729 aa, Neisseria meningitidis
MIYHRIAVNVPLSDGLLTYSHSDPLPPGTRVLVPFRNKTVVGMVWETDIAPDMDTARILSIQTTFLDEPPLPESWRDLLSFTSRYYHYPTGQAVFAALPQGLKETRAVEMPQPPLFYALNEAGRAQTPPLARFNKKAALWDALLSGGMTMAALKQVNAQAAKLIEDWAEQGWIETTEAAKPVLRPYHGQASHSEFVLNANQQKASDAIQTAFGSFQPFLLYGITGSGKTEVYFDAMAKVLAQGRQVLFLLPEINLTPQLLKRVENRFADVPTAVLHSQMAAGKRTQDYLRAMLGQAKLVIGTRLAVFTPMDDVGLIVVDEEHDGSFKQDNELRYHARDLAVWRAKQGGCPIILGSATPSLESWHKAQSGAYRLLQLTERAHTAAQLPQVDILNVGRLKLDNGFSPQALQLLKQNFEAGGMSLVYLNRRGFAPALFCGDCGYTFGCPNCSAKMVLHQRARQLRCHHCDHREPIPYKCPDCGNQDLTAVGHGTQRVEETLRTFLPKAAVVRVDRDSTAHKNDWADLYRRIADNKIDILVGTQMLAKGHDFARLNLVIVLNADGSLYSADFRAPERLFAELMQVSGRAGRADKPGKVLIQTQLPEHPVFAAVKAQDYAVFAENELNERQMFAMPPFGFQTAVRADAPRVADAMEFLNAAKETLAPLLPESVSQFGAAPMLMVRLAERERAQIFLESPSRQDLHRAVSLWAQVLQQNRDGKIRWSVDVDPQEA

SEQ ID NO: 30504 - protein, 64 aa, Neisseria meningitidis
  misc_feature 60, 61, 62: 'Xaa' is any amino acid
MKITTWNVNSLNVRLPQVQNLLADNPPDILVLQELKLDQDKFPAAALQMMGWHCVWSGQXXXHT

SEQ ID NO: 30505 - protein, 84 aa, Neisseria meningitidis
  misc_feature 79, 80: 'Xaa' is any amino acid
VVGNGKKYAAPLLVLGCVVFGLGSLIVRSVPVGSYAIAFWRLLISVFVFWFLARFFRQKFPKNRKTVRYALTAGVFLSXXHTLN

SEQ ID NO: 30506 - protein, 463 aa, Neisseria meningitidis; identical to SEQ ID NO: 6277

SEQ ID NO: 30507 - protein, 675 aa, Neisseria meningitidis
MEVIQYPNSPFKLHQPFPPAGDQPTAIAGLLEGLSDGLAYQTLLGVTGSGKTYTMANVIARSGRPAIIMAHNKTLAAQLYAEMREFFPENAVEYFVSYYDYYQPEAYVPSRDLFIEKDSAINEHIEQMRLSATKNLMTRDDVIIVATVSAIYGIGDPTEYQQMVLSVKEGDTIAQRDIIATLVSMQYERGDLDFKRGSFRVRGDVIDVYPAESSENALRISLFDDEIDRLDMFDPLSGSLIQRVGRYTVFPSSHYVTPRDTVLRACDSIKEELRERIDFFTKENRPVEQQRIEQRTRFDLEMLYEMGFCKGIENYSRHFSGKKEGEPPPTLMDYLPSNTIMFIDESHVTVTQIGGMYKGDASRKQNLVDYGFRLPSARDNRPLKFHEFEKVMPQTVFVSATPAKYEEEHAGQVVEQVVRPTGLVDPQIIIRPVATQVDDLMSEINDRIQKGERVLVTTLTKRMAEQLTDYYSELGIKVRYLHSDIDTVERVEIIRDLRLGLFDVLVGINLLREGLDIPEVSLVAILDADKEGFLRSHRSLIQTIGRAARNVNGVAILYADKITDSMKAAIDETERRREKQIKFNEEHGIVPQQIKKQVKDIIDGVYHEEDGGKGRLKGKNKVKVGEIHNEEDAIKEIAKLEKAMQQAARDLQFEEAAVLRDRIRNIKESLLFGAE

SEQ ID NO: 30508 - protein, 706 aa, Neisseria meningitidis
MRRFLPIAAICAVVLLYGLTAATGSTSSLADYFWWIVAFSAMLLLVLSAVLARYVILLLKDRRDGVFGSQIAKRLSGMFTLVAVLPGVFLFGVSAQFINGTINSWFGNDTHEALERSLNLSKSALNLAADNALGNAIPVQIDLIGAASLPGDMGRVLEHYAGSGFAQLALYNAASGKIEKSINPHKLDQPFPGKARWEKIQQAGSVRDLESIGGVLYAQGWLSAGTHNGRDYALFFRQPVPKGVAEDAVLIEKARAKYAELSYSKKGLQTFFLAILLIASLLSIFLALVMALYFARRFVEPVLSLAEGAKAVAQGDFSQTRPVLRNDEFGRLTKLFNHMTEQLSIAKEADERNRRREEAARHYLECVLEGLTTGVVVFDEQGCLKTFNKAAEQILGMPLTPLWGSSRHGWHGVSAQQSLLAEVFAAIGAAAGTDKPVHVKYAAPDDAKILLGKATVLPEDNGNGVVMVIDDITVLIHAQKEAAWGEVAKRLAHEIRNPLTPIQLSAERLAWKLGGKLDEQDAQILTRSTDTIVKQVAALKEMVEAFRNYARSPSLKLENQDLNALIGDVLALYEAGPCRFAAELAGEPLMVAADTTAMRQVLHNIFKNAAEAAEEADVPEVRVKSEAGQDGRIVLTVCDNGKGFGKEMLHNAFEPYVTDKPAGTGLGLPVVKKIIEEHGGRISLSNQDAGGACVRIILPKTVKTYA

SEQ ID NO: 30509 - protein, 331 aa, Neisseria meningitidis; identical to SEQ ID NO: 1014

SEQ ID NO: 30510 - protein, 286 aa, Neisseria meningitidis
MKPYSANPNLTEPRRLRVLLIAAALGFLLLMLVVPLVAVFYEALKGGWDLYLKSLNDPEAWSAIKLTLITALIVVPVNAVLGVAMAWLLTRFDFRGKQLLTTLLDLPFSVSPVVAGLMFVLLFGSHTALGGWLEAQGIQIIFAIPGIVLATLFVTFPFVAREIIPLMQAQGDSEEQAALILGASGWQMFWRVTLPNIKWALLYGIILTNARAMGEFGAVSVVSGHIRGETNTVPLLVEIFYNEYNFTGAFALSGVLALLALATLAVQNIITKLQDKKLAAAERNAV

SEQ ID NO: 30511 - protein, 363 aa, Neisseria meningitidis; identical to SEQ ID NO: 8784

SEQ ID NO: 30512 - protein, 114 aa, Neisseria meningitidis; identical to SEQ ID NO: 7673

SEQ ID NO: 30513 - protein, 109 aa, Neisseria meningitidis; identical to SEQ ID NO: 10877

SEQ ID NO: 30514 - protein, 144 aa, Neisseria meningitidis; identical to SEQ ID NO: 1499

SEQ ID NO: 30515 - protein, 68 aa, Neisseria meningitidis; identical to SEQ ID NO: 15327

SEQ ID NO: 30516 - protein, 54 aa, Neisseria meningitidis; identical to SEQ ID NO: 1909

SEQ ID NO: 30517 - protein, 424 aa, Neisseria meningitidis
MKTLQDWLSHLETAHSGGLIDMGLERVGEVKKRMKLEPQCPVVVVAGTNGKGSVCAYLTQIYKQAGYKTGTLTSPHLLRYNERIAINAEPVSDDTIIASFERIEAARGEISLTYFEFNTLAAVDIFMREQVDVMILEVGLGGRLDAVNAFDGDCAVVTSVDLDHQAFLGDTVEQVGFEKAGVFRSGKPAICGQNPAPKSLLSHAEAIGAKLLMVQRDFEFHAMENIQWNYRFRPQHSDGPARNRNALPFPALRGTYQLSNAACALTVLECLNDKLPVDIGAIKRGLLLVENPGRFQVLPGRPLTVLDVGHNPHAARALRRSLINLAFAQKRTAVFSMLSDKDIDGVLEIVKDQFDEWYIAPLDVPRGMTLESLQNKLHEHSIENIQTFAAVREAYRAAASKAGENDRIVVFGSFHTVADVMSVL

SEQ ID NO: 30518 - protein, 612 aa, Neisseria meningitidis
MLPARFTILSVLAAALLAGQAYAAGAADAKPPKEVGKVFRKQQRYSEEEIKNERARLAAVGERVNQIFTLLGGETALQKGQAGTALATYMLMLERTKSPEVAERALEMAVSLNAFEQAEMIYQKWRQIEPIPGKAQKRAGWLRNVLRERGNQHLDGLEEVLAQADEGQNRRVFLLLAQAAVQQDGLAQKASKAVRRAALKYEHLPEAAVADVVFSVQGREKEKAIGALQRLAKLDTEILPPTLMTLRLTARKYPEILDGFFEQTDTQNLSAVWQEMEIMNLVSLHRLDDAYARLNVLLERNPNADLYIQAAILAANRKEGASVIDGYAEKAYGRGTEEQRSRAALTAAMMYADRRDYTKVRQWLKKVSAPEYLFDKGVLAAAAAVELDGGRAALRQIGRVRKLPEQQGRYFTADNLSKIQMLALSKLPDKREALRGLDKIIEKPPAGSNTELQAEALVQRSVVYDRLGKRKKMISDLEKAFRLAPDNAQIMNNLGYSLLSDSKRLDEGFALLQTAYQINPDDTAVNDSIGWAYYLKGDAESALPYLRYSFENDPEPEVAAHLGEVLWALGERDQAVDVWTQAAHLTGDKKIWRETLKRHGIALPQPSRKPRK

SEQ ID NO: 30519 - protein, 265 aa, Neisseria meningitidis; identical to SEQ ID NO: 2138

SEQ ID NO: 30520 - protein, 758 aa, Neisseria meningitidis
MAQTTLKPIVLSILLINTPLLAQAHETEQSVDLETVSVVGKSRPRATSGLLHTSTASDKIISGDTLRQKAVNLGDALDGVPGIHASQYGGGASAPVIRGQTGRRIKVLNHHGETGDMADFSPDHAIMVDTALSQQVEILRGPVTLLYSSGNVAGLVDVADGKIPEKMPENGVSGELGLRLSSGNLEKLTSGGINIGLGKNFVLHTEGLYRKSGDYAVPRYRNLKRLPDSHADSQTGSIGLSWVGEKGFIGVAYSDRRDQYGLPAHSHEYDDCHADIIWQKSLINKRYLQLYPHLLTEEDIDYDNPGLSCGFHDDDDAHAHTHSGRPWIDLRNKRYELRAEWKQPFPGFEALRVHLNRNDYRHDEKAGDAVENFFNNQTQNAHIELRHQPIGRLKGSWGVQYLQQKSSALSAISEAVKQPMLLDNKVQHYSFFGVEQANWDNFTLEGGVRVEKQKASIQYDKALIDRENYYNHPLPDLGAHRQTARSFALSGNWYFTPQHKLSLTASHQERLPSTQELYAHGKHVATNTFEVGNKHLNKERSNNIELALGYEGDRWQYNLALYRNRFGNYIYAQTLNDGRGPKSIEDDSEMKLVRYNQSGADFYGAEGEIYFKPTPRYRIGVSGDYVRGRLKNLPSLPSREDAYGNRPFIAQDDQNAPRVPAARLGFHLKASLTDRIDANLDYYRVFAQNKLARYETRTPGHHMLNLGANYRRNTRYGEWNWYVKADNLLNQSVYAHSSFLSDTPQMGRSFTGGVNVKF

SEQ ID NO: 30521 - protein, 121 aa, Neisseria meningitidis
LDCRFGRQYRLLKTDDFSSVFAFRNRRSRDLLQVSRSNGNGLDHPRIGLVVGKKTAKRANERNYMKRVIRDWFRLNKNRLPPQDFVVRVHRKFDRATAKQARAELAQLMFGNPATGCRKQA

SEQ ID NO: 30522 - protein, 371 aa, Neisseria meningitidis; identical to SEQ ID NO: 14361

SEQ ID NO: 30523 - protein, 233 aa, Neisseria meningitidis
MSAQTIAVIGAMEQEIELLRESMANVKHVSFGKFSAYEGELAGKRMVLVLSGIGKVNAAVSTSWVIHQFAPDCVINTGSAGGLGKGLKVGDVVIGETVAHHDVDVTAFGYVWGQIPQLPAVFASDENLIRQAEKAAQVFEGAAVTQGLIVSGDRFVHSSEGVAEIRSHFPDVKAVEMEAAAIAQTCHQLEVPFVIIRAVSDSADEKADISFEEFLKTAAVSSAKMVTEIVKSL

SEQ ID NO: 30524 - protein, 222 aa, Neisseria meningitidis
MNHNITFLTLFLLGFFGGTHCIGMCGGLSSAFALQLPPHINRFWLILLLNTGRVSSYTAIGLILGLIGQVGVSLDQTRVLQNILYTAANLLLLFLGLYLSGISSLAAKIEKIGKPIWRNLNPILNRLLPIKSIPACLAVGILWGWLPCGLVYSASLYALGSGSAATGGLYMLAFALGTLPNLLAIGIFSLQLKKIMQNRYIRLCTGLSVSLWALWKLAVLWL

SEQ ID NO: 30525 - protein, 261 aa, Neisseria meningitidis; identical to SEQ ID NO: 8388

SEQ ID NO: 30526 - protein, 111 aa, Neisseria meningitidis
MFGKAGLGGLMKQAQQMQENMKKAQAKLAETEIEGEAGNGLVKITMTCAHEVRKIDISPDLIQEAADDKEMLEDLILAALKSARGKAEETANKTMGAFAQGLPPGVGDFFR

SEQ ID NO: 30527 - protein, 349 aa, Neisseria meningitidis; identical to SEQ ID NO: 6547

SEQ ID NO: 30528 - protein, 159 aa, Neisseria meningitidis; identical to SEQ ID NO: 38

SEQ ID NO: 30529 - protein, 143 aa, Neisseria meningitidis; identical to SEQ ID NO: 14741

SEQ ID NO: 30530 - protein, 230 aa, Neisseria meningitidis
MNEILRQPSVLLFLTLAVYALAIIVRTRTGNIFCNPVLVSTIVLIAYLKILDIDYAVYHNAAQFIDFWLKPAVVVLAVPLYQNRRKIFNQWLPVIVSQLAGSVTGIVTGMYFAKWLGAEREVVLSLASKSVTNPIAIEITRSIGGIPAITAATVIIAGLVGQIAGYKMLKNTVVMPSSVGMSLGTASHAMGIAASLERSRRMASYAGLGLTFNGVLTALIAPLLIPVLGF

SEQ ID NO: 30531 - protein, 135 aa, Neisseria meningitidis
  misc_feature 131, 132, 133: 'Xaa' is any amino acid
MIEFVRAKKRLLWAFVLLLVWTCGYRYAADKAEAEQTALIATYRHSSMVAAEQYALQLKKAQDERQRWYDFSQKQGRKPVKKQYPPQTKKAGYLKTKEELLAELACFTAEMAALKKPDALIHGKEVRQKEXXXHT

SEQ ID NO: 30532 - protein, 186 aa, Neisseria meningitidis; identical to SEQ ID NO: 2604

SEQ ID NO: 30533 - protein, 166 aa, Neisseria meningitidis
MADLQKTFQTSFRDAMASCAAGVHVITTDGAAGRYGITMTAVAPVTDEPPTVMLCINRSARIIPILSENGSLCINMLADEHQDVAEHFAGLTGLSPEERFAYHIWHRGKTGQLEIEGALAHLHGHIVGKHEIGTHFVFYVRLDEIKNCVGKRPALLYFRRQFRSLD

SEQ ID NO: 30534 - protein, 200 aa, Neisseria meningitidis; identical to SEQ ID NO: 321

SEQ ID NO: 30535 - protein, 547 aa, Neisseria meningitidis
MDAFTRAWYALERHNQDTRHVLLRDRFACEPDRFERMHERLDGMLFDYSKNRLGEDTLQLLCRLAETADLEGKMRALRTGAKVNGSEGRAALHTALRLPDGADAVYADGRDVLPEIRRELNRALEFAHSLDDGSYQGITGKRITDFVHIGIGGSDLGPAMCVQALEPFRRHIAVHFAANADPACLDAVLCRLNPETTVFCVASKSFKTPETLLNAQAVKAWYRGAGFSESETACHFCAVSADTAAAAAFGIAAERVFAMYDWVGGRYSVWSSVGLPVMVAVGGARFRELLAGAHAMDSHFFHTPPRRNIPVLMALIAVWYNNFQHADGQTAVPYSHNLRLLPAWLNQLDMESLGKSRASDGSPAVCKTGGIVFGGEGVNCQHAYFQLLHQGTRLIPCDFIVPMTAQGVEDGRSRFTVANAFAQAEALMKGKTLDEARAELADLPEAERERLAPHKEFPGNRPSNSILLDRLTPYNLGMLMAAYEHKTFVQGAIWNVNPFDQWGVEYGKQLAKTIIGELEGGTSVHDASTEGLMAFYRECRLKGGGAA

SEQ ID NO: 30536 - protein, 500 aa, Neisseria meningitidis
MAKVLIVPVSAGLDASAAAQAFAKALDAQIFQAVDATAETLLAQGKSDDWFDALVGKVAALDAANLVIEGIAPDADKIYLAGKNVELALSLDAAAVFAVRSDNADADELANRLNLAKQFFAAAPGVLEGFVVDGTAASVAEAAAEKTGLTFFGSSDALKDVSVLAGREAKRLSPAQFRYNLIDFARQADKRIVLPEGAEPRTVQAAAICHEKGIARCVLLAKREEVEAVAKERGISLPDSLEIIDPASLVEQYVEPMCELRKSKGLTPEDARKQLQDTVVLGTMMMAQNDVDGLVSGAVHTTANTIRPALQLIKTAPGASLVSSVFFMLLPNQVLVFGDCAVNPNPTAQQLADIAIQSADSAKAFGIDPKVAMISYSTVNSGSGPDVDTVIEATKLAREKRPDLAIDGPLQYDAATVPGVGKSKAPGSPVAGQATVLVFPDLNTGNCTYKAVQRSANVLSVGPLLQGLRKPVNDLSRGALVEDIVFTITLTAVQAKQMEG

SEQ ID NO: 30537 - protein, 80 aa, Neisseria meningitidis
  misc_feature 2, 3, 4: 'Xaa' is any amino acid
VXXXNAASQQELEALPGIGPAKAKAIAEYRAQNGAFKSVDDLTKVKGIGPAVLAKLKDQASVGAPAPKGPAKPVLPADKK

SEQ ID NO: 30538 - protein, 517 aa, Neisseria meningitidis
MNRTYANFYEMLAAACRKNGNGTAVFDGKEKTAYRALKQEAEAVAAYLQNIGVKFGDTVALAVSNSTEFITAYFAVSAIGAVAVPMNTFLKNSEYAYILNDCKAHCLFASVGLSKELAGLKAQTPVEKIIWTDKSRPAGEMAEGDAFFEDVRRFPEKPDLGRQPRINDLAHIIYTSGTTGHPKGALISYANLFANLNGIERIFKISKRDRFIVFLPMFHSFTLTAMVLLPIYMACSIILVKSVFPFSNVLKQALLKRATVFLGVPAIYTAMSKTKIPWYFRWFNRIRLFISGGAPLAEQTILDFKAKFPRAKLLEGYGLSEASPVVAVNTPERQKARSVGIPLPGLEVKAVDEELVEVPRGEVGELIVRGGSVMRGYLNMPAATDETIVNGWLKTGDFVTIDEDGFIFIVDRKKDLIISKGQNVYPREIEEEIYKLDAVEAAAVIGVKDRYADEEIVAFVQLKEGMDLGENEIRRHLRTVLANFKIPKQIHFKDGLPRNATGKVLKRVLKEQFDGNK

SEQ ID NO: 30539 - protein, 156 aa, Neisseria meningitidis; identical to SEQ ID NO: 14045

SEQ ID NO: 30540 - protein, 531 aa, Neisseria meningitidis
MSQEILDQVRRRRTFAIISHPDAGKTTLTEKLLLFSGAIQSAGTVKGKKTGKFATSDWMDIEKQRGISVASSVMQFDYKDHTVNLLDTPGHQDFSEDTYRVLTAVDSALMVIDAAKGVEAQTIKLLNVCRLRDTPIVTFMNKYDREVRDSLELLDEVENILQIRCAPVTWPIGMGKNFKGVYHILNDEIYLFEAGGERLPHEFDIIKGIENPELEQRFPLEIQQLRDEIELVQAASNEFNLDEFLAGELTPVFFGSAINNFGIQEILNSLIDWAPAPKPRDATVRMVEPDEAKFSGFIFKIQANMDPKHRDRIAFLRVCSGRFERGMKMKHLRINREIAASSVVTFMSHDRELVEEAYAGDIIGIPNHGNIQIGDSFSEGEQLTFTGIPFFAPELFRSVRIKNPLKIKQLQKGLQQLGEEGAVQVFKPMSGADLILGAVGVLQFEVVTSRLANEYGVEAVFDSASIWSARWVSCDDKKKLAEFEKANAGNLAIDAGGNLAYLAPNRVNLGLTQERWPDIVFHETREHSVKL

SEQ ID NO: 30541 - protein, 297 aa, Neisseria meningitidis
MAKIITPLSANQVKNAKPRDKLYKLSDGGGLALWIYPTGGRSWKLSFVQDGRQQTISLGRYPDFSLADAREWREEVRRKRAHGENVVNKKVRADFAFEKVARDWFVRWSKGRSEKYAGQVMRNFERWVFPAIGNLDIRQVRTADVVGCLRVMEARGIVDTLRKTKNSLKMVFAFAVGSGMMEINTVAQIGSGVFERAKTGNMAALSPSELPRLIDFLEQRNEFAVYAGRVRIHPVTRLCIYWLLLTMTRIQEAALMEWSEFWTGRFGVSPPNGKRSGGGMMCRCRGRCSGCWIRRGR

SEQ ID NO: 30542 - protein, 187 aa, Neisseria meningitidis
  misc_feature 182, 183: 'Xaa' is any amino acid
VNRTALCCLFLTAALILTACGSGGGGVAADIGAGLADALTALPDHKDKGLQSLTLDQSVRKNEKLKLAAQGAEETYGNGDSLDTGKLKKDKVSRFDFIRQIEVDGQLITLESGEFQVYKQSHSALTALQTEQVQDSEHSGKMVAKRRFRIGDIAGEHTSFDKLPESDRATYRGTAFSSDDDXXHTLN

SEQ ID NO: 30543 - protein, 128 aa, Neisseria meningitidis; identical to SEQ ID NO: 3576

SEQ ID NO: 30544 - protein, 52 aa, Neisseria meningitidis
MAKAGIGADAVRDMCHAELSAWFEDILSSLGIKTPKEEGVIVSKRLRKPEGK

SEQ ID NO: 30545 - protein, 66 aa, Neisseria meningitidis; identical to SEQ ID NO: 3561

SEQ ID NO: 30546 - protein, 208 aa, Neisseria meningitidis
MNVNVINHPLVRHKLTLMREADCSTYKFRTLTTELARLMAYEASRDFEIEKYLIDGWCGQIEGDRIKGKTLTVVPILRAGLGMLDGVLDLIPTAKISVVGLQRDEETLKPVSYFEKFVDSMDERPALIIDPMLATGGSMVATIDLLKAKGCRNIKALVLVAAPEGVKAVNDAHPDVTIYTAALDSHLNENGYIIPGLGDAGDKIFGTR

SEQ ID NO: 30547 - protein, 221 aa, Neisseria meningitidis
MTFTAVLFDLDGVITDTAEYHYRAWKKLAEELGIGIDRKFNEQLKGVSRDDSLKRILAHGGKTVSEAEFAELTRRKNDNYVEMIQAVKPEDAYPGILPLLETLKANGKKIALASASKNGPFLLERMGLTHFFDAIADPAAVAHSKPAPDIFLAAAEGVGADIRRCIGIEDAAAGVAAIKASGALPIGVGKAEDLGSDIALVSDTAGLTYAYLQNVWAQSGR

SEQ ID NO: 30548 - protein, 245 aa, Neisseria meningitidis; identical to SEQ ID NO: 6094

SEQ ID NO: 30549 - protein, 50 aa, Neisseria meningitidis
MPDRIKPSRNGGGADDIARQQGTAQTGAKPETSPTARHGDFLSPLQGDWI

SEQ ID NO: 30550 - protein, 55 aa, Neisseria meningitidis
LRIGNDLFVKRVQRIPGKLLVTSENSRYAPFEIDLSHTDDIAIVGRVEWFGRSVN

SEQ ID NO: 30551 - protein, 602 aa, Neisseria meningitidis
MKTALPSRVVAESANLQSGWDTKLQGTQFETTLGGATIRAGVGEQARADAKIILEGIKTTIHNETVSSSKSALWQKQAGRGSNIETLQLPSFTGPVAPVLSAPGGYIVDIPKGNLKTQIEKLAKQPEYAYLKQLQTVKDVNWNQVQLAYDKWDYKQEGLTGAGAAIIALAVAAVTGGVGAGLIGAAQGTASAAVADAAFTALVSQASISLINNKGNIGNTLKELGRSRTVKNLVVAAATAGVSNKLGASSLATWSETPWVNNLNVNLANAGSAALINTAVNGGSLKDNLEANILAALVNTAHGEAASKIKQLDQHYIAHKVAHAVAGCAAATANKGKCQDGAIGAAVGEIVGEALVKNTDFSDMTPEQLDLEVKKITAYAKFAAGTVAGVTGGDVNTAAQTAQNAVENNAVKAVVTAAKVVYKVARKGLKNGKINVRDLKQTLKDEGYNLADNLTTLFDETLDWNDAKAVIDIVVGTELNRANKGEAAQKVKEVLEKNRPYIPNKGAVPNMSTYMKNNPFGKQLAQISEKTTLPTQQGQSVFLVKRNQGLLKTGDRFYLDGQHKNHLEVFDKNGNFKFVLNMDGSLNQMKTGAAKGRKLNLK

SEQ ID NO: 30552 - protein, 354 aa, Neisseria meningitidis
MALVSMRQLLDHAAENSYGLPAFNVNNLEQMRAIMEAADQVNAPVIVQASAGARKYAGAPFLRHLILAAVEEFPHIPVVMHQDHGASPDVCQRSIQLGFSSVMMDGSLMEDGKTPSSYEYNVNATRTVVNFSHACGVSVEGEIGVLGNLETGEAGEEDGVGAVGKLSHDQMLTSVEDAVRFVKDTGVDALAIAVGTSHGAYKFTRPPTGDVLRIDRIKEIHQALPNTHIVMHGSSSVPQEWLKVINEYGGNIGETYGVPVEEIVEGIKHGVRKVNIDTDLRLASTGAVRRYLAENPSDFDPRKYLSKTIEAMKQICLDRYLAFGCEGQAGKIKPVSLEKMASRYAKGELNQIVK

SEQ ID NO: 30553 - protein, 407 aa, Neisseria meningitidis; identical to SEQ ID NO: 12938

SEQ ID NO: 30554 - protein, 115 aa, Neisseria meningitidis; identical to SEQ ID NO: 3528

SEQ ID NO: 30555 - protein, 183 aa, Neisseria meningitidis
VNYCEFAASLPENTDNPNKHYHDTQYGFPIEDDNELFERLVLEINQAGLNWTLMLKKQQAFQTAFEGFDINTVAAFDDTDRERLLADAGIVRNRLKIDAAIFNARQIQALQQEYGSFKNWLDAHHPRSKDEWVKLFKKHFKFVGGEIVGEFLMSTGYLKGAHAESCPVYRETLKYHPKWLDAI

SEQ ID NO: 30556 - protein, 255 aa, Neisseria meningitidis
MALAKRIIPCLDVKDGRVVKGVNFIGLRDAGNPVEAAKRYNGEGADELTFLDITASSDNRDTILHIIEEVAGQVFIPLTVGGGVRTVADIRRLLNAGADKVSINTAAVTRPDLIDEAAGFFGSQAIVAAVDAKAVNPENTRWEIFTHGGRNPTGLDAVEWAVEMQKRGAGEILLTGMDRDGTKQGFNLPLTRAVAEAVDIPVIASGGVGNVRHLIEGITEGKADAVLAAGIFHFGEIAIREAKRAMREAGIEVRL

SEQ ID NO: 30557 - protein, 512 aa, Neisseria meningitidis
MFHSIEKYRTPAQVLLGLIALTFVGFGVSTVSHPGADYIVQVGDEKISDHSINNAIQNEQADGGGLSRDAVFQSLLQRAYLKQGSKLMGISVSSEQIKQIIVDDPNFHDANGKFDHALLNRYLSQRHMSEDQFVEEIRDQFALQNLVNLVQNGVLVGDAQAEQLIRLTQVNRTIRSHTFNPDEFIAQVKVSEADLQKFYNANKKDYLLPQAVKLEYVALNLKDFADKQTVSETEVKNAFEERVARLPTNEAKPSFEQEKAAVENELKMKKAVADFNKAKEKLGDDAFNHPSSLAEAAKNSGLKVETQETWLSRQDAQMSGMPENLINAVFSDDVLKKKHNSEVLTINSETAWVVRAKEVREEKTLPFAEAKDAVRQAYIRTEAAKLAENKAKDVLTQLNGGKAVDVKWSEVSVLGAQQARQSMPPEAYAELLKAKPANGKPAYVRLIGLPAPVIVEVQAVTPPDDIAAQLPLAKQALAQQQSANTFDLLIRYFNGKIKQTKGAQSVDNGDGQ

SEQ ID NO: 30558 - protein, 257 aa, Neisseria meningitidis
MNTIADVQSSRDLRNLPINQVGIKDLRFPITLQTAEGIQSTVARLTMTVYLPAEQKGTHMSRFVALMEQHAEALDFAQLHRLTAEMVALLDSRAGKISVSFPFFRKKTAPVSGIRSLLDYDVCLTGEIKDGAYGYSMKVMIPVTSLCPCSKEISQYGAHNQRSHVTVSLTADAEVGIEEVIDYVEAQASCQLYGLLKRPDEKYVTEKAYENPKFVEDMVRDVATSLIADKRIKSFVVESENFESIHNHSAYAYIAYP

SEQ ID NO: 30559 - protein, 187 aa, Neisseria meningitidis; identical to SEQ ID NO: 18661

SEQ ID NO: 30560 - protein, 537 aa, Neisseria meningitidis
VNWNQVQLAYDKWDYKQEGLTGAGAAIIALAVAAVTGGVGAGLIGAAQGTASAAVADAAFTALVSQASISLINNKGNIGNTLKELGRSRTVKNLVVAAATAGVADKIGASALNNISDKQWVNDLTVNLANAGSAALINTTVNGGSLKDNLEANILAALVNTAHGEAASKIKQLDHHYITHKIAHAIAGCAAAAANKGKCQDGAIGAAVGEIVGETLVKNTDFSRMSATEIEKAKAKITAYSKLVAGTASAVVGGDVNTAANAAQIAVENNTLYPRCVGAKCDEFQKEQQKWIRENPEEYREVLLFQTGFIPIIGDIQSFVQAQTAADHLFALLGVVPGIGESIQAYKVAKAAKNLQGMKKALDKAVTVATAQGYVSKTKIKVGQTELRVTAATDKQLLKTISEGRDTTGKMTEQLFDSLAKQNGFRVLSGGKYGGNNGFDHVWQAADGSVVLIVESKQIRNGTVQLNPNGAGGYTQMSEDWIKQVANSLPDGSPAKAAVFKAEREGKLKTAIAGVDRQTGKAVILSVKVPSKTNIRR

SEQ ID NO: 30561 - protein, 199 aa, Neisseria meningitidis; identical to SEQ ID NO: 4318

SEQ ID NO: 30562 - protein, 176 aa, Neisseria meningitidis
  misc_feature 172, 173, 174: 'Xaa' is any amino acid
MNLPIQKFMMLFAAAISLLQIPISHANGLDARLRDDMQAKHYEPGGKYHLFGNARGSVKNRVYAVQTFDATAVGPILPITHERTGFEGVIGYETHFSGHGHEVHSPFDNHDSRSTSDFSGGVDGGFTVYQLHRTGSEIHPEDGYDGPQGSDYPPPGGARDIYSYYVKELLQXXXHT

SEQ ID NO: 30563 - protein, 358 aa, Neisseria meningitidis
MPLIQTPTSACQIRQAWAKVADTPDRETAGRLKDEIKALLKEKNAVLVAHYYVDPLIQDLALETGGCVGDSLEMARFGAEHEASTLVVAGVRFMGESAKILCPEKTVLMPDLEAECSLDLGCPEEAFSAFCDQHPDRTVVVYANTSAAVKARADWVVTSSVALEIVSYLKSRGEKLIWGPDRHLGDYIRRETGADMLLWQGSCIVHNEFKGQELAALKAEHPEAVVLVHPESPQSVIELGDVVGSTSKLLKAAVSRPEKKFIVATDLGILHEMQKQAPDKEFIAAPTAGNGGSCKSCAFCPWMAMNSLGGIKYALTSGRNEILLDRKLGEAAKLPLQRMLDFAAGLKRGDVFNGMGPA

SEQ ID NO: 30564 - protein, 518 aa, Neisseria meningitidis
MDFSWLAEPHTWIGFATLLVLEVVLGIDNLVFVAILANKVQPARRDRARIIGLGLAVVIRIIMLAFMAHIITLTEPLFQIGGLAVSGKDMIMLAGGIFLLYKATTELHERLEGHNRFTVADSQKKHAPFWGVVAQILILDAVFSIDSVITAVAMVDHIVVAMGAVVVAMAVMISASKLLTEFVDRHPTVVMLCLGFLLMIGFSLIAEAFHFHIPKGYLYAAIGFSILIELFNQISQRNSRKNDYIGSSWRKRTAENVLGMMGIRESVLADAGGESGDDAHFEENEKSMIRSVLTLAERPIMGVMIPRRDIERLDISQSREEQCAQLQNTPYSRLLVVGKAGVDEPLGYINKKDLLSQLLETGGLDIQTALRQPLVLPDSTTALGAIELFRQSSADYALVVDEFGAVLGMVTMKDLLETIAGEFPEEFEREEEPAVQGNPDESLTVEGALEYVELAPQLNLPQQQEDADFHTVAGLIMEELQTIPDVGDFADFHGWRFEVVEKEGQRIERVKITKLPEE

SEQ ID NO: 30565 - protein, 150 aa, Neisseria meningitidis
MNIEVEMKVLDERMADFIPAYATEGSAGLDLRACLDEEVVLQPGETFLVPTGLAIYLANPAYAAVLLPRSGLGHKHGIVLGNLVGLIDSDYQGELKVSLWNRSSEPFTVKPFERIAQMVIVPVVQAGFKRVEEFVGSSRGEGGFGSTGLH

SEQ ID NO: 30566 - protein, 169 aa, Neisseria meningitidis; identical to SEQ ID NO: 219

SEQ ID NO: 30567 - protein, 664 aa, Neisseria meningitidis
MKRHFMPKILQQTTLHRFFRANTHHPISPSVLQQAGDLIRWLCFSDGISDFRPCRLKPQNPIGGTVMNTVSNYLSALREAMKAQGLDALVIPSADPHLSEYLPEHWQARRELSGFTGSVGTFVVTADEAGVWVDSRYWEQAAKQLAGSGIELQKSGQVPPYNEWLAANLPENAAVGIPSDMVSLTGKRTLAQSLAAKNIRIEHPDGLLDQVWTSRPAIPAETVFVHDPAYVSETAAEKLARVRAVMAEKGADYHLVSSLDDIAWLTNLRGSDVPFNPVFVSYLLIGKDNAVLFTDRCRLNAEAAAALQTAGITVEPYAQVADKLAQIGGALLIEPNKTAVSTLVRLPESVRLIEGTNPSTFFKSVKSEADIARIREAMEHDGAALCGFFAEFEDIIGKDGSLTEIDVDTMLYRHRSARPGFVSLSFDTIAGFNANGALPHYSATPESHSTISGNGLLLIDSGAQYKGGTTDITRVVPVGTPTAEQKRDNTLVLKAHIALAEAVFPENIPSPLIDAICRKPLWQAQCDYGHGTGHGVGYFLNVHEGPQRIAFAAPATPETAMKKGMVTSIEPGLYRPGKWGIRIENLAANQAVAAPQETEFGSFLCFETLTLCPIDTRLMDTALMTDGEIDWVNRYHAEVRRRLEPLTEGAAKAWLIKRTEPLAR

SEQ ID NO: 30568 - protein, 133 aa, Neisseria meningitidis
LAEGQKSAVTEYYLNHGTWPSNNSSAGVASSSKIKGKYVKEVEVKNGVVTATMLSSGVNKEIQGRKLSLWAKRQDGSVKWFCGQPVTRNNAKADDVAKTGTANIDTKHLPSTCRDASSAVCIETPPTAFYKNT

SEQ ID NO: 30569 - protein, 339 aa, Neisseria meningitidis; identical to SEQ ID NO: 2234

SEQ ID NO: 30570 - protein, 239 aa, Neisseria meningitidis
MATLSDKTILITGASQGLGEQVAKAYAAAGATVILVARHQKKLEKVYDAIVEARHPEPFAIRFDLMSAEEKEFNQFAATIAEATQGKLDGIVHCAGYFYALSPLDFQTVAEWVNQYRINTVAPMGLTRALFPLLKQSPDASVIFVGESHGETPKAYWGGFGASKAALNYLCKVAADEWERFGNLRANVLVPGPINSPQRIKSHPGEAKSERKSYGDVLPAFVWWASTESKGRSGEIVYL

SEQ ID NO: 30571 - protein, 172 aa, Neisseria meningitidis; identical to SEQ ID NO: 14215

SEQ ID NO: 30572 - protein, 261 aa, Neisseria meningitidis; identical to SEQ ID NO: 1674

SEQ ID NO: 30573 - protein, 423 aa, Neisseria meningitidis
MFQWLYDVLWLLAPIWIRRYLDKRSGSAPAYRAHRDERFGKPYPNPVTGAVWIHAVSVGETRAAQPLIRELRQRFPDAPLLMTQMTPTGRETAQVLFPDAQCRYLPYDKKTWVRQFLREHRPMFGILMETEIWPNLMKECRRTGVPLFLANARLSEKSLNGYLKVRSLIRPAAASLTGCLAQTEADAARLAKLGAASVQVCGNTKYDLMPSEQMKTLAGQFEKRIGDRQVAVCGSTRVYRGEDEAEKLLAAWQQYRGDALLVVVPRHPEHFQTVFETVKRFGFKVQRRSDGLPVEPDTQVWIGDSMGELYAYYLCADVAFVGGSLVDSGCQNIIEPLSCGVPTIFGFSTYNFSEACRHALASGAAVQVESADAWREAVEKTLSSEGGGMQMQARVDGFIAQHRGASARIAEAVREAVCGHRGR

SEQ ID NO: 30574 - protein, 468 aa, Neisseria meningitidis
MNDYAAMPSEDREVGALSLPPHSMEAEQSVLGGLMLENPAWDRIADVVSGEDFYRHEHRLIFRSIAKLINESRPADVITVQEDLQRNEELEAAGGFEYLITLAQNTPSAANIRRYAEIVRERSIMRQLAEVGTEIARSAYNPQGRDAGQLLDEAENKVFQIAESTAKSKQGFLEMPDLLKEVVQRIDMLYSRDNPDEVTGVPTGFIDLDKKTSGLQPGDLIIVAGRPSMGKTAFSINIAEHVAVEGKLPVAVFSMEMGGAQLVMRMLGSVGRLDQSVLKTGRLEDEHWGRLNEAVVKLSDAPVYIDETPGLTALELRARARRLARQFNNKLGLIVIDYLQLMSGSGRSDNRASELGEISRSLKALAKELQVPIIALSQLSRTVESRTDKRPMMSDLRESGAIEQDADLIMFMYRDEYYNQDSPMKGLAECIIGKHRNGPVGKIFLTWTGQFTKFDNAAYIPEEAKIED

SEQ ID NO: 30575 - protein, 266 aa, Neisseria meningitidis; identical to SEQ ID NO: 8298

SEQ ID NO: 30576 - protein, 228 aa, Neisseria meningitidis
MADLTFQQAVSTIVGMKDEIFRALGETFVMVGLSTTFAVIFGTLLGVLLFVTSSRQLHYNKLVNFLLDNLVNLMRAFPFVILMIAMIPATRAIVGSTIGPVAASLVLSVSGLFYFARLVEQNLREVPKGVIEAAAAMGAPPVAIIRKVLLNEARAGMVSSITVLAIGLLSYSAAAGMIGGGGLGDLAIRYGYYRYQTEVIVFIVALLVLLVILIQSTGNALARKLDKR

SEQ ID NO: 30577 - protein, 165 aa, Neisseria meningitidis; identical to SEQ ID NO: 2055

SEQ ID NO: 30578 - protein, 1067 aa, Neisseria meningitidis; identical to SEQ ID NO: 8915

SEQ ID NO: 30579 - protein, 408 aa, Neisseria meningitidis; identical to SEQ ID NO: 1777

SEQ ID NO: 30580 - protein, 206 aa, Neisseria meningitidis; identical to SEQ ID NO: 2311

SEQ ID NO: 30581 - protein, 371 aa, Neisseria meningitidis
MKIVIAPDSFKESLTAQQVAEAIKRGFQQSIADVECLLCPVGDGGEGTVDAIRHSLDLEEKCLQVTGPFGQKEVMRYFQKEQLALFEVADLVGLGKIPLEKRNPLQIQTRGIGELIRHLISQEIKEIYIGVGGTASNDGGIGIAAGLGDQFYDEDGNTLPACGQSLLNLASVSTENRYKIPEDVHIRILADVVSPLCGHQGATYTFGKQKGLDSTMFEAVDQAIQDFYEKVSPATLKLKGAGAGGGIAGGLCAFAQASIVSGIDTCLDLIDFDKKVSDVDLVIVGEGRLDCQSLAGKAPIGVAKRTPVGVPVVAICGSLVEDLPSLPFENIQAAFSILEKSEPLEDSLKNASLYLEHTASNIGHLLNMPKI

SEQ ID NO: 30582 - protein, 500 aa, Neisseria meningitidis
MSREMLQLAEALASEKNVDAEVVFQALEFALSTAAKKKADREHMDVRVQINRDTGEYQTFRRWLIVADEDYTYPDVEKTIEEIQEEIPGTTIQIGEYYEEQLPNEGFGRQAAQTAKQIILQRIRDAEREQNLNEFLAVKEDIVSGTVKRVERHGIIVEVVAGKLDALIPRDQMIPRENFRCGDRIRALFLRVEEIGNTGRKQVILSRTSGDFLVKLYANEVPEIADGMLEIRAVARDPGQRAKVAVKANDQRIDPQGTCIGVRGSRVNAVSNELSGERIDVVLWSPEPAQFVMSALSPAEVSRIVIDEDKHAVDVIVDENQLALAIGRGGQNVRLASDLTGWQLNIMTSAEADERNAAEDAAIRRLFMDHLNVDEETADVLVQEGFATLEEVAYVPAAELLAIEGFDEEIVDMLRNRARDAILTMAIAAEEKLGEVSDDMRNLEGIDADMLRSLAEAGITTRDDLAELAVDELIEITGVNEETAKAVILTAREHWFTEDK

SEQ ID NO: 30583 - protein, 335 aa, Neisseria meningitidis
MYPLARRILFALDAEKAHHFTLDALYTVYKLGLIPVTGNRTKPVKLMGMDLPNPVGLAAGLDKNGEYIDALGALGFGFIEIGTVTPKPQPGNPQPRLFRVPEHQGIINRMGFNNHGIDTMIRNIEKSKFSGVLGINIGKNAVTPIENAADDYLICLEKAYAHASYITVNISSPNTKNLRALQGGDELSALLEALKNKQAQLASVYGKYVPLAVKIAPDLDEAQIEDIAHVVKSVEMDGIIATNTTIDKSSLGSHPLAGEQGGLSGLPVHEKSNRVLKLLADHIDGKLPIIGVGGIMEGKDAADKIRLGATAVQVYSGLIYKGPALVKECLKALAR

SEQ ID NO: 30584 - protein, 154 aa, Neisseria meningitidis; identical to SEQ ID NO: 4442

SEQ ID NO: 30585 - protein, 472 aa, Neisseria meningitidis; identical to SEQ ID NO: 18056

SEQ ID NO: 30586 - protein, 309 aa, Neisseria meningitidis
MIHVSAVQAPAHIQDTGRYGHRRYGIGHAGAMDTVALAAGNILLGNDEGTAAIEIALGGIMLVFERDTPFCLTGAVYQAELDGESVYSYWRYTARKGQTLKMVRAVQGMYGYVCVAGGFDVPEVMGSRSTDLKAGFGGHQGRMLQKGDCLPIGKGAQELSKVGIAPIPFTDTVHLVPSSEYAAFSEKGRLNLERETWTLQSDSNRMGYRFDGQPLTLSQPLEMLSHAVQAGTVQVPPGGKPIILLADAQTTGGYPKIATVAAADLGRLAQVRFGSKVKFKIIGLKEATALRRKNQVYLNQIRRITHEAG

SEQ ID NO: 30587 - protein, 458 aa, Neisseria meningitidis
MHDKTWSGRFNEPVSELVKQYTASIGFDRRLAEWDIQGSLAHAQMLKEIGVLDEGDLADIRRGMAEILEEIRSGKIEWSLDLEDVHMNIERRLTDKIGDAGKRLHTGRSRNDQVATDIRLWLRDQITVIQNLIQSLQTALLDLAEQNAETVMPGFTHLQVAQPVSFGHHMLAYVEMLGRDNERMADCRRRVNRMPLGAAALAGTTYPIRREITAELLGFEQICQNSLDAVSDRDFAIEFTAAASLVMVHLSRLSEELILWMSPRFGFIDIADRFCTGSSIMPQKKNPDVPELVRGKSGRVIGHLIGLITLMKSQPLAYNKDNQEDKEPLFDTADTLIDTLRIYADMMRGVTVKPDNMRAAVMQGFATATDLADYLVKKGMPFRDAHEVVAQAVRHADQAGVDLSELPLEVLQGFSDLIADDVYGVLTPEGSLNARNHLGGTAPEQVRFQVKRWREMLA

SEQ ID NO: 30588 - protein, 237 aa, Neisseria meningitidis; identical to SEQ ID NO: 2588

SEQ ID NO: 30589 - protein, 1320 aa, Neisseria meningitidis
MSVVLPLRGVTALSDFRVEKLLQKAAALGLPEVKLSSEFWYFVGSEKALDAATVEKLQALLAAQSVEQTPKAREGLHLFLVTPRLGTISPWASKATNIAENCGLAGIERIERGMAVWLEGALTDRQKQQWAALLHDRMTESVLTDIDAAAQLFHHIQSETFSSVDVLGGGKEALVKANTEMGLALSADEIDYLVENYQALQRNPSDVELMMFAQANSEHCRHKIFNADFILNGEKQPKSLFGMIRDTHNAHPEGTVVAYKDNSSVIEGAKIERFYPDAAENQGYRFHEEDTHIIMKVETHNHPTAIAPFAGAATGAGGEIRDEGATGKGSRPKASLTGFTVSNLNIPGLKQPWEQDYGKPEHISSPLDIMIEGPIGGAAFNNEFGRPNLLGYFRTFEEKFDGQVRGYHKPIMIAGGLGSIQAQQTHKDEIPEGALLIQLGGPGMLIGLGGGAASSMDTGTNDTSLDFNSVQRGNPEIERRAQEVIDRCWQLGGKNPIISIHDVGAGGLSNAFPELVNDAGRGAVFKLREVPLEEHGLTPLQIWCNESQERYVLSILEKDLDTFRAICERERCPFAVVGTATDDGHLKVRDDLFANNPIDLPLNVLLGKPPKTTRSDKTVTPSKKPFHADDIDITEAAYRVLRLPAVAAKNFLITIGDRSVGGMTHRDQMVGKYQTPVADCAVTMMGFNTYRGEAMSMGEKPTVALFDAPASGRMCVGEAITNIAAVNIGDIGNIKLSANWMAACGNEGEDEKLYRTVEAVSKACQALDLSIPVGKDSLSMKTVWQDGEEKKSVVSPLSLIISAFAPVQDVRKTVTPELKNVEDSVLLFVDLGFGKARMGGSAFGQVYNNMSGDAPDLDDTGRLKAFYNVIQQLVAEDKLLAYHDRSDGGLFAVLVEMAFAGRCGLDIDLNLLLAQTFITNHTALSQSLRTEEVKALAEWQETIARTLFNEELGAVIQVRKQDVADIINLFYQQQLHHNVFEIGTLTDENTLIIRDGQTHLISDNLIKLQQTWQETSHQIQRLRDNPACADSEFALIGDNDRSALFANLKFDVNEDIAAPFINSGAKPKIAILREQGVNGQIEMAAAFTRAGFDAYDVHMSDLMAGRVHLADFKMLAACGGFSYGDVLGAGEGWAKSILFHPALRDQFAAFFTDPNTLTLGVCNGCQMVSNLAEIIPGTAGWPKFKRNLSEQFEARLSMVHVPKSASLILNEMQGSSLPVVVSHGEGRADFALHGGNISADLGIALQYVDGQNQITQTYPLNPNGSPQGIAGVTNADGRVTIMMPHPERVYRAAQMSWKPEDWTELSGWYRLFAGARKALG

SEQ ID NO: 30590 - protein, 182 aa, Neisseria meningitidis
  misc_feature 2, 3, 4: 'Xaa' is any amino acid
VXXXFIRQIEVDGQLITLESGEFQVYKQSHSALTALQTEQVQDSEHSGKMVAKRRFRIGDIAGEHTSFDKLPESDRATYRGTAFSSDDAGGKLTYTIDFAAKQGHGKIEHLKSPELNVDLAAADIKPDEKHHAVISGSVLYNQDEKGSYSLGIFGGQAQEVAGSAEVETANGIHHIGLAAKQ

SEQ ID NO: 30591 - protein, 296 aa, Neisseria meningitidis; identical to SEQ ID NO: 2263

SEQ ID NO: 30592 - protein, 602 aa, Neisseria meningitidis
MRTNYCGLISEQYLDQTVTVKGWVHRRRDHGGVIFIDLRDREGIVQVVIDPDTPEAFAAADSSRNEYVLSITGRVRNRPEGTTNDKMISGKIEILAKEIEVLNAAATPPFQIDDENISENVRLTNRVIDLRRPVMQRNLRLRYQVAMGVRRYLDAQGFIDIETPMLTRSTPEGARDYLVPSRVHPGEFFALPQSPQLFKQLLMVAGFDRYYQITKCFRDEDLRADRQPEFTQIDLETSFLNEDEIMDITEGMAKQVFKDALGVDLGGFPRMPYAEAMFYYGSDKPDMRIGLKFTELTDLMKTEEFKVFRGAADMKGGRVVALRVPNGAKFSRKEIDEYTKFVGIYGAKGLAYIKVNDVGNLSNGEDSGLQSPIVKFLSENALKEIIARTGAENGDIIFFGADKAKVVNEAIGALRIKVGLEHGAENGYFTDEWKPLWVVDFPMFEYDEEADRYVAVHHPFTAPKEGHEDLMVSDPANCLARAYDMVLNGWEIGGGSIRIHRADVQEKVFAALKISPEEQQEKFGFLLDNLKFGAPPHGGLAFGLDRLVTLMTGAESIRDVIAFPKTQRAQCLLTNAPNSVDDKQLRELSLRLRQKAAETKEA

SEQ ID NO: 30593 - protein, 476 aa, Neisseria meningitidis
MTWETVIGLEIHVQLNTKSKIFSGASTAFGAEPNAHAGVVECALPGVLPVMNREVVEKAIKLGLALDAKINRKNVFDRKNYFYPDLPKGYQISQLDLPIVEHGKLEIVVGDDVKTINVTRAHMEEDAGKSVHEGLNGATGIDLNRAGTPLLEVVSEPEMRSAAEAVAYAKALHSLVTWLNICDGNMAEGSFRVDANVSVRPKGQAEFGTRREIKNLNSFRFLEQAINYEAEAQIEILEDGGKVQQATMLFDPEKGETRVMRLKEDAQDYRYFPDPDLLPVIISDAQMQKAKAEMPELPKEMAARFVADYGVSEYDARLLTASRAQAAYFEEAAKESGQGKPTANWMNGELAAALNKEGMELADSPITAPRLAALVGKIADGTLSSKLAKKAFEAMWAEPEATIAEIIEKHGLQQMTDTGAVEAMVDEVLANNAKAVEQFKSGNEKALNAIVGQVMKASKGKANPAQVQELIKAKLA

SEQ ID NO: 30594 - protein, 341 aa, Neisseria meningitidis; identical to SEQ ID NO: 3492

SEQ ID NO: 30595 - protein, 129 aa, Neisseria meningitidis
MKNVQKGFTLTELLIAVAILSILTLIAYPSYKTYTRRIRLSEVKSTLLMNAQNLERYYLQKGTFDNYDETKLKQNKYFDITLSKVSPDHFTLQAAPNRATNEGETCIVTLNDGGTLSAAGSGQDCPDFD

SEQ ID NO: 30596 - protein, 133 aa, Neisseria meningitidis; identical to SEQ ID NO: 2967

SEQ ID NO: 30597 - protein, 193 aa, Neisseria meningitidis; identical to SEQ ID NO: 14766

SEQ ID NO: 30598 - protein, 78 aa, Neisseria meningitidis; identical to SEQ ID NO: 1622

SEQ ID NO: 30599 - protein, 99 aa, Neisseria meningitidis; identical to SEQ ID NO: 1110

SEQ ID NO: 30600 - protein, 265 aa, Neisseria meningitidis
MNRLYPHPIIAREGWPIIGGGLALSLLVSMCCGWWSLPFWVFTVFALQFFRDPAREIPQNPEAVLSPVDGRIVVVERARDPYRDVDALKISIFMNVFNVHSQKSPADCTVTKVVYNKGKFVNADLDKASTENERNAVLATTASGREITFVQVAGLVARRILCYTQAGAKLSRGERYGFIRFGSRVDMYLPVDAQAQVAIGDKVTGVKTVLARLPLTAPQIESEPESEPASQAASVETAANPSAEQRQIEAAAAKIQAAVQDVLKD

SEQ ID NO: 30601 - protein, 575 aa, Neisseria meningitidis
MQLSGAQIIVQSLKAEGVEYVFGYPGGAVIEIYDALFQLNKFKHILTRHEQAAVHAADAYARVSGKVGVALVTSGPGVTNALTGIATAYTDSIPMVVISGQVGNSLIGTDAFQEVDTVGITRPCVKHNFLVTDINELAETIKKAFQIAASGRPGPVVVDVPKDVTQAMAKFSYPQEDIFIRSYQPVVQGHIGQIKKAVQMLASAKRPVVYFGGGVVLGNASEELTRFVRMTGAPCTGTLMGLGAYPSGDRQFLGMLGMHGTYEANLAMQNADVVLAVGARFDDRVVSVPSKFFEKAKKVIHIDVDPSSIAKRVKADIPIVGDVKNVLSEMVALWQKQESVPSEDALGKWWKTIEEWRSRDCLWFDNGSEIIKPQYVIQKLAEITGNSAIITSDVGQHQMFAAQYYPFERPRQWLNSGGLGTMGVGLPYAIGAKLAAPDQDVFCITGDGSIQMNIQELSTCFQYRIPVNVITLNNGYLGMVRQWQEIYYGGRESETYFDSLPDFVKLAEAYGHIGIRVDKKSDVEGALLEALNQKDSLVFIDFLTDQKQNVMPMVGNGKGLDEMVLPPHMRADGKA

SEQ ID NO: 30602 - protein, 310 aa, Neisseria meningitidis; identical to SEQ ID NO: 8806

SEQ ID NO: 30603 - protein, 180 aa, Neisseria meningitidis
VSVGYDFGGWRIAADYASYRKWNNNKYSVNTKELENKNNNKRDLKTENQENGTFHAVSSLGLSAIYDFKLNDKFKPYIGARVAYGHVRHSIDSTKKTTEVLTSTHTPSTAPTIYNGKSTQNAYHESHSIRRLGLGVVAGVGFDITPKLTLDTGYRYHNWGRLENTRFKTHEVSLGMRYHF

SEQ ID NO: 30604 - protein, 264 aa, Neisseria meningitidis; identical to SEQ ID NO: 273

SEQ ID NO: 30605 - protein, 70 aa, Neisseria meningitidis; identical to SEQ ID NO: 232

SEQ ID NO: 30606 - protein, 317 aa, Neisseria meningitidis
MGFLIGLSRNLTRFTALVILFASAVAFIGPASFAWVKGDVQVLVLGIIMLGMGMTLGREDYRILAQRPLDVFIGAAAQYTVMPLLAIGIAKLFDLSPGLTLGLVLVGTCPGGVSSNIMSFLAKGDVAFSVGMTTVSTVLAPAVTPLWMTCLVGQTVDMDGWGMFRFMLLVTLLPVVLGSAANILLHGKHWFENVRAVMPGVAVLAFACIVGGVASVHGHRFAESALVMVLAIAVHNIAGYVSGYYAAALFGMDTAKKRTLAIEVGVQNAGLATGLSAKFFPGNPESAVAAAVACVWHSVSGTVLGNLFALWDKRRDA

SEQ ID NO: 30607 - protein, 159 aa, Neisseria meningitidis
  misc_feature 2, 3: 'Xaa' is any amino acid
VXXSRIGDWEADTIVGKGQKSALLTLVERVTRYTIICKLDSLKAEDTARAAVRALKAHKDRVHTITMDNGKEFYQHTKITKALKAETYFCRPYHSWEKGLNENTNGLIRQYFPKQTDFRNISDREIRRVQDELNHRPRKTLGYETPSVLFLNLFQPLIH

SEQ ID NO: 30608 - protein, 82 aa, Neisseria meningitidis; identical to SEQ ID NO: 1233

SEQ ID NO: 30609 - protein, 85 aa, Neisseria meningitidis; identical to SEQ ID NO: 4382

SEQ ID NO: 30610 - protein, 188 aa, Neisseria meningitidis; identical to SEQ ID NO: 4960

SEQ ID NO: 30611 - protein, 131 aa, Neisseria meningitidis
MMYSFEANANAVKISETVSVDTGQGAKIHKFVPKNSKTYSSDLIKTVDLTHIPTGAKARINAKITASISRAGVLAGGGKLARLGAKFSTRAVLYVGTALLAHDVYETFKEDIQARGYQYDPETDKFAKVSS

SEQ ID NO: 30612 - protein, 242 aa, Neisseria meningitidis; identical to SEQ ID NO: 9647

SEQ ID NO: 30613 - protein, 61 aa, Neisseria meningitidis; identical to SEQ ID NO: 2615

SEQ ID NO: 30614 - protein, 206 aa, Neisseria meningitidis; identical to SEQ ID NO: 8879

SEQ ID NO: 30615 - protein, 335 aa, Neisseria meningitidis
MSTFFQQTAQAMIAKHIDRFPLLKLDQVIDWQPIEQYLNRQKNRYLRDHRGRPAYPLLSMFKAVLPGQWHSLSDPELEHSLITRIDFNLFCRFDELIIPDYSTLCRYRNWLAQDDTLSELLKLINCQLTEKGLKIEKASAAVVDATIIQTAGSKQRQAIEVDEEGQISGQTTPSKDSDARWIKKNGLYKLGYKQHTRTDAEGYIEKLHITPANAHECKHLSPLLEGLPEGTTVYADKGYDSAENRQHLEEHQLLDGIMRKTCRNRPLSEAQTKRNRYLSKTRYVVEQSFGTLHRKFRYARAAYFGLIKVSAQSHLKAMCLNLLKAANRLSAPAAA

SEQ ID NO: 30616 - protein, 251 aa, Neisseria meningitidis
MDSFFKPAVWAVLWLMFAVRPALADELTNLLSSREQILRQFAEDEQPVLPINRAPAQRAGNADELIGSAMGLNEQPVLPVNRVPARRAGNADELIGNAMGLNEQPVLPVNRAPARRAGNADELIGNAMGLLGIAYRYGGTSVSTGFDCSGFMQHIFKRAMGINLPRTSAEQARMGTPVARSELQPGDMVFFRTLGGSRISHVGLYIGNNRFIHAPRTGKNIEITSLSHKYWSGKYAFARRVKKNDPSRFLN

SEQ ID NO: 30617 - protein, 261 aa, Neisseria meningitidis
VKHISSTNNEHIRHLHRLLSQGKFRRQYAQTVLEGVHLLQVFLQSGRKPVGVYIPEGKMPSEEVRRLRAVVPEGKVFSVSDGILKKISSLTCADDVLALIDIPDAGALPAGGDCVVLDGVQDPGNVGTVLRSAAAAGVGTVVLGRGSADVWSPKVLRAGMGAHFLLDIYSQADLEIWLASYKGRVFATALREEKQAVLYGEDLCEPTAWVFGNEGAGVGKAVLDRADKCVRIPMHDATESLNVAMAATICLFEQMRQRSAY

SEQ ID NO: 30618 - protein, 363 aa, Neisseria meningitidis; identical to SEQ ID NO: 2781

SEQ ID NO: 30619 - protein, 222 aa, Neisseria meningitidis; identical to SEQ ID NO: 3618

SEQ ID NO: 30620 - protein, 524 aa, Neisseria meningitidis
MAQIQMSANVKTINAVFAAMLVGTVGYFIYWGLGYTHYNYAALFTIATMFGVFMAFNIGGNDVANSFGTSVGAGTLTIPQALLIAAVFEVSGAVIAGGEVTNTIRKGIVDLKGVDFEPIQFVFIMMSALLAAALWLLFASKKGLPVSTTHSIIGGIVGSAVCMAVMNDAASGDLIRWGKLGGIGVSWVLSPVLGGAVSYFLFLRVKKNVLDYNAWAEGTLKAIKQEKKAYKERHRLFFEGLSEAEKVEYATKMAHDAQIYDEPEFDPQELQSEYYRGLYAFDNRKNNVDSYKALHSWIPFIASFGAMMISAMLIFKGLKNLHLGMSNVNSFLTIFMIGAAVWMGTFVFAKSLKRKDLGKSTFQMFSWMQVFTACGFAFSHGANDIANAIGPFAAIMDVLRTNSVAAQNVVPPIAMLTFGIALIVGLWFVGKEVIKTVGTSLAEMHPASGFTAELSAASVVMGASLMGLPVSSTHILVGAVLGIGLVNRNANWKLMKPIGLAWVITLPAAAVLSVVCYLVLQAVF

SEQ ID NO: 30621 - protein, 65 aa, Neisseria meningitidis; identical to SEQ ID NO: 15698

SEQ ID NO: 30622 - protein, 123 aa, Neisseria meningitidis; identical to SEQ ID NO: 3099

SEQ ID NO: 30623 - protein, 433 aa, Neisseria meningitidis
MPSEHQHTSSLLDFDRAHLLHPYTSMTDPLPVYPVKRAEGVFIELADGTRLVDGMSSWWCAIHGYNHPVLNQAVETQMKQMSHVMFGGLTHEPAVELGKLLVGILPQGLDRIFYADSGSVSVEVALKMVVQYQQARGLRAKQNMATVRRGYHGDTWNAMSVCDPETGMHHIFGSALPQRYFVDNPKSRFDDEWDGADLQPVRALFEVHHADIAAFILEPVVQGAGGMYFYHPQYLRGLRDLCDEFDIVLIFDEIATGFGRTGKMFACEHAEVVPDIMCIGKGLSGGYMTLAAAITSQKVTETISRGEAGVFMHGPTFMANPLACAVACASVKLLLSQDWQANIRRIESILKGRLKAAWDIRGVKDVRVLGAIGVIELDKGVDMARFQADCVAQGIWVRPFGRLVYLMPPYIISDGVLTKLADKTVQILKEHSK

SEQ ID NO: 30624 - protein, 242 aa, Neisseria meningitidis; identical to SEQ ID NO: 15956

SEQ ID NO: 30625 - protein, 151 aa, Neisseria meningitidis; identical to SEQ ID NO: 4206

SEQ ID NO: 30626 - protein, 183 aa, Neisseria meningitidis; identical to SEQ ID NO: 4524

SEQ ID NO: 30627 - protein, 121 aa, Neisseria meningitidis; identical to SEQ ID NO: 1865

SEQ ID NO: 30628 - protein, 472 aa, Neisseria meningitidis
MNIHTLLSKQWTLPPFLPKRLLLSLLILLAPNAVFWVLALLTATARPIVNLDYLPAALLIALPWRFVKIAGVLAFWLAVLFDGLMMVIQLFPFMDLIGAINLVPFILTAPAPYQIMTGLLLLYMLAMPFVLQKAAAKTDFRHIAVCAAVVAAAGYFTGHLSYYDRGRMANIFGANNFYYAKSQAMLYTVSQNADFITAGLVDPVFLPLGNQQRAATHLNEPKSQKILFIVAESWGLPANPELQNATFAKLLAQKDRFSVWESGSFPFIGATVEGEMRELCAYGGLRGFALRRAPDEKFARCLPNRLKQEGYATFAMHGAGSSLYDRFSWYPRAGFQEIKTAENLIGKKTCAIFGGVCDSELFGEVSAFFKKHGKGLFYWMTLTSHADYPESDIFNHRLKCTEYGLPAETDLCRNFSLHTQFFDQLADLIQRPEMKGVEVIIVGDHPPPVGNLNETFRYLKQGHVAWLNFKIK

SEQ ID NO: 30629 - protein, 350 aa, Neisseria meningitidis; identical to SEQ ID NO: 16166

SEQ ID NO: 30630 - protein, 275 aa, Neisseria meningitidis
MKKTAYAFLLLIGFASAPAFAETRPADPYEGYNRAVFKFNDQADRYIFAPAARGYRKVAPKPVRAGVSNFFNNLCDVVSFGSNILRLDIKRASEDLVRVGINTTFGLGGLIDIAGAGGIPDNKNTLGDTFASWGWKNSNYFVLPVLGPSTVRDALGTGITSVYSPKNIVFRTPVGRWGMTAVSAVSTREGLLDLTDSLDEAAIDKYSYTRDLYMKVRARQTGATPAEGTEDNIDIDELVESAETGAAETAVQEDSVSETQAEAAGEAETQPGTQP

SEQ ID NO: 30631 - protein, 368 aa, Neisseria meningitidis
MSLYPIYNFSAGPAVLPEAVLETARQEMLDYNGTGFPVMAMSHRSEMFLSILHHAEQDLRQLLKVPDNYKILFLQGGATTQFNMAAMNLAHGFRTADAVVTGNWSRIAYEQMSRLTDTEIRLAAHGGEQFDYLDLPPVETWDVAPDSAFVHFAVNETVNGLQYREVPRLSEGMPPLVCDMSSEILSREFDVADYGLIYAGAQKNIGPAGVTVVIVREDLLERCPNDIPDVFNYRSHINRDGMYNTPSTYAIYMSGLVFRWLQAQGGVKKIEAVNRLKAQTLYETIDGSGGFYINRIRPNARSKMNVVFQTEDEELDRRFVLEAELQGLCLLKGYKTVGGMRASIYNAMPLEGVRALADFMRDFQRRYG

SEQ ID NO: 30632 - protein, 129 aa, Neisseria meningitidis
  misc_feature 123, 124: 'Xaa' is any amino acid
MSTFFRQTAQAMIAKHIDRFPLLKLDQVIDWQPIEQYLNRQKNRYLRDHRGRPAYPLLSMFKAVLPGQWHSLSDPELEHSLITRIDFNLFCRFDELIIPDYSTLCRYRNWLAQDHTLSELLKXXTHLIN

SEQ ID NO: 30633 - protein, 109 aa, Neisseria meningitidis; identical to SEQ ID NO: 6317

SEQ ID NO: 30634 - protein, 393 aa, Neisseria meningitidis; identical to SEQ ID NO: 5005

SEQ ID NO: 30635 - protein, 491 aa, Neisseria meningitidis
MISKQEYQAQAAQGYNRIPLVQELLADLDTPLSLYLKLANRPYTYLLESVVGGERFGRYSFIGLPCSHYLKAGGKHVDVYQNGEIVEQHDGNPLPFIEAFHNRFKTPEIPSLPRFTGGLVGYFGYETIYNFEHFAHRLKHTAKADPLGTPDILLMLSQELAVVDNLSGKIYLIVYADPSQANGYERARERLEDIRTRLRQSCAIPLSLGSKHTEAVSEFGEEPFKACVDKIKDYIFAGDCMQVVPSQRMSMEFTDSPLALYRALRTLNPSPYLFYYDFGDFHIVGSSPEILVRRERDDVIVRPIAGTRLRGKTPAEDLANEQDLLSDAKEIAEHVMLIDLGRNDVGRISKTGEVKVTDKMVIEKYSHVMHIVSNVEGRLKEGVTNMDILAATFPAGTLSGAPKVRAMEIIEEVEPSKRGIYGGAVGVWGFNNDMDLAIAIRTAVVKNNTLYVQSGAGIVADSDPTSEWQETQNKARAVIRAAQMVQEGLDK

SEQ ID NO: 30636 - protein, 100 aa, Neisseria meningitidis; identical to SEQ ID NO: 3521

SEQ ID NO: 30637 - protein, 566 aa, Neisseria meningitidis
MSVKIQTRSVNTDVFNHLLTAGADPLIARLCASRGVQSPAELDDKLASLLPYQSLTNCEAAARRLADAVERQEKILIVADYDADGATACAVGLDGLAAMGAKVDFLVPNRFEHGYGLTPELAEIAAEQGVDLLITVDNGIASIAGVARAQELGLDVIVTDHHLPAETVPDCIIVNPNQKGCGFPSKSLAGVGVIFYVLMALRAELRRRNYFSDGIKEPNLGELLDLVALGTVADVVPLDHNNRILVSQGLKRMRSGKMRPGIRALFEVARRDWRKAQPFDMGFALGPRINAAGRLDDMSVGIACLLARDDTEAQELAAQLNNLNIERREIEQSMLQDALNAFPETLPSGQTTLAVYRDDFHQGVVGIVASRLKDRFYRPTIVFAPADNGEVRGSGRSIPNLHLRDALDLVSKRHPDLILKFGGHAMAAGLSILEHNIPAFQTAFEEAVREMVREDDLSQTFITDGSLKACDITLEQAQNLARHVWGQGFAPPSFTDEFHVVRQQPLGAEGKHKKAWLQKDGCEFEAMFWRCSEDIPEYIRTVYRPVANEWRNNLELQLYIDYWEAV

SEQ ID NO: 30638 - protein, 950 aa, Neisseria meningitidis
MKLSELFNPDEFAARHLSFGDEAALLAAVGEKSMDEFVGNTVPQSIRMPSELDLPEALTEADALAKLKGIASKNVINKSYIGLGYYPTRVPNVILRNVLENPGWYTAYTPYQAEIAQGRLEALLNFQQVCIDLTGFPVAGASLLDEATAAAEAMAMAHRVGKVKSERFFVDERVYPQTLDVMKTRAKYFGFELVVGDFAKADEGEYFGALFQYVGKDGDVQDLQSVIGRLKAKGTIVAVSADIMSLVLLKSPAELGADIALGNTQRFGVPMGFGGPHAAYFAFKDEFKRSAPGRIIGVSKDASGKPALRMALSTREQHIRREKATSNICTAQALLANLAGMYAVYHGPEGVKRIANRIHALASAFADALVSDGIKVVHEVFFDTVTVDFGNKEKADQVFAAALESGYNLRRVNDTQVAAAFHETSAYEDLVDLYRAFTGKDTAAFADDVKGRLNAELLRQDNILQHPVFNRYHTEHEMLRYLKKLEDRDLAMNRSMISLGSCTMKLNATAEMLPITWAEFSDIHPYAPEAQTAGYRELLADMENSLKAITGFDAISFQPNSGAQGEYSGMLAIRRYQEAQGEAQRNICLIPKSAHGTNPATAAMLGLKVVVVDTDEHGNVNIDDLKAKAEQHRDALSAIMITYPSTHGVYEEGIRDICRIIHENGGQVYMDGANLNAQIGIMQPAEVGADVLHMNLHKTFCIPHGGGGPGMGPIGLKAHLAPFAPGHALTDTHSASADQTAVAAAAFGSASILPITWMYLTMMGKQGMEQATRWALLNANYVAKRLSEDYPILYTGKNGRVAHECIVDLRPLKAESGITETDIAKRLMDYGFHAPTVSFPVAGTLMIEPTESESKAELDRFIAALKSIRREVQKVIDGEWPKDDNPLVNAPHTAADITGNWAHPYSREEAVFPLPFVREHKFWPFVNRVDDVYGDRNLVCSCPPMENYED

SEQ ID NO: 30639 - protein, 92 aa, Neisseria meningitidis
MSRNLLVRWLVVCLIPLATLAVFAANPPEDKPQHLINGIILACEATFLFKFVLFDTIKHHLKQEFDLKRQTMLLFIPIILLIVYLFHYFGAF

SEQ ID NO: 30640 - protein, 121 aa, Neisseria meningitidis; identical to SEQ ID NO: 6632

SEQ ID NO: 30641 - protein, 91 aa, Neisseria meningitidis
MNMENYFSNLNLDIRTHKLGTFTDQKVTPDVLCAVAECIIEYIENIGEIFSINDIRYSDYAEYIATAVFKKPSIENAGSEYNKFFSQPIKC

SEQ ID NO: 30642 - protein, 160 aa, Neisseria meningitidis
MPSENPCSDGIPFCRNGQSETTDWAIISFLRIPRDSKGKTMYEVNRSVFVLIPLEPFWNWLQTLPGNHLDGLTLEDIQADANSYLVRPCETADEVWDEIETRFEDIFAAELADWCEDEREWPALDADIFNEWFDIQLSTVITDLEHEPLAREAFQPINLN

SEQ ID NO: 30643 - protein, 451 aa, Neisseria meningitidis; identical to SEQ ID NO: 25886

SEQ ID NO: 30644 - protein, 279 aa, Neisseria meningitidis
VKRIFLFLATNIAVLVVINIVLAVLGINSQGGTGSLLAYSAVVGFTGSIISLLMSKFIAKQSVGAEVIDTPRTEEEAWLLNTVEAQARQWNLKTPEVAIYHSPEPNAFATGASRNSSLIAVSTGLLDHMTRDEVEAVLAHEMAHVGNGDMVTLTLIQGVVNTFVVFLSRIIANLIARNNDGSQSQGTYFLVSMVFQILFGFLASLIVMWFSRQREYRADAGAAKLVGAPKMISALQRLKGNPVDLPEEMNAMGIAGDTRDSLLSTHPSLDNRIARLKSL

SEQ ID NO: 30645 - protein, 195 aa, Neisseria meningitidis; identical to SEQ ID NO: 3348

SEQ ID NO: 30646 - protein, 103 aa, Neisseria meningitidis; identical to SEQ ID NO: 392

SEQ ID NO: 30647 - protein, 172 aa, Neisseria meningitidis; identical to SEQ ID NO: 4936

SEQ ID NO: 30648 - protein, 381 aa, Neisseria meningitidis
MTETRSLELAKELIARPSVTPDDQNCQKLLAERLHKIGFAAEALHFGDTKNIWLRRGTKAPVVCFAGHTDVVPTGPIEKWDSPPFEPTERDGRLYGRGAADMKTGIACFVTACERFVAEHPDHQGSIALLITSDEEGDALDGTTKVVDVLKARGELIDYCIVGEPTAVDKLGDMIKNGRRGSLSGNLTVKGKQGHIAYPHLAINPVHTFAPALLELTQEVWDEGNKYFPPTSFQISNINGGTGATNVIQGELNVKFNFRFSTESTEAGLKQRVHAILDKHGVQYDLQWSCSGQPFLTQAGKLTDVARAAIAAICGVEAELSTTGGTSDGRFIKAIAKELIELGLSNATIHQINENVRLNDIPKLSAVYEGILARLLAGNAV

SEQ ID NO: 30649 - protein, 205 aa, Neisseria meningitidis; identical to SEQ ID NO: 721

SEQ ID NO: 30650 - protein, 119 aa, Neisseria meningitidis; identical to SEQ ID NO: 3189

SEQ ID NO: 30651 - protein, 92 aa, Neisseria meningitidis; identical to SEQ ID NO: 600

SEQ ID NO: 30652 - protein, 291 aa, Neisseria meningitidis; identical to SEQ ID NO: 22731

SEQ ID NO: 30653 - protein, 109 aa, Neisseria meningitidis; identical to SEQ ID NO: 12104

SEQ ID NO: 30654 - protein, 117 aa, Neisseria meningitidis
MSEIKIFHNPRCSKSRAALSLLEERGIAAEVVKYLDTPPDLSELKDIFNKLGLESARGMMRVKDDLYKELGLDNPDLDNDALLRAIADHPALLERPIVLANGKAAVGRPLENIEAVL

SEQ ID NO: 30655 - protein, 161 aa, Neisseria meningitidis; identical to SEQ ID NO: 9515

SEQ ID NO: 30656 - protein, 336 aa, Neisseria meningitidis
MSKKRVLTGVTTTGIPHLGNYVGAIRPAVRAAQNLDTESFLFLADYHGIIKCHEPEMIHQSTQAVAATWLACGLDPERTTFYRQSDIPEVMELNWILTCITAKGLMNRAHAYKAAVQANAENGQEDPDFGVEMGLFSYPILMTADILMFNANEVPVGRDQIQHVEMARDIAGRFNHRFQELFTLPEVKIDENVELLVGLDGRKMSKSYGNTIPLWENDKKTQKSVNKIITNMKEPGEPKQPDESPLFEIYKAFSTPSETAAFTQMLAEGLAWGEAKKLLAAKINAELAEPRERYNELTADPSQIEEILQAGAQKARKEARELLDKVRDAVGIRPLK

SEQ ID NO: 30657 - protein, 344 aa, Neisseria meningitidis; identical to SEQ ID NO: 10896

SEQ ID NO: 30658 - protein, 426 aa, Neisseria meningitidis; identical to SEQ ID NO: 4141

SEQ ID NO: 30659 - protein, 436 aa, Neisseria meningitidis
MNTPHPRPKIAVIGAGWAGLSAAVTLARHADVTLFEAGRQAGGRARALAGNTDGFGFLDNGQHILLGAYRGVLRLMKTIGSDPHAAFLRVPLHWHMHGGLQFRALPLPAPLHILGGVLLARRVPSAFKAKLLADMSDLQKSARLGQPDTTVAQWLKQRNVPRAAVMQFWQPLVWGALNTPLETASLRVLCNVLSDGVLTKKSGSDYLLPKQDLGAIVAEPALAELQRLGADIRLETRICRLNTLPDGKVLVNGEPFDAAVPATAPYHAAALLPEGTPEHVQTAYQNLRYHAITTVYLRYAEPVRLPAPLTGLADGTVQWLLCRGRLGLPENEVSAVISVSDRVGAFANRAWADKVHADLKRILPHLGEPEAVRVITEKRATTAADAPPPDLSWLHRHRIFPAGDYLHPDYPATLEAAVQSGFASAEACLQSLSDAV

SEQ ID NO: 30660 - protein, 252 aa, Neisseria meningitidis
MITIRNVSYRIGTHPILDNISLDIPEGGITALIGPNGAGKSTLFSFMARLRPLESGSIAYRGKNLADTPTAELARTLSILTQENSIMSRITVRDLLMFGRYPYHQGRPTAECRRIVNGAIEEFHLQDLSDRYLTELSGGQRQRAMIAMVFCQSTDYVLLDEPLNNLDMYHARSLMQILQKLTREHKCTTVAVLHDINQAAAYADHVVAMKNGKAALTGTPEEVFTVHNIKELFDMDVDVLDYEGKKLIVHHI

SEQ ID NO: 30661 - protein, 720 aa, Neisseria meningitidis
MQQKIRFQIEGMTCQACASRIEKVLNKKDFVESAGVNFASEEAQVVFDDSKTSVADIAKIIEKTGYGAKEKTEDTLPQPEAEHHIGWRLWLLFTINVPFLIGMAGMMIGRHDWMIPPLWQFALASVVQLWLAVPFYKSAWASIKGGLANMDVLVTIGTVSIYLYSVYMLFFSPHAAYGMAHVYFEVGVMVIGFVSLGKFLEHRTKKSSLNSLGLLLKLTPTQVNVQRNGEWKQLPIDQVQIGDLIRANHGERIAADGIIESGSGWADESHLTGESNPEEKKAGGKVLAGALMTEGSVVYRATQLGSQTLLGDMMNALSEAQGSKAPIARMADKAAAVFVPAVVGIALLTFIATWLIKGDWTLALMHAVAVLVIACPCALGLATPAAIMVGMGKAVKHGIWFKDAAAMEEAAHVDAVVLDKTGTLTEGRPQVAAVYCVPDSGFDEDDLYRIAAAVEQNATHPLARAIVSAAQTRSLEIPAAQNAQTVVGAGIAAEVEDVGLVKAGKAEFAELTLPEFSDGVWDIASIVAVSVDNKPIGAFALADALKADTAEAIGRLKKHGIDVYIMSGDNQGTVEYVAKQLGITHAFGNMSPRDKAAEVQKLKAAGKTVAMVGDGINDAPALAAANVSFAMKGGADVAEHTASATLMLHSVNQLADALSVSRATLKNIKQNLFFAFFYNILGIPLAALGFLNPVIAGAAMAASSVSVLSNALRLKRVKID

SEQ ID NO: 30662 - protein, 77 aa, Neisseria meningitidis; identical to SEQ ID NO: 27183

SEQ ID NO: 30663 - protein, 199 aa, Neisseria meningitidis
MNNLIKINLLPYREEMNKRKQQQFKTLMYGAVLTGVAAVAATYLFIDNMINNQSERNTLLETSIAHLDTELSEIQKLKQEKDAFLIKENKIEELQLKRLQAAKILDSLNEAVPGSTYLTSLDAVTADSYRLSGRTSSDNRVAAMMRAMPNTGIFKQPELLSIKKNNSHQEFTLQATLQPIVKAAESKENPASGNAQEAN

SEQ ID NO: 30664 - protein, 73 aa, Neisseria meningitidis; identical to SEQ ID NO: 227

SEQ ID NO: 30665 - protein, 215 aa, Neisseria meningitidis; identical to SEQ ID NO: 709

SEQ ID NO: 30666 - protein, 469 aa, Neisseria meningitidis
MNFPKTAASLLLLLASLAAHALDTGRIPQNEIAVYVQELDSGKVIIDHRSDVPVNPASTMKLVTAFAAFKTFGSNYRWATEFKSNGTVNDGTLDGNLYWAGSGDPVFNQENLLAVQRQLREQGIRNITGHLMLDHSLWGEVGSPDDFEADSGSPFMTPPNPTMLSAGMVMVRAERNAAGSTDILTDPPLPHIFAQNNLKITASQAACPSIKKLMRASFSDNTLKLRGNIPESCLGKPVGVRMFALDELIRQSFTNHWLLGGGRISDGIGISDTPEGAQTLAVAHSKPMKEILTDMNKRSDNLIARSVFLKLGGDGKLPAVSEQAASAVRRELAVSGIDVADLVLENGSGLSRKERVTARMMAQMLETAYFSPFAQDFIDTLPIAGTDGTLRNRFKQSGGLLRLKTGTLNNVRALAGYWLGDKPMVVVVIINSGRAVSLLPDLDNFVANNIISGGDGWLDAKLMCKERRA

SEQ ID NO: 30667 - protein, 204 aa, Neisseria meningitidis
  misc_feature 198, 199: 'Xaa' is any amino acid
MKTKLIKILTPFTVLPLLACGQTPVSNANAEPAVKAESAAPVQGKVGEALKARLEKIYESQGLKVISVSETPVRGIYEVVISGRQIIYTDANADYLFSGELLDINNRKNLTEQRMADLNKIDFASLPLDKAIKEVRGNGKLKVAVFSDPDCPFCKRLEHEFEKMTDVTVYSFMMPIAGLHPDAARKAQILWCQPDRAXXTHLIN

SEQ ID NO: 30668 - protein, 134 aa, Neisseria meningitidis
MTAQPCPICTAQNEDVLLQTPKLRVITVHNDSGSPAFCRVIWHEHIAEMTDLSAAERGELMEMVYKVEAAMRQVFRPAKINLASLGNVVPHLHWHIIARFENDASFPAPIWANPVRKHGMTLPQDWTEQLKKLL

SEQ ID NO: 30669 - protein, 291 aa, Neisseria meningitidis
MNLYDLLLAPFAEFDFMRYALVSVFCLSLSAAPVGVFLVMRRMSLIGDALSHAVLPGAAVGYMFAGLSLPAMGLGGVAAGMLMALLAGLVSRFTTLKEDANFAAFYLSSLAIGVVLVSKNGSSVDLLHLLFGSVLAVDIPALQLIAAVSTLTLLTLAVIYRPLVLESIDPLFLKSVGGKGGLWHVLFLVLVVMNLVSGFQALGTLMSVGLMMLPAITARLWAKHMGALILLSVLTALLCGLSGLLISYHIEIPSGPAIILCCSVLYLFSVILGKEGGILTKWLKNHRHHTT

SEQ ID NO: 30670 - protein, 291 aa, Neisseria meningitidis
MEEGLIDRLLETLWLDRRLSQNTLNGYRRDLEKIARRLSQSGRTLKDADEADLAAAVYVDGEQRSSQARALSACKRLYIWMEREGIRTDNPTCLLKPPKIDKNIPTLITEQQISRLLAAPDTDTPHGLRDKALLELMYATGLRVSEAVGLNFGNVDLDRGCITALGKGDKQRMVPMGQESAYWVGRYYTEARPALLKGRSCDALFVSQKKTGISRQLAWMIVKEYASQAGIGHISPHSLRHAFATHLVQHGLDLRVVQDMLGHADLNTTQIYTHVANVWLQGVVKEHHSRN

SEQ ID NO: 30671 - protein, 444 aa, Neisseria meningitidis; identical to SEQ ID NO: 14335

SEQ ID NO: 30672 - protein, 590 aa, Neisseria meningitidis
MILPARFSDGISLSLRLKLLTGVWVGLAALSVVLTLLLSLRLENAASVIEEAGNLRMQAYRLAYMAGEGSPRSQIDNQVDEFEKSLNRISQSDAIHPLIPSDTPLAYDLIQSMLIIDWQAHILPPLQSYRRPTQVDLYRFAGNIELFLQALENANEKNTWWLRRFQWAIMLMTLVSSVLMLFWHQIWVIRPLQALREGAERIGRRCFDIPVPEGGTPEFKQVGRCFNQMGGRLKILYDDLEGQVAEQTRSLEKQNQNLTLLYQTTRDLHQSYIPQQAAEHFLNRILPAVGADSGRVCLDGGSDVYVSIHHADCGTAASDLGKYHEEIFPIEYQNETLGRLLLSFPNGISLDEDDRILLQTLGRQLGVSLAGAKQEEEKRLLAVLQERNLIAQGLHDSIAQALTFLNLQVQMLETAFAENKREEAAENIGFIKTGVQECYEDVRELLLNFRTKISNKEFPEAVADLFARFTQQTGITVETAWENGSFLPPQEAQLQMIFILQESLSNIRKHARATHVKFTLSEHGGRFTMTIQDNGQGFDTEKIGEPTGSHVGLHIMQERAKRIHAVLEIRSQAQQGTTVSLTVASEESLK

SEQ ID NO: 30673 - protein, 144 aa, Neisseria meningitidis; identical to SEQ ID NO: 3606

SEQ ID NO: 30674 - protein, 138 aa, Neisseria meningitidis
MPSEPPSDGIARHPKSTIKMAKKPNKPFRLTPKLLIRVVLLICITAIGALAIGIVSTFNPNGGKTLQTEPQHTDSPRETEFWLPNGVVGQDAAQPEHHHAASSEPAQPDGTDESGSGLPSPAAPKKIAEIGASLIKHW

SEQ ID NO: 30675 - protein, 430 aa, Neisseria meningitidis; identical to SEQ ID NO: 5084

SEQ ID NO: 30676 - protein, 589 aa, Neisseria meningitidis
MTVQTKTKGLAWQEKPLSDNERLKTESNFLRGTILDDLKDPLTGGFKGDNFQLIRFHGMYEQDDRDIRAERAEAKLEPLKFMLLRCRLPGGIIKPSQWIELDKFARKNSHYRSIRLTNRQTFQFHGVPKTKLQTMHRLLHKLGLDSIATAADMNRNVLCTSNPIESALHQQAYEYAKKISEHLLPRTRGYLDVWVDGKKVQSSDDFLQEDEPILGKTYLPRKFKTAVVIPPLNDVDCYGNDLDFVAISDGGGQLAGFNVLAGGGLSMEHGNTKTYPNISLELGFVPPEHALKAAEAVVTTQRDFGNRSDRKNARTRYTIQNMGLDNFRAEVERRMGMPFEPIRPFKFTGRGDRIGWVKGIDGNWHLTLFIESGRLVDEGGKQLLTGVLEIAKIHKGDFRITANQNLIVANVAEADKAKIEELARTYGLIRNDVSKLRENAMSCVSFPTCPLAMAEAERVLPDFIDELDKIMAKHGTSDDYIVTRITGCPNGCGRAMLAEIGLVGKAVGRYNLHIGGDREGVRIPRLYKENITLPEILAELDDLIGKWAAGRNIGEGFGDFAIRTGIVKPVLNAPVDFWDASKAVAIARA

SEQ ID NO: 30677 - protein, 174 aa, Neisseria meningitidis
LRSSEMDILLKYWKPVGVLLLIVLIFTAWHFDRAEKYRMGREAAAAEISNRLKDGYIEQAKQARSAEQKAAAAFAERQTKLEEEKQNAEKTVAAMRLELNRLRHYAAAQNRSRNLPATTTAATASDGASDSQGWLLFGQCAEKYAGLAETADGHAADLREWQAYGHAISSQRAE

SEQ ID NO: 30678 - protein, 594 aa, Neisseria meningitidis
MSLVELKVPDIGGHENVDIIAVEVNVGDTIAVDDTLITLETDKATMDVPAEVAGVVKEVKVKVGDKISEGGLIVVVEAEGTAAAPKAEAAAASAQEAPKAAAPAPQAAQFGGSADAEYDVVVLGGGPGGYSAAFAAADEGLKVAIVERYKTLGGVCLNVGCIPSKALLHNAAVIDEVRHLAANGIKYPEPELDIDMLRAYKDGVVSRLTGGLAGMAKGRKVDVIQGDGQFLDSHHLEVSLTAGDAYELAAPTGEKKIVAFKNCIIAAGSRVTKLPFIPEDPRIIDSSGALALKEVPGKLLIIGGGIIGLEMGTVYSTLGSRLDVVEMMDGLMQGADRDLVKVWQKQNEYRFDNIMVNTKTVAVEPKEDGVYVTFEGANAPKEPQRYDAVLVAAGRAPNGKLISAEKAGVAVTDRGFIEVDKQMRTNVPHIYAIGDIVGQPMLAHKAVHEGHVAAENCAGHKAYFDARVIPGVAYTSPEVAWVGETELSAKASGRKITKANFPWAASGRAIANGCDNGFTKLIFDAETGRIIGGGIVGPNGGDMIGEVCLAIEIGCDAADIGKTIHPHPTLGESIGMAAEVALGTCTDLPAQKKK

SEQ ID NO: 30679 - protein, 443 aa, Neisseria meningitidis; identical to SEQ ID NO: 6693

SEQ ID NO: 30680 - protein, 61 aa, Neisseria meningitidis; identical to SEQ ID NO: 1125

SEQ ID NO: 30681 - protein, 291 aa, Neisseria meningitidis; identical to SEQ ID NO: 22789

SEQ ID NO: 30682 - protein, 264 aa, Neisseria meningitidis
  misc_feature 258, 259: 'Xaa' is any amino acid
MAKEKFERSKPHVNVGTIGHVDHGKTTLTAALTTILAKKFGGAAKAYDQIDNAPEEKARGITINTSHVEYETETRHYAHVDCPGHADYVKNMITGAAQMDGAILVCSAADGPMPQTREHILLARQVGVPYIIVFMNKCDMVDDAELLELVEMEIRDLLSSYDFPGDDCPIVQGSALKALEGDAAYEEKIFELAAALDSYIPTPERAVDKPFLLPIEDVFSISGRGTVVTGRVERGIIHVGDEIEIVGLKKPKNHLYRXXTHLIN

SEQ ID NO: 30683 - protein, 329 aa, Neisseria meningitidis
MKQPVFAVTSGEPAGIGPDICLDLAFARLPCRCAVLGDKHLLRARAEALGKSVVLRDFDPESGGAAYGELEVLHIPAVEAVEAGKLNPANAAYVLQLLDTALAGISDGIFDGIVTAPLHKGIINDARASTGFFSGHTEYLAEKSGTGQVVMMLAGKGLRVALVTTHLPLKDVAAAITQPLIESVARILHHDLKHKFGIKNPKILVAGLNPHAGEGGHLGHEETDTIIPALENLRREGINLAGPYPADTLFQPFMLEGADAVLAMYHDQGLPVLKYHSFGQGVNITLGLPFIRTSVDHGTALDLAATGRADSGSLITAVETAVEMARGSL

SEQ ID NO: 30684 - protein, 104 aa, Neisseria meningitidis
LQEFKLWLEKVVLDMPIDNIPFYIFDLIDLKEGVGDIYNILDFVPNSDLSKDQDDALTGIAFLRGIDVYDPPVSKEKALKALKKHPEIYQRFQHFFPFVELPPL

SEQ ID NO: 30685 - protein, 163 aa, Neisseria meningitidis
MNSLFVDNTVFITRLKAVHIGRLVQALFEEWHGFEPWSSVDKIHAYYGRCLKDGELPLAFAAVDDSGILLGSATVKRHDMESFPQYEYWLGDVFVLPEYRGKGIGRRLVAHCIGAARSLGIKFLYLYTPDVQIFYESFGWVVVGQHFHNGEWVTVMRLDVDKV

SEQ ID NO: 30686 - protein, 347 aa, Neisseria meningitidis
MQITDLLAFGAKNKASDLHLSSGISPMIRVHGDMRRINLPEMSAEEVGNMVTSVMNDHQRKIYQQNLEVDFSFELPNVARFRVNAFNTGRGPAAVFRTIPSTVLSLEELKAPSIFQKIAESPRGMVLVTGPTGSGKSTTLAAMINYINETQPAHILTIEDPIEFVHQSKKSLINQRELHQHTLSFANALRSALREDPDVILVGEMRDPETIGLALTAAETGHLVFGTLHTTGAAKTVDRIVDVFPAGEKEMVRSMLSESLTAVISQNLLKTHDGNGRVASHEILISNPAVRNLIRENKITQINSVLQTGQASGMQTMDQSLQSLVRQGLIAPEVARRRAQNSESMSF

SEQ ID NO: 30687 - protein, 446 aa, Neisseria meningitidis
MLNPSRKLVELIRILDEGGFIFSGDPVQATEALRRVDGSTEEKIIRRAEMIDRNRMLRETLERVRAGSFWLWVAAATFAFFTGFSGTYLLMDNQGLNFFLVLAGVLGMNTLMLAVWLAMLFLRVKVGRFFSSPATWFRGKDPVNQAVLRLYADEWRQPSVRWKIGATSHSLWLCTLLGMLVSVLLLLLVRQYTFNWESTLLSNAASVRAVEMLAWLPAKLGFPVPDARAVIEGRLNGNIADARAWSGLLVGSIACYGILPRLLAWAVCKILLKTSENGLDLEKPYYQAVIRRWQNKITDADTRRETVSAVSPKIVLNDAPKWAVMLETEWQDGEWFEGRLAQEWLDKGVATNREQVAALETELKQKPAQLLIGVRAQTVPDRGVLRQIVRLSEAAQGGAVVQLLAEQGLSDDLSEKLEHWRNALAECGAAWLEPDRAAQEGRLKDQ

SEQ ID NO: 30688 - protein, 508 aa, Neisseria meningitidis
MNTPLPYSNYLIRILTASVYDVAVETPLEPARSLSVRLKNNILLKREDLQPVFSFKIRGAYNKMSKLPKDALACGVIAASAGNHAQGVALSAQRLGCRAVIVMPETTPKIKVDAVKSRGGEVVLRGVSYNDAYDYAMELAEQEGLTYIAPFDDPDVIAGQGTVGMEIVSQHPDPIRAVFVPIGGGGLAAGVAAFIKQVRPEIKVIGVQTNDSCCMKQSVEAGEIVHLKDVGLFSDGTAVKVVGNETFRLCKELLDEIITVDTDAVCGAVKDIFDDTRSITEPAGALALAGLKAYIAREGAENQTLIAVTSGANMNFHRLRHVSERSELGEGNEGIFAVTIPEERGSFLKFINILGNRNITEFNYRYGDDEKAHIFVGLQAAGPQDLAVIGSRLDEAGLPNVDLTDDEIAKIHIRYMVGGRTDKVENERLVSFEFPERPGALARFLNHMQGGWNITLFHYRNHGADYGRILVGIDVPPHDAAAFDGFLESLGYSYHEETQNAAYKLFLA

SEQ ID NO: 30689 - protein, 945 aa, Neisseria meningitidis
MLDKYNPAEIESKHYQNWEEQGYFQPDMDLTKPSFSIQLPPPNVTGTLHMGHAFNQTIMDGLTRYYRMKGCNTAWIPGTDHAGIATQIVVERQLAAQNVSRHDLGREKFLEKVWEWKEVSGGTITQQMRRVGCSADWTREYFTMDDVRAETVTEVFVRLFEQGLIYRGKRLVNWDPVLGTAVSDLEVESVEEQGSMWHIRYPLADNPAEAVIVATTRPETLLGDVAVAVNPEDERYTHLIGKELILPLTGRTIPVIVDEYVEKDFGTGCVKITPAHDFNDYEVGKRHDTRLINVFDLEAKVLANAEVFNFKGEAQPGFALPEKYAGLDRFAARKQMVADLQEQGLLVEIKPHTLMPPKGDRTGSVIEPMLTSQWFVAMSATPNGGEPDSEFKGLSLADKAKKAVDSGAVRFIPENWVNTYNQWMNNIQDWCISRQLWWGHQIPAWYDETGNVYVARNQAEAEKQAGKTGLTREEDVLDTWFSSALVPFSTLGWPSETDELKAFLPSNVLVTGYEIIFFWVARMIMMTTHFTGKVPFKDVYIHGIVRDHEGKKMSKSEGNVIDPVDLIDGIGLDKLLVKRTTGLRKPETAPKVEEATKKLFPEGIPSMGADALRFTMASYASLGRSVNFDFKRAEGYRNFCNKIWNATNFVLMNTENQDCGYGATATEPRGYSFPDMWIVGRLNQTIEQVTQAYETYRFDLAAETLYSFVWNDYCDWYLELAKVQLQTGCASRQRATRHTLLRVLEAALRLLHPIIPLITEELWQTVAPMCDAKTADSIMLARFPEADGGEIVQTAFEQMTVLQDLIGAVRNLRGEMGIQPNVKAPLFVESTDDLADYLKYLPMMTRLTEAQQVAALPESEDAPVAVCNGARLMLKVEIDKAAETARLSKEAEKLQKALDKLNAKLSKPGYTEKAPAHLVEKDKADLAELEDKMAKVQTQLSKLKD

SEQ ID NO: 30690 - protein, 392 aa, Neisseria meningitidis; identical to SEQ ID NO: 276

SEQ ID NO: 30691 - protein, 103 aa, Neisseria meningitidis; identical to SEQ ID NO: 30372

SEQ ID NO: 30692 - protein, 1161 aa, Neisseria meningitidis
MRLTHIKLSGFKSFTDPTTIYVPGQLVAVIGPNGCGKSNVIDAVRWVLGEASAKQLRGESMQDVIFNGAATRRPAPRASVELVFDNSDHSLQGAWGQYAEVSIKRQLTRQGESTYFINNQTVRRRDITDLFLGTGVGARGYAVIEQGMISRIIEARPEELRAYIEEAAGVSKYKERRKETEGRLKDTREHLQRLGDLQNELARQVEKLEKQAETAERYKSLTAQLNQQQDLLDYAQWQQSLAAADKATAQHQSLQAQQDETAAQVQALNDEVHALQTAEQSQQQAVHELSNKRGVLREQIARLEEQIRHRQNLHQRIERYKQAAQAQMQRIHQEQQQIRVQLEENELQTEEKQTELAEWAMQVAEHEERLPELEEAQATLNAAFQIQQDEANRIRRELALKQQQLAHAEQTVAKHEERKGRLKQENQALNLPDEAETAAAQEAAALLQNRQEHYEEQIIAAEEALHAAREAFQTASNRFQSLKQQHITLQAQQQALSQILSQQQEAADFWQASDHAAAPQLWQHITAPAEWQHALSVILAERLQARSVPHGFVPPAPLPQGQAAWLSDGLSGGIKKSLPVQALLNQIQAQPPFQTALHHWLDGVLCAPDLSYALAHQNDLGAHQIWLTPEGHQVDKVSVLLYAKPAQESLIAQKAHLDGIASELDNLAPELSADEAAFKQAEVAVRSSEVQHKNLMQQQQQHTRQYSQAQQRAAELLARTNQGQIRREHIERELAQLAEEQTVLQHTSDGLSDDIATLQEAAAELEHQQQTTAHSRQEQQGRLKQAQLALLEANRQYGLAEVAVHKLNQQKQNYQQQIARLEQQTLDWQERQQELALAYETEFQNDEQHIKLEELSEAVQTLDEEYIVVQEKLAQIQEQGREQYAKVQTLQTKLPQLQAATQTALLQQQEALINAKRYHQNLTERAADLDALEALAKESPKVLNSSIGSLSQQIEALGAVNLAALQELEEARERDGYYRSQSEDVQAAITLLEEAIAQIDDKTKARFKETFDAVNSKVQTFFPTLFGGGEATLKMIGDDLLTAGVSIMARPPGKKNSTIHLLSGGEKALTAMSLVFALFSLNPAPFCLLDEVDAPLDDANTSRFCRLVKEMSAQTQFLYISHNRLTMEMAEQLVGVTMQEKGVSRVVAVDIKQALEMAEAV

SEQ ID NO: 30693 - protein, 76 aa, Neisseria meningitidis
VSGFIHYRINHSKEFADRQNHINGIENFWNQAKRVLRKYNGIDRKSFPLFLKECEFRFNFGTPSQQLKILRDWCGI

SEQ ID NO: 30694 - protein, 274 aa, Neisseria meningitidis; identical to SEQ ID NO: 15507

SEQ ID NO: 30695 - protein, 96 aa, Neisseria meningitidis; identical to SEQ ID NO: 2317

SEQ ID NO: 30696 - protein, 490 aa, Neisseria meningitidis
MNQTSRDLTRISHNTKIVATLGPGSNNVELLEDMIRVGGLNVVRFNFSHGTPEFHQENARIVREAAKRAGQEIAIIADLQGPKIRVGKIAGGGIELNKGETLVLDAALEGEGTREAVGLDYRDLPDDVAAGDVLWLDDGLLTLTVESVEGSRIITRVENSHVLKSNKGINKRGGGLSAGALTEKDFRDLKTAIAIGCDYLAISFVKSAEDLHIARAKVEEEMKGSTAVRPGLVSKIERVEAIENLDEIILAGDGIMVARGDLAVEVGHAAVPALQKRMIRRARELRRFSITATQMMESMITNPVPTRAEVSDVANAVLDGTDAVMCSAETAVGAYPFETVSQMAIICAAAEKEQDSLNGVAEQAEYPEAVSTNLAVAGGAVSVARAVHAKAIVALTESGSTAFEISRHNITLPIFALTPSVSAQRRMAMYRGVRPLILATSTDHDTALNEVETMLVEHNILHSGDQYIITSGSQMRESGSTNTLEVLHVK

SEQ ID NO: 30697 - protein, 161 aa, Neisseria meningitidis; identical to SEQ ID NO: 8432

SEQ ID NO: 30698 - protein, 152 aa, Neisseria meningitidis; identical to SEQ ID NO: 1697

SEQ ID NO: 30699 - protein, 227 aa, Neisseria meningitidis; identical to SEQ ID NO: 1151

SEQ ID NO: 30700 - protein, 287 aa, Neisseria meningitidis; identical to SEQ ID NO: 606

SEQ ID NO: 30701 - protein, 362 aa, Neisseria meningitidis
MSQTIDELLIPHRNAIDTIDAEILRLLNERAQHAHAIGELKGTGAVYRPEREVAVLRRIQDLNKGPLPDESVARLFREVMSECLAVERPLTIAYLGPQGTFTQQAAIKHFGHAAHTMACPTIDDCFKQVETRQADYLVAPVENSTEGSVGRTLDLLAVTALQACGEIVLRIHHNLLRKNNGSTEGIAKVFSHAQALAQCNDWLGRHLPNAERIAVSSNAEAARLVAESDDGTVAAIAGRTAAEIYGLDMVAECIEDEPNNTTRFLVMGHHETGASGSDKTSLAVSAPNRAGAVASLLQPLTESGISMTKFESRPSKSVLWEYLFFIDIEGHRRDAQIQTALERLGERASFVKVIGSYPTAVL

SEQ ID NO: 30702 - protein, 273 aa, Neisseria meningitidis
MTFDEWLGLSKLPKIEARMLLQYVSEYTRVQLLTRGGEEMPDEVRQRADRLAQRRLNGEPVAYILGVREFYGRRFTVNPSVLIPRPETEHLVEAVLARLPENGRVWDLGTGSGAVAVTVALERPDAFVRTSDISTPALETARKNAADLGARVEFAHGSWFDTDMPSEGKWDIIVSNPPYIENGDKHLSQGDLRFEPQIALTDFSDGLSCIRTLAQGAPDRLAEGGFLLLEHGFDQGAAVRGVLAENGFSGVETLPDLAGLDRVTLGKYMKHLK

SEQ ID NO: 30703 - protein, 236 aa, Neisseria meningitidis
MLFEGLPCLAVWCKNRLSAVLPVGGLNVSENLLEIETHPFDSVLPPKAAVMMMGTFPPKEDKRAMQFHYPNFQNDMWRVYGLVFFGDADYFKVPSNGEAAHSEKAFDAEKIKTFLHERGIASCPTVLKAAREHGNASDKFLKVVETVDLAAVLAKIPECRHICTTGGKATEILLDIQGGGIKMPKTGETVLFPFAGRDLTLTRLPSTSRTYPLSLAKKAAAYRAFFEMAGLCEKQL

SEQ ID NO: 30704 - protein, 1072 aa, Neisseria meningitidis
MNNETKIYITAETGGVVSGVEKAKQSIKSLGDVASSQGRRISDGLVHSGDGAEKSSTVVSAASKRTERSLASLENAIRRDIAVKIAGGKANREYYEELARQRGIDIARLNPLLSQLDRHNTQTNRATQSVKQFNNALRQTPAQITDIVTQLAGGQSPFLIMIQQGGQLRDMYGGFGGMLKGLATVISPMRLAVAGLGGGIAALGYAMYQGAEESREYRKALILAGDAAGITADRMQEIAVSVWAATGGYADARAAITALVSSGKVAADNYEQFARSITLQSQATGQSIDDLVEKYTEIAKDPLKAVVSLSATYRTMTADVYQQVKALQAQGREQDAVALVQRKFSEESEDMAKRVLGNLGLIERAWKDIKESASEAWDAVKSIGRDKTKLDEIAALDSFISQIETSKKHPVTQLFWGEEGERKLQEAYARRARLRAEIDKEAAAAETLRQKQKQNQNRTEGIAELEAVSERYATREQQRQRELLKNDKARKKALDGITDAKKRQEIINKHAANAKLINESFAEKKHERQKEKTDKTSYPTVSNGLRIKPGAEAGGKALGGTYAFAHAMQQMLGDRLFRFGAFRDRYHIGKNSLHNSGLAFDATPSPGMGMKQKQEVVAQMTRYLESLGFKNGQDFNLKLELAGQRNKNGTVATGDHWHFNWRSREAAARFAGGVEGQVKNMAHLGLFKGVEKEPLSGYEKWHEDFNRRAAEAGAKRVLEILNGNRAIGEQLKLLSDPTFGDWTLKQQADARELAEKADAQDSLTAASKKYSDIVKQMTDDSKEKLDDRLFEISLIGKTREEIEKLTLARLWDRQIAKAREEGAPLESIDLLERGKAEGMSNLSQMQKARADSDNDWRGGIESGLKSYIDSFGTMRQAMENATVQTFDKMGDALADFVATGKLDFRSLTVSILQDLSKMLIKMAIVNAMKSALGYADGGIVGGGSTQFDALFSGGGYTGYGGKYEPAGIVHKGEVVFSQRDVRNHGGVAAVERLRLNGYAGGGAVGLPSVLTGVRSAGAGSMQVNITINRDGSTESDSSADTEMAKHLAAAIPGMVEQWYVKNVYRENGTYHK

SEQ ID NO: 30705 - protein, 382 aa, Neisseria meningitidis
MNTPPFVCWIFCKVIDNFGDIGVSLRLARVLHRELGWQVHLWTDDVSALRALCPDFPDVPCVHQDIHVRTWHSDAADIDTAPVPDVVIETFACDLPENVLHIIRRHKPFWLNWEYLSAEESNERLHLMPSPQEGVQKYFWFMGFSEKSGGLIRERDYRDAVRFDTGALRRRLMLPEKNAPEWLLFGYWSDVWAKWLDMWQQAGSPLTLLLAGTQIIDSLKQSGIIPQNALQNDGDVFQTASVCLVKIPFVSQQDFDKLLHLADCAVIRGEDSFVRAQLAGKPFFWHIYPQDENVHLDKLHAFWDKAHGFYTPETARAHRRLSDDLNGGEALSATQRLECWQILQQHQNGWRQGAEEWSRYLFGQPSASEKLAAFVSKHQKIR

SEQ ID NO: 30706 - protein, 600 aa, Neisseria meningitidis
MKRQSDELAEKMPKTLPQVRPGTAMSAQALAEAAKLLNEKQRSVADARCAVVAAVLGIKYQYDCSAKAAVAQFLGLLAEGKLDAVTLGNLEKANDRSRSAKVGERTLDGWISAYLKAENATERLVALAPKTTKAVKPIESYGWLPMFMQFHNIPSAPKLAHSYRRFVQWAEAENMPVNDVPNLSMVRCVWDKLPLIMQERGRKTGAAYKSLLPYVKRDWGALKPNDVWIGDGHSFKAKVAHPVHGRPFKPEVTVIIDGCTRFVVGFSVSLAESCVAVSDTLRIGVKHFGLPIIYYSDNGGGQTGKTIDHEITGITSRLGIRHETGIAGNPQGRGIIERWWKDNLIEMARQYETFAGAGMDSSTKNLMYRKMESAFNALEKGKDLTEEQQKYLKKLPGWSRFIADVVKCIDEYNNRPHGELPRHPDGGHYSPKAYREMRLEQDGIAPDMLSAEELATMFMPQEVRKVQRGWLDLFNNSYFSTELAEYHKDEVRVSYDLDDASAVNVFDMDGKFITKAQADGNTREAFPTARIDQLAEKRRKGKIKRAENAIKLANAEVNPALEQAAVWDELGHLGGNVIEAEYAVLPRTGTDDFVLFEADR

SEQ ID NO: 30707 - protein, 359 aa, Neisseria meningitidis
MKILTVHTPSHSYPIFIGNGLLPQAGSLLKPHLGKRAAIIANETVAPLYLGTLQTALDAAGVSHFSIILPDGEAHKNWQTLNLIFDGLMQNRAERKTTLIALGGGVIGDMVGFAAATYQRGAPFVQIPTTLLSQVDSSVGGKTAINHPLGKNMIGAFYQPQAVLADLDTLHTLPARELSAGMAEVIKYGALGDIGFFEWLEQHMPELMTLDREKLAQAVYRCCQMKAGIVAQDETEQGIRAWLNLGHTFGHAVEAEMGYGVWLHGEAVAAGCVLAARLSEQLGKISAADTARLAALLEAAGLPSAPPVFAFEKWLEHMSHDKKVSGGIMRFIGLNRLGEANITEITDTDILRRTLQPYL

SEQ ID NO: 30708 - protein, 122 aa, Neisseria meningitidis; identical to SEQ ID NO: 3130

SEQ ID NO: 30709 - protein, 141 aa, Neisseria meningitidis
LLIHYTLCRYRNWLAQDNTLSELLKLINRQLTEKGLKVEKASAAVIDATIIQTAGSKQRQAIEVDEEGQISGQTTPSKDSDARWIKKNGLYKLGYKQHTRTDAEGYIEKLHITPANAHECKHLSPLLEGLPKGTTVYADKG

SEQ ID NO: 30710 - protein, 95 aa, Neisseria meningitidis
MDDLIAAFLGCLSGKYSEGKISRLEISLTAGSIFFAVFFIHELIIFIVDGNKENLWNFITGIMKDLFLFSCSVCLLFYFLLFIAETIRKTINKIK

SEQ ID NO: 30711 - protein, 307 aa, Neisseria meningitidis
MENQRPLLGFALALLAAMTWGTLPIAVRQVLKFVDAPTLVWVRFTVAAAVLFVLLALGGRLPKRRDFSWCSFRLLLLGVAGISANFVLIAQGLHYISPTTTQVLWQISPFTMIVVGVLVFKDRMTAAQKIDLVLLLAGLLMFFNDKFGELSGLGAYAKGVLLCAAGSMAWVCYAVAQKLLSAQFGPQQILLLIYAASAAVFLPFAEPAHIGSLDGTLAWVCFAYCCLNTLIGYGSFGEALKHWEASKVSAVTTLLPVFTVIFSLLGHYVMPDTFAAPDMNGLGYAGALVVVGGAVTAAVGDRLFKRR

SEQ ID NO: 30712 - protein, 102 aa, Neisseria meningitidis
MWKMLKHIAQTHRKRLIGTFSLVGLENLLMLVYPVFGGRAINAVIAGKVWQALLYALVVLLMWLVGAARRIADTRTFTRIYTEIAVPVVLEQRQRQVPHSAI

SEQ ID NO: 30713 - protein, 263 aa, Neisseria meningitidis
MARHPYRRLRPAKSSFPEVGISEEGNIRSLHLGSDTIQSSMNLDHPSELVLSYSRAMMGWLLFAERLPQHITQIGLGGGSFARWIDTYLPDTRQTAVDINPQVIAIARNLFELPFEGEKFEIIEADGAEYIKVFRHNTDVILVDGFDGEQIIDALVEEPFFRDCRNALSSDGIFVTNWWSGDKRYQRFIERLLSVFEGRVLELPAESHGNVAVMAFQSSPKEQNIDKLKKRADKLSNAYGLDFHRMLADLKASNPNNGKHFYL

SEQ ID NO: 30714 - protein, 240 aa, Neisseria meningitidis
MITVCLYGGLREYGRRFVLHVETPAEALHALFTQIKGLRQRIRDGVYQVRFDGKDQSEETIGSVFRRPADGVLHIVPRVQGAGKNGGLIQTIVGVVLIVVGAYTSWAGGAQLIAVGIGMVAGGVAQMLTKQPKLNTGGKGVEESKNSAFSNLANTAAQGRPVPLAYGLCYCGSRVISQGVQSRRIEPSSTAASSGAVLNLSLSKTFVQGVAATAPNGQKYRTDFSDDSVRARNYKAAFSG

SEQ ID NO: 30715 - protein, 90 aa, Neisseria meningitidis; identical to SEQ ID NO: 8325

SEQ ID NO: 30716 - protein, 241 aa, Neisseria meningitidis
METQNKPTVTDIDRPILVPPGGHKKVLLHSCCAPCSGEVMEAMLASGIDYTIYFYNPNIHPHKEYMLRKEENVRFAEKFGIPFIDKDDDYENDRKEWFAKAKGMEFEPERGIRCTMCFDMRFEKAAQYAHEHGFPVFTSSLGISRWKNMAQINDCGHRAAAPYDDVVYWDFNWRKGGGSARMIEISKRENFYQQEYCGCAYSLRDSNAHRKSQGRIPIKLSVLYYGDESTQYEPAPIRVDK

SEQ ID NO: 30717 - protein, 402 aa, Neisseria meningitidis
MSEAEYFSHFISNGNGKLLEIPQRRGRQDGVFIDWLSFTLHEDSLLKVSGCPLVSDAEYMFVLSKKLEEILGFGITSRCKSKGNKFYDSMFRLGLEEVDYGEVHYGGQRNTVLIELKGVGCNIANPGWELRLKQFLEDSLRPRITRVDLALDFFDGEYTPEQALLDHDNGFFDNSNMRPKSEMVGTAWRREDGSGKTFYVGRKKNSRFVRVYEKGRQLGDKESKWVRFEIQFNHGDMEIPLDILINQGSYFSGAFPICQKFKNMPNPERFDYRKKVANLTFQHKLRYAKNAVGKLINFMFDMGFDSDEIVRYLKADLGYPKGLEPEKYSLAGLKESLKFGFIHEQPDVDLEVELEELGIIKFKQSDKFDPDKRLFDPHHDVESERQYQLYLDRMYDLHANQN

SEQ ID NO: 30718 - protein, 241 aa, Neisseria meningitidis
MRIPLLAPDNYAFPDPAYALARCDGLVGVSRDLDAGRLLEAYRNGVFPWFSRDGWFFWYAVGPRAVIVPERLHVPRSLAKTLRNGSYRVAVNGCFAEVVAHCAAAARPNQDGTWIAPEFQTAYLKLHEMGHAHSFECHYPDESGETRLAGGFYGVQIGRVFYGESMFALQPDASKIAFACAVPFLADLGVELIDCQQDTEHMRRFGSELLPFADFAERLRMLNAVPLKEEIGRREVACRGL

SEQ ID NO: 30719 - protein, 265 aa, Neisseria meningitidis
MDTAQKQRWAITLSYDGSRFYGWQKQADGVPTVQAALETALAQIAGEAVSTTVAGRTDTGVHATAQVVHFDTTAVRPQQAWVRGVNAHLPEGIAVLHARQVAPEFHARFDAYGRHYRYLLESAPVRSPLLKNRAGWTHLKLDIGQMRQAAALLIGEQDFSSFRAAECQAKSPVKTIYRADLTQSSGLVRLDLHGNAFLHHMVRNIMGALVYVGSGRLSVEGFAALIQERSRLKAPPTFMPDGLYLTGVDYPEAYGIIRPQIPEWL

SEQ ID NO: 30720 - protein, 103 aa, Neisseria meningitidis
MAKLTLKPDATFRHTVKIPVPGAEPADVEFEFKARGRKAMKEFTEKHKDGWTADTVLDCVQGWDLEETFNRQNVEILLDSYPMAVFAVVNGYVEEVFNAREGN

SEQ ID NO: 30721 - protein, 318 aa, Neisseria meningitidis
MILIPPDTPFFLRNGNADTIAAKFLQRPAPTYRRELLPDSTGKTKVAYDFSDGISPDAPLVVLFHGLEGSSRSHYAVELMLAVRDRGWHGVVVHFRSCGGVANTAPVFYHLGDTAEIAFTLDTLAARYREIYAVGVSLGGNALAKYLGEQGKKALPQAAAVISAPVDAEAAGSRFDSGITRLLYTRYFLRTLIPKARSLHGFQTAFAAGCKTLGEFDDRFTAPLHGFADRHDYYRQTSCKPLLKHVAKPLLLLNAVNDPFLPPEALPTPDEVSEAVTLFQPAHGGHAGFVGSTGGRLHLQWLPQTVLSYFDSFRTNRR

SEQ ID NO: 30722 - protein, 149 aa, Neisseria meningitidis; identical to SEQ ID NO: 5576

SEQ ID NO: 30723 - protein, 96 aa, Neisseria meningitidis; identical to SEQ ID NO: 18842

SEQ ID NO: 30724 - protein, 77 aa, Neisseria meningitidis
MEATVYLEDNEYIALCDLLKLVGLAESGGQAKAFIAEGLVLRNGETETRKTAKIRGGEVIEFDGARLEIADGYDPEA

SEQ ID NO: 30725 - protein, 74 aa, Neisseria meningitidis
METWVQNYTAIGGSLYLTAAALLPIVFFFAALTVLKLKGYQAGLYTLLIALAVAVFGFGMPASMAVSSLPPQPH

SEQ ID NO: 30726 - protein, 810 aa, Neisseria meningitidis
LDGDGIETVAAKGFVGALFDHRNQGIRTATGWVSADDGLLVRDLNGNGIIDNGAELFGDNTKLADGSFAKHGYAALAELDSNGDNIINAADAAFQTLRVWQDLNQDGISQANELRTLEELGIQSLDLAYKDVNKNLGNGNTLAQQGSYTKTDGTTAKMGDLLLAADNLHSRFKDKVELTAEQAKAANLAGIGRLRDLREAAALSGDLANMLKAYSAAETKEAQLALLDNLIHKWAETDSNWGKKSPMRLSTDWTQTANEGIALTPSQVAQLKKNALVSLSDKAKAAIDAARDRIAVLDAYTGQDSSTLYYMSEEDALNIVKVTNDTYDHLAKNIYQNLLFQTRLQPYLNQISFKMENDTFTLDFSGLVQAFNHVKETNPQKAFVDLAEMLAYGELRSWYEGRRLMADYVEEAKKAGKFEDYQKVLGQETVALLAKTSGTQADDILQNVGFGHNKNVSLYGNDGNDTLIGGAGNDYLEGGSGSDTYVFGEGFGQDTVYNYDYATGRKDIIRFTDGITADMLTFTREGNHLLIKAKDGSGQVTVQSYFQNDGSGAYRIDEIHFDNGKVLDVATVKKLVQQSTDGSDRLYAYQSGNTLNGGLGDDYLYGADGNDLLNGDAGNDSIYSGNGNDTLNGGEGNDALYGYNGNDVLNGGEGNDHLNGEDGNDTLIGGAGNDYLEGGSGSDTYVFGEGFGQDTVYNYHVDKNSDTMHFKGFKAADVHFIRSGSDLVLSASEQDNVRISGFFYGENHRVDTFVFDDAAISNPDFAKYINAGNNLVQSMSVFGSNTAATGGNVDANIQSVQQPLLVTPSA

SEQ ID NO: 30727 - protein, 151 aa, Neisseria meningitidis; identical to SEQ ID NO: 1838

SEQ ID NO: 30728 - protein, 89 aa, Neisseria meningitidis; identical to SEQ ID NO: 2412

SEQ ID NO: 30729 - protein, 399 aa, Neisseria meningitidis
MSDQLILVLNCGSSSLKGAVIDRKSGSIVLSCLGERLTTPEAVITFSKDGNKRQVPLSGRNCHAGAVGMLLNELEKHGLHDRIKAIGHRIAHGGEKYSESVLIDQAVMDELNACIPLAPLHNPANISGILAAQEHFPGLPNVGVMDTSFHQTMPERAYTYAVPRELRKKYAFRRYGFHGTSMRYVAPEAARILGKPLEDIRMIIAHLGNGASITAIKNGKSVDTSMGFTPIEGLVMGTRCGDIDPGVYSYLTSHAGLDVAQVDEMLNKKSGLLGISELSNDCRTLEIAADEGHEGARLALEVMTYRLAKYIASMAVACGGVDALVFTGGIGENSRNIRAKTVSYLDFLGLHIDTKANMEKRYGNSGIISPTDSSPAVLVVPTNEELMIACDTAELAGIL

SEQ ID NO: 30730 - protein, 222 aa, Neisseria meningitidis; identical to SEQ ID NO: 6339

SEQ ID NO: 30731 - protein, 272 aa, Neisseria meningitidis; identical to SEQ ID NO: 7451

SEQ ID NO: 30732 - protein, 52 aa, Neisseria meningitidis; identical to SEQ ID NO: 7703

SEQ ID NO: 30733 - protein, 475 aa, Neisseria meningitidis; identical to SEQ ID NO: 3229

SEQ ID NO: 30734 - protein, 254 aa, Neisseria meningitidis
MIAKHIDRFPLLKLDQVIDWQPIEQYLNRQRTRYLRDHRGRPAYPLLSMFKAVLLGQWHSLSDPELEHSLITRIDFNLFCRFDELSIPDYSTLCRYRNRLAQDNTLSELLELINRQLTEKNLKIEKASAAVVDATIIQTAGSKQRQAIEVDEEGQISGQTTPSKDSDARWIKKNGLYKLGYKQHTRTDAEGYIEKLHITPANAHECKHLSPLLEGLPEGTTVYADKGYDSAENRQHLEEHQLLDGIMRGQPISD

SEQ ID NO: 30735 - protein, 164 aa, Neisseria meningitidis
MNNRHFAVIALGSNLENPAQQVRAALDTLSSHPDIRLHQTSSLYATAPVGYDDQPDFVNAVCTVSTDMDGISLLSLLNRIEADFGRKRSFRNAPRTLDLDIIDFDGISSDDPRLTLPHPRAHERSFVIRPLAEILPDFVLGKHGKVAELSKQLGNQGIRLLPDR

SEQ ID NO: 30736 - protein, 178 aa, Neisseria meningitidis
MTGFNDAAGVASASDIKGKYVEKVEVKNGVVTAEMKSSGVNKEIQGKKLSLWAKRQAGSVKWFCGQPVTRADTATNTATNTTTNTATNTTTNTATNTATNTAVTAASDTNKKINTKHLPSTCRDASSAVCIETPRADFKHFQKISRYRVLPESRHMAEKLRHSRAGGNLGLSARKLIG

SEQ ID NO: 30737 - protein, 433 aa, Neisseria meningitidis
MTESVRLPVARLKPSTVALPGSKSISNRTLLLAALSDNACEIHSLLKSDDTDRMLEALDKLGVEIEYLAEDRLKVHGTGGRFPNRTADLFLGNAGTAFRPLTAALAVLGGDYHLHGVPRMHERPIGDLVDALRIAGADVEYLGKEHYPPLHIGKRQDNGERVIPIKGNVSSQFLTALLMALPLTGQAFEIRMVGELISKPYIDITLKLMAQFGVQVINEGYRVFKIPADARYHAPEHLHVEGDASSASYFLAAGLIAATPVRVTGIGANSIQGDVAFARELEKIGADVVWGENFVEVSRPKERAVQAFDLDANHIPDAAMTLAIVALATGQTCTLRNIGSWRVKETDRIAAMANELRKLGAKVAEEAEAIHITPPETPTPDAVIDTYDDHRMAMCFSLVSLLGVPVVINDPKCTHKTFPTYFDVFSSLTETAE

SEQ ID NO: 30738 - protein, 434 aa, Neisseria meningitidis
MKPFAENIPHSLRGNCCDEALPPHTVDCPECGCRADVPRLDSGEAAFCPRCGYKLFRVGRHPFSAPPAYAAASLILMAFAYGMTYIEVGIPGAASVLSLPEMMRLMVFQDYGFLAEVMFVLTFGAPVLFLLLCLYVYAALIRKQAYPALRLATRVMVRLRQAMMVDVFFVSTLVAYIKLSSVAEVRFGSAFYLMFALSVMLIRTSVSVPQHWVYFQIGRLTGDNAVQTASEGKTCCSRCLYFRDSAESPCGVCGAELYRRRPKSLSISSAFLTAAVILYFPANILPIMISSNPAATEVNTILNGIAYMWDEGDRLIAAVIFSASILVPVLKIAAMAVLIASARFALPTGAKKLSHLYRITEAVGRWSMIDIFVIIILMCSFHTYAARVIPGSAAVYFCLVVILTMLSAYYFDPRLLWDKRASDGIAFNETEKYD

SEQ ID NO: 30739 - protein, 249 aa, Neisseria meningitidis; identical to SEQ ID NO: 2006

SEQ ID NO: 30740 - protein, 305 aa, Neisseria meningitidis; identical to SEQ ID NO: 22756

SEQ ID NO: 30741 - protein, 165 aa, Neisseria meningitidis; identical to SEQ ID NO: 3578

SEQ ID NO: 30742 - protein, 296 aa, Neisseria meningitidis
MFPVFHLSGESRRRMLQAASRFPYVFKARAEDSHKGTFGTLAVVGGSAGMSGAPVLAASAAMYLGCGKVWAGFNQDALPFAVIAGFPEIMLDTADGLTKRQGINAWMVGCGLGTGRAAVGTLAGILAEHTDKPVLLDADALNILSTDAETRNLARGCKNLILTPHPAEAARLLGTTVAQVQADRTAAVRKIRAIFGATVVLKGHKTLVASPDTEIYVNESGNAGLATAGSGDVLGGIIGSLLAQGVPVFEAACAGVWLHGAAADVIKESAGIAAGLLAGEIAPAARWLRNRITESM

SEQ ID NO: 30743 - protein, 181 aa, Neisseria meningitidis; identical to SEQ ID NO: 3612

SEQ ID NO: 30744 - protein, 558 aa, Neisseria meningitidis
MSVGLLRILVQNQVVTVEQAEHYYNESQAGKEVLPMLFSDGVISPKSLAALIARVFSYSILDLRHYPRHRVLMGVLTEEQMVEFHCVPVFRRGDKVFFAVSDPTQMPQIQKTVSAAGIEVELVIVEDDQLAGLLDWVGSRSTSLLQELGEGQEEEESHTLYIDNEEAEDGPVPRFIHKTLSDALRSGASDIHFEFYEHNARIRFRVDGQLREVVQPPIAVRGQLASRIKVMSRLDISEKRIPQDGRMQLTFQKGGKPVDFRVSTLPTLFGEKVVMRILNSDAASLNIDQLGFEPFQKKLLLEAIHRPYGMVLVTGPTGSGKTVSLYTCLNILNTESVNIATAEDPAEINLLGINQVNVNDKQGLTFAAALKSFLRQDPDIIMVGEIRDLETADIAIKAAQTGHMVFSTLHTNNAPATLSRMLNMGVAPFNIASSVSLIMAQRLLRRLCSSCKQEVERPSASALKEVGFTDEDLAKDWKLYRAVGCDRCRGQGYKGRAGVYEVMPISEEMQRVIMNNGTEVDILDVAYKEGMVDLRRAGILKVMQGITSLEEVTANTND

SEQ ID NO: 30745 - protein, 916 aa, Neisseria meningitidis; identical to SEQ ID NO: 4091

SEQ ID NO: 30746 - protein, 160 aa, Neisseria meningitidis
MMKKILAVSALCLMTAAARAADTYGYLAVWQNPQNADDVLQVKTTKEDSTKSEAFAELEAFCKGQDTLAGIAEDEPTGCRSVVSLNNTCVALAYPKALGVMRVENAVVITSPRFTSVHQVALNQCIKKYGVQGQCGLETVYCTSSSYYGGTVRSLIQNLK

SEQ ID NO: 30747 - protein, 114 aa, Neisseria meningitidis; identical to SEQ ID NO: 402

SEQ ID NO: 30748 - protein, 176 aa, Neisseria meningitidis; identical to SEQ ID NO: 3131

SEQ ID NO: 30749 - protein, 498 aa, Neisseria meningitidis
MFSNYLLSLAIWIPIAAGVLVLATGSDSRALLARVLAFMGALAGFLVTLPLFTGFDRLSGGYQFTEFHEWIPLLKINYALGVDGISVLFIILNAFITLLVVLAGWEVIQKRPAQYMAAFLIMSGLINGAFAAQDAILFYVFFEGMLIPLYLIIGVWGGPRRVYASVKLFLYTLMGSLLMLVAMVYLYYQTGSFSIVDFQNIKQIPLGVQQLLFAAFFLSFAVKVPMFPVHTWLPDAHVEAPTGGSMVLAAITLKLGAYGFLRFILPIMPDAARYFAPVIIVLSLIAVIYIGMVALVQTDMKKLVAYSSISHMGFVTLGMFLFVNGQLNDWALKGAIIQMISHGFVSAAMFMCIGVMYDRLHTRNIADYGGVVNVMPKFAAFMMLFGMANAGLPATSGFVGEFMVIMGAVKVNFWVGALAAMTLIYGASYTLWMYKRVIFGAIHNPHVAEMKDINCREFAILAVLAVAVLGMGLYPNAFIEVVHQAANDLIAHVAQSKI

SEQ ID NO: 30750 - protein, 137 aa, Neisseria meningitidis
MMPAYAYAALAFSAFTSATLLPGTSEAAFALFVHRFPEHAYGALLCAGLANGLGSMVSYWMGRLLPSRKMPSEKTLNLMRRFGIWLLAFTWLPVVGDALPLAAGWLRLNPWTSGLMLVIGKTARYAFILWGMQYYAA

SEQ ID NO: 30751 - protein, 258 aa, Neisseria meningitidis; identical to SEQ ID NO: 329

SEQ ID NO: 30752 - protein, 271 aa, Neisseria meningitidis
MSLTRLILKFYALLRLFLGKNARTAWISHPACAGHEPGANHPDSPDRILCIEQALRRAGIWQHLQTIEAEEISDTRLALVHSSKYLNRLESCLPQKGKISRLDNDTAISTGSLSAARFAAGSAVQAVDMVMNRKAWHAFCAARPPGHHAGSGKAGGFCLLNNVAAGVMHAIAEYRLKRIAVIDFDVHYGDGTAEIFKDDPRILFSTCLKPTFSPSPKTTICPTAAIWCTCPCRRERAAAHSAKPSAGSGCPDLPHSNPNWCCCRQDSTHTV

SEQ ID NO: 30753 - protein, 344 aa, Neisseria meningitidis; identical to SEQ ID NO: 4579

SEQ ID NO: 30754 - protein, 498 aa, Neisseria meningitidis
MTTENQAGSPASGIGTSEQTKAAPKAKKTFDPRASVIQIHPEGERIHPKKAEGRFAKLRIAAVLATQFVFYVIPWFNWSGRQAVVFNIPERHFFIFGLSLGVGDLIYLALLLMICAFGLFWWTTIAGRLWCGYSCPQTVYTEIMLWIDNLVEGDRNKRLKLEKSPWNFTKIRIKATKYLLIFLVCAWTGITFAGWFVPIRRFVPDLFTGAAGGGAMFATAFYGFMTFFFAHIMREKVCLHMCPYARFQSAMFDKDTLIVSYDAERGEPRGARKKTVNKEEAGLGDCINCAMCVQVCPVGIDIRNGLQYQCIGCAACIDACDEIMDKMGYPRGLIRYTTESALEHEYSEKDIKKRLLRPRVAGYGAVLAVVIAAFLVGLSTRKMVEVDILKDRGVMVRENAKGWLENAYSLRIINNSEKEQLITASVKGFDEIALTGLPEGGIKVAPRETVTLPVQVSTIPEYADKGSHPIEFTFQYRESGAPDGKPVVLEEDATFIGE

SEQ ID NO: 30755 - protein, 48 aa, Neisseria meningitidis
LVVSKEIELNQHPVFTKLTTALAVLVGKFAIDDGGDGNFHDDSPVFSD

SEQ ID NO: 30756 - protein, 76 aa, Neisseria meningitidis; identical to SEQ ID NO: 2262

SEQ ID NO: 30757 - protein, 66 aa, Neisseria meningitidis; identical to SEQ ID NO: 2062

SEQ ID NO: 30758 - protein, 462 aa, Neisseria meningitidis
MSIKFADLNLDKNILSAVSSEGYESPTPIQAQAIPFALEGRDIMASAQTGSGKTAAFLLPTLQRLTKRSEKPGKGPRALVLTPTRELAAQVEKNALAYAKNMRWFRTVSIVGGASFGYQTRALSKPVDLIVATPGRLMDLMQSGKVDFERLEVLILDEADRMLDMGFIDDIETIVEATPTDRQTLLFSATWDGAVGKLARKLTKDPEIIEVERVDDQGKIEEQLLYCDDMRHKNRLLDHILRDANIDQCVIFTSTKAMTEVIADELYEKGFAANCLHGDMPQGWRNRTLMDLRKGRCKILVATDVAARGIDVPTITHVINYDLPKQAEDYVHRIGRTGRAGRTGIAITFAEVNEYVKVHKIEKYINRKLPELTIEGMEPTRKRKSAGGKPKGKGGWGDRKSGGRRGDHKPGKEGFGGKTRGEGFKKEGFKRDGFKKTGEGFKGKRKAGDSFAGRGERRYKDR

SEQ ID NO: 30759 - protein, 289 aa, Neisseria meningitidis
MKRIFLSALPAILPLSAYADLPLTIEDIMTDKGKWKLETSLTYLNSENNRAELAAPVYIQTGATSFIPIPTEIQENGSNTDMLVGTLGLRYGLTGNTDIYGSGSYLWHEERKLDGNSKTRNKRMSDVSLGISHTFLKDDKNPALISFLESTVYEKSRNKASSGKSWLIGATTYKAIDPIVLSLTAAYRINGSKTLSDGIRYKSGNYLLLNPNISFAANDRISLTGGIQWLGRQPDRTDGKRESSRNTSTYAHFGAGFGFTKTTALNASARFNVSGQSSSELKFGVQHTF

SEQ ID NO: 30760 - protein, 106 aa, Neisseria meningitidis
LGNFAKVSGYDSAENRQHLEERQLLDGIMRKACRNRPLAEAQTKRNRYLSKTRYVVEQSFGTLHRKFRYARAAYFGLIKVSAQSHLKAMCLNLLKAPNRLSAPVAA

SEQ ID NO: 30761 - protein, 373 aa, Neisseria meningitidis; identical to SEQ ID NO: 306

SEQ ID NO: 30762 - protein, 245 aa, Neisseria meningitidis; identical to SEQ ID NO: 4045

SEQ ID NO: 30763 - protein, 158 aa, Neisseria meningitidis
MLTVCQSGSAPKNAHTASAGTPAGESCKVIRDDTAGSGKNIIYRCCNGQAAINAAIADGVLESGIPVSFGGGGVPIANGRNLVTRQAANGIGKSDSEAYERALINAARKFQQTAGKLGGRRVTGFHSYFDKQPLQGGQYDCQAGSFHVRVVMRTNVVR

SEQ ID NO: 30764 - protein, 295 aa, Neisseria meningitidis
MPYQQITVNVNDAVAERLADALMEHGALSAAIEDAYAGTQNEQAIFGEPGMPAEQIWQQSKVIALFGEHDEAAAIIQIAAQECGLKDLAYTGETIEDQDWVRLTQSQFDPIRISDRLWITPSWHEVPEGSAVNLRLDPGLAFGTGSHPTTRLCLKWLDTQLKNGESVLDYGCGSGILTIAALKLGAGSAVGVDIDEQAVRAGKDNAEQNNVDAQFFLPDGLPQGQFDVVVANILANPLRMLGEMLAARTKQGGRIVLSGLLDEQAEELGGIYSQWFDLDPAETEESWARLSGTKR

SEQ ID NO: 30765 - protein, 139 aa, Neisseria meningitidis
LAARFHPDKFASASAFEQKQAVMMSSTINDAYRTLKNPIDRAAYLLKKSGIDADAPEHTAFAPEFLMQQMEWRETLMEARAGNDLESLKNLDNEIRDEQEKLFCGLKQSFARQDYDTAAQQVRQGRFLDKLRNEISSAL

SEQ ID NO: 30766 - protein, 129 aa, Neisseria meningitidis; identical to SEQ ID NO: 322

SEQ ID NO: 30767 - protein, 273 aa, Neisseria meningitidis
MDFLIVLKALMMGLVEGFTEFLPISSTGHLIVFGNLIDFHSNHKVFEIAIQLGAVLAVVFEYRQRFSNVLHGVGKDQKANRFVLNLAIAFIPAAVMGLLFGKQIKEHLFNPLSVAVMLVLGGLFILWVEKRQSRAEPKIADVDALRPIDALMIGVAQVFALIPGTSRSGSTIMGGMLWGIERKTATEFSFFLAVPMMVAATAYDVLKHYRFFTLHDVGLILIGFVAAFVSGLVAVKALLRFVSKKNYIPFAYYRIVFGIAIIILWLSGWISWE

SEQ ID NO: 30768 - protein, 357 aa, Neisseria meningitidis
MSITIQNLNKHFGNFHALKNINLNVPTGKLVSLLGPSGCGKTTLLRIIAGLENADGGQILFDGQDVTAKHVRERKVGFVFQHYALFRHMNVFDNVAFGLTVLPKSERPSKEQICTKVEELLKLVQLSHLAKSYPHQLSGGQRQRIALARALAVEPKLLLLDEPFGALDAKVRKELRTWLRDIHHNLGVTSILVTHDQEEALEVSDEIVVMNHGKIEQTGSAEAIYRKPENAFVTEFLGETDAFEGRIEKGFWHYNGFAWKLDAQYKWQEQTAIGYIRPHEWQIAAEHETPMICAEIEKVHAVGALTHILVKHGKQDVHITLAGSDAARYPIAEGKELKLIPKQVYVFSQNELIEYSI

SEQ ID NO: 30769 - protein, 92 aa, Neisseria meningitidis; identical to SEQ ID NO: 7272

SEQ ID NO: 30770 - protein, 307 aa, Neisseria meningitidis; identical to SEQ ID NO: 1349

SEQ ID NO: 30771 - protein, 366 aa, Neisseria meningitidis
MAGNTFGQLFTVTTFGESHGAGLGCIIDGCPPGLALTESDIQADLDRRKPGTSRHVTQRREADQIEILSGVFEGKTTGTPIALLIRNTDQRSKDYGNIAQSFRPGHADYTYWHKYGTRDYRGGGRSSARETAARVAAGAVAKKWLKEKFGTEITAYVTQVGEKEIRFEGCEHISQNPFFAANHSQIAELENYMDSVRKSLDSVGAKLHIEAANVPVGLGEPVFDRLDAEIAYAMMGINAVKGVEIGAGFDSVTQRGSEHGDELTPQGFLSNHSGGILGGISTGQDICVNIAIKPTSSIATPRRSIDINGDPVELATHGRHDPCVGLRAAPIAEAMLALVLIDHALRHRAQNADVQVNTPDITLSNK

SEQ ID NO: 30772 - protein, 313 aa, Neisseria meningitidis
MPTPKAFALLGPTAGGKTALALKIAETLPVEIISLDSALVYTGMDIGTAKPSASERAFVPHHLIDIITPTGSYSAARFVEDCTRLIGEITARGKCPLIVGGTMMYFRALTQGLNDLPEADACLRADLDEQKQMYGLDFLYRTLQQVDPETACRLKPNDSQRIERALEVYYLTGKPMSAHLGSPTSHTLPFDLHTAALIPENRARLHENIALRFRQMLEQGFIGEVENLRRRYPGLTADSPAIRCVGYRQAWEYLDGATDRQTFIEKGIAATRQLAKRQLTWLRKTPLDCVADPFSDGTSCTRLIEAAKRFFGA

SEQ ID NO: 30773 - protein, 72 aa, Neisseria meningitidis
MLKTLTFAALHFSTAFSVTYVLTGSIGVSGVVALVEPLINTVVFYFHEKAWNLYKKNKTIKQTQLFQLHRCS

SEQ ID NO: 30774 - protein, 238 aa, Neisseria meningitidis; identical to SEQ ID NO: 945

SEQ ID NO: 30775 - protein, 203 aa, Neisseria meningitidis; identical to SEQ ID NO: 15529

SEQ ID NO: 30776 - protein, 507 aa, Neisseria meningitidis
MTVIKQEDFIQSICDAFQFISYYHPKDYIDALYKAWQKEENPAAKDAMTQILVNSRMCAENNRPICQDTGIATVFLKVGMDVQWDADMSVEEMVNEGVRRAYTWEGNTLRASVLADPAGKRQNTKDNTPAVIHMSIVPGGKVEVTCAAKGGGSENKSKLAMLNPSDNIVDWVLKSIPTMGAGWCPPGILGIGIGGTPEKAVLMAKESLMSHIDIQELQEKAASGAELSTTEALRLELFEKVNALGIGAQGLGGLTTVLDVKILDYPTHAASKPIAMIPNCAATRHVEFELDGSGPVELTPPRVEDWPDLTYSPDNGKRVDVDKLTKEEVASWKTGDVLLLNGKILTGRDAAHKRLVDMLNKGEELPVDFTNRLIYYVGPVDPVGDEVVGPAGPTTATRMDKFTRQMLEQTDLLGMIGKSERGVATCEAIADNKAVYLMAVGGAAYLVAKAIKSSKVLAFPELGMEAIYEFEVKDMPVTVAVDSKGESIHATAPRKWQAKIGIIPVES

SEQ ID NO: 30777 - protein, 461 aa, Neisseria meningitidis
MDGWTQTLSAQTLLGISAAAIILILILIVKFRIHALLTLVIVSLLTALATGLPTGSIVNDVLVKNFGGTLGGVALLVGLGAMLGRLVETSGGAQSLADALIRMFGEKRAPFALGVASLIFGFPIFFDAGLIVMLPIVFATARRMKQDVLPFALASIGAFSVMHVFLPPHPGPIAASEFYGANIGQVLILGLPTAFITWYFSGYMLGKVLGCTIHVPVPELLSGGTQDNDLPKEPAKAGTVVAIMLIPMLLIFLNTGVSALISEKLVSADETWVQTAKIIGSTPIALLISVLVALFVLGRKRGESGSALEKTVDGALAPVCSVILITGAGGMFGGVLRASGIGKALADSMADLGIPVLLGCFLVALALRIAQGSATVALTTAAALMAPAVAAAGFTDWQLACIVLATAAGSVGCSHFNDSGFWLVGRLLDMDVPTTLKTWTVNQTLIALIGFALSALLFAIV

SEQ ID NO: 30778 - protein, 351 aa, Neisseria meningitidis
MITLAVDAMGGDQGLAVTVPGATAFLQAHPDVRLIMTGDETQLRQALTAAGAPMERIDICHTTQVVGMDESPQSALKNKKDSSMRVAINQVKEGKAQAAVSAGNTGALMATARFVLKTIPGIERPAIAKFLPSDTDHVTLALDLGANVDCTPEQLAQFAVIGSELVHALHPQKGQPRVGLVNVGTEDIKGTDTVKQTYKLLQNSKLNFIGNIESNGILYGEADVVVADGFVGNVMLKTIEGAVKFMSGAIRREFQSNLFNKLAAIAALPALKGLKNKLDPRKFNGAILLGLRGIVIKSHGGTDETGFRYALEEAYHEAKSAGLSKIEQGVAEQLAALETAKAVQNENVGGL

SEQ ID NO: 30779 - protein, 386 aa, Neisseria meningitidis
MKRQALAAMIASLFALAACGGEPAAQAPAASAEAASSAAQTAAETPAGELPVIDAVTTHAPEVPPAIDRDYPAKVRVKMETVEKTMKMDDGVEYRYWTFDGDVPGRMIRVREGDTVEVEFSNNPSSTVPHNVDFHAATGQGGGAAATFTAPGRTSTFSFKALQPGLYIYHCAVAPVGMHIANGMYGLILVEPKEGLPKVDKEFYIVQGDFYTKGKKGAQGLQPFDMDKAVAEQPEYVVFNGHVGAIAGDNALKAKAGETVRMYVGNGGPNLVSSFHVIGEIFDKVYVEGGKLINENVQSTIVPAGGSAIVEFKVDIPGSYTLVDHSIFRAFNKGALGQLKVEGAENPEIMTQKLSDTAYAGNGAAPAASAPAASAPAASASEKSVY

SEQ ID NO: 30780 - protein, 292 aa, Neisseria meningitidis; identical to SEQ ID NO: 1803

SEQ ID NO: 30781 - protein, 299 aa, Neisseria meningitidis; identical to SEQ ID NO: 14164

SEQ ID NO: 30782 - protein, 118 aa, Neisseria meningitidis; identical to SEQ ID NO: 423

SEQ ID NO: 30783 - protein, 256 aa, Neisseria meningitidis
MTATEHDNDDAFLLRYSRHILLDEIGIEGQQKLSAAHILVVGCGGLGAAALPYLAASGVGTLTIADSDTVELHNLQRQVAFDEGDVGKPKAEALADRLKRINHTVNVRAVNEKLDGCRLTGLVQAADIVLDCCDNYATRQAVNRACVQTKTPLVSGAAVRFEGQLAVYRPDLPDSPCYACLFDGGSASDGICSLFGVFSPLVGIIGCTQAAEALKILLDAGEPSHGRLAVYRALEGGWQYFDLPHNPECPVCGAER

SEQ ID NO: 30784 - protein, 240 aa, Neisseria meningitidis; identical to SEQ ID NO: 4928

SEQ ID NO: 30785 - protein, 794 aa, Neisseria meningitidis
MADNYVIWFENLRMTDVERVGGKNASLGEMISQLTEKGVRVPGGFATTAEAYRAFLAHNGLSERISAALAKLDVEDVAELARVGKEIRQWILDTPFPEQLDAEIEAAWNKMVADAGGADISVAVRSSATAEDLPDASFAGQQETFLNINGLDNVKEAMHHVFASLYNDRAISYRVHKGFEHDIVALSAGVQRMVRSDSGASGVMFTLDTESGYDQVVFVTSSYGLGENVVQGAVNPDEFYVFKPTLKAGKPAILRKTMGSKHIKMIFTDKAEAGKSVTNVDVPEEDRNRFSITDEEITELAHYALTIEKHYGRPMDIEWGRDGLDGKLYILQARPETVKSQEEGNRNLRRFAINGEKTVLCEGRAIGQKVGQGKVRLIKDASEMDSVEAGDVLVTDMTDPDWEPVMKRASAIVTNRGGRTCHAAIIARELGIPAVVGCGNATELLKNGQEVTVSCAEGDTGFIYSGLLDVQITDVALDNMPKAPVKVMMNVGNPELAFSFANLPSEGIGLARMEFIINRQIGIHPKALLEFDKQDDELKAEITRRIAGYASPVDFYVDKIAEGVATLAASVYPRKTIVRMSDFKSNEYANLVGGNVYEPHEENPMLGFRGAARYVADNFKDCFALECKALKRVRDEMGLTNVEIMIPFVRTLGEAEAVVKALKENGLERGKNGLRLIMMCELPSNAVLAEQFLQYFDGFSIGSNDMTQLTLGLDRDSGLVSESFDERNPAVKVMLHLAISACRKQNKYVGICGQGPSDHLDFAKWLVEEGIESVSLNPDTVIETWLYLANELNK

SEQ ID NO: 30786 - protein, 422 aa, Neisseria meningitidis; identical to SEQ ID NO: 13155

SEQ ID NO: 30787 - protein, 265 aa, Neisseria meningitidis
MRAVPPPHISITGLGYLGLPLAQKFYQHGSRVAAIKRSLTSDDINLPIHLDTIDLNQDSAFQSANLARDTSFWRHHANKPVWFCLLPPSSLTHYADTVKQWAELARACNVQHLIFTSSTSVYGDTARECDEIALPDPQTESARQILAAEQHLLDSGVPNIDILRLGGLYCAERHPVSRLVQKQNIPGGNRPINIVHRNIAVESLFQTAFNPGGRRLKNIIEPRHPTRREFYTEEAAKLGLPAPDFAPDDSMGKIIRTVCDNSLSL

SEQ ID NO: 30788 - protein, 473 aa, Neisseria meningitidis
MTTIYNTLTRQKEPFAPIDPENVRMYVCGMTVYDYCHLGHARVMVVFDMIARWLRECGYPLTYVRNITDIDDKIIARAAENGETIGKLTARFIQAMHEDADALGVLRPDIEPKATENIPQMIAMIETLIQNGKAYPAANGDVYYAVREFAAYGQLSGKSLDDLRAGERVEVDGFKRDPLDFVLWKAAKAGEPAWESPWGNGRPGWHIECSAMSENLFGDTFDIHGGGADLQFPHHENEIAQSVGATGHTCGHHHAQTHHGQSIASHVKYWLHNGFIRVDGEKMSKSLGNFFTIREVLKQYDPEVVRFFILRAHYRSPLNYSDAHLDDAKGALTRLYTTLKNTPAAAFDLSENANDYTRRFYAAMNDDFGTVEAVAVLFELAGEVNKTNDAQLAGCLKALGGIIGLLQRDPTEFLQGSAASDGLSNEEIEDLIARRKQARADKNWAESDRIRDLLNEHKIILEDNAGGTTWRRG

SEQ ID NO: 30789 - protein, 339 aa, Neisseria meningitidis
MKVDGKITPITNEPLTSEKCMEIAFSIMSTKQIEEFSSTNECNFAISLPDTSRFRVNAMVQRGATALVFRSITSKIPNFDSLNLPPVLKDVVMKKRGLVIFVGGTGSGKSTSLAAMVDHRNENCQDHIITIEDPIEFVHEHKNCIITQREVGVDTENWMAALKNTLRQAPDVILIGEIRDRETMDYAIAFAETGHLCMATLHANSTNQALDRIINFFPEERREQLLTDLSLNLQAFISQRLVPRDGGKGRVAAVEVLLNSPLISELIHNGNIHEIKEVMKKSTTLGMQTFDQHLYQLYEKGDISLQEALKNADSAHDLRLAVQLRSRRAQSSSPDLELL

SEQ ID NO: 30790 - protein, 150 aa, Neisseria meningitidis; identical to SEQ ID NO: 25598

SEQ ID NO: 30791 - protein, 352 aa, Neisseria meningitidis
MSSRKIIHIDMDAFYASVELREQPHLKGRPVVVAWEGARSVICAASYEARQFGLHSAMSVATAKRLCPQAVYVPPHFDLYRQVSAQIHAVFRRYTDLIEPLSLDEAYLDVTRNFKNIPYDSEVAKEIRAAIFAETGLTASAGIASNKFLAKIASDWRKPNGQFVLPPHKVMAFLETLPLGKIPGVGKVTLKKMQSLGMQTAGDLRRFERGELLNHFGRYGYRLYDLARGTDERPVKAERERLQISTEITLPEDLPLEQAAGHLPHLAEDLWRQITRKNVEAQSVTLKLKTYDFRIITRTLTYSSVLPDCASLLQAAQMLMARVPPQTEDAFRLIGIGVGHLVPKNQQQDLWA

SEQ ID NO: 30792 - protein, 226 aa, Neisseria meningitidis
MTYTIVPIATARSPYKQKFGIARQPGLVSAAEVCIELNPEFTADSVRGLEDFDYVWISFIFHGVLDEGWAQMVRPPRLGGKQKMGVFATRSPHRPNHLGLSLLKLNRIETGKPVRLYCSGADLLDGTPIVDIKPYIPFVESKPDAASGFVSGKPVELEVVWQENIGAENLSANTKNLISQSIAQDPRPAYQNIPERIYVMNIADYEIRFQIEENRATVIDLSPTPL

SEQ ID NO: 30793 - protein, 92 aa, Neisseria meningitidis; identical to SEQ ID NO: 32

SEQ ID NO: 30794 - protein, 447 aa, Neisseria meningitidis
MNQNHTILQNLPVGQKVGIAFSGGLDTSAALLWMKLKGALPYAYTANLGQPDEDDYNAIPKKAMEYGAENARLIDCRAQLAHEGIAAIQCGAFHVSTGGIAYFNTTPLGRAVTGTMLVSAMKEDDVNIWGDGSTYKGNDIERFYRYGLLTNPALKIYKPWLDQQFIDELGGRHEMSEFLIANGFNYKMSVEKAYSTDSNMLGATHEAKDLEFLNSGIKIVKPIMGVAFWDENVEVKPEEVSVRFEEGVPVALNGKEYADPVELFLEANRIGGRHGLGMSDQIENRIIEAKSRGIYEAPGMALFHIAYERLVTGIHNEDTIEQYRINGLRLGRLLYQGRWFDSQALMLRETAQRWVAKAVTGEVTLELRRGNDYSILNTESPNLTYQPERLSMEKVEDAAFTPLDRIGQLTMRNLDITDTRAKLGIYSQSGLLSLGEGSVLPQLGNKQ

SEQ ID NO: 30795 - protein, 352 aa, Neisseria meningitidis
MRPLNVQIRLGNLRHNYRILKEMHGGKLLAVVKADAYGHGAVRCAFALADLADGFAVATIDEGIRLRESGITHPIVLLEGVFEASEYEAVEQYSLWPAVGNQWQLEALLVRHWKKPVKVWLKMDSGMHRTGFFPHDYASAYAALKQSEYVDSIVKFSHFSCADEPESGMTEIQMEAFDLGTKGLEGEESLANSAAILNIPEARRDWGRAGLALYGISPFGGGDDRLKPVMRLSTRIFGERVLQPHSPIGYGATFYTSKSTRVGLIACGYADGYPRRAPSNSPVAVDGKLTRVIGRVSMDMMTIELDASQEGLGHEVELWGDTVNINTVAEAAGTIPYELMCNIKRAKFTYIE

SEQ ID NO: 30796 - protein, 281 aa, Neisseria meningitidis
MNIADGRQAFPAPAKLNLDLRITGRREDGYHNIESIFCLIDLQDTVYLKPRDDGKIILHNPVGGIPQEADLSYRAASLLQKYARNPAGVEIWLDKKIPTGAGLGGGSSDAATVLLVLNRWWQCGLTQRQLIDSGAALGADVPFFIFGKNAFARGIGDRLDEMDIPKQWYVIVKPPVHVSTAKIFTHEGLTRNSASSIMPTFQNLQPFRNDMQAVVFKEYPEVWKAYSELSRYGFALMTGSGACVFTACQDRNSAYNIYRQVSDLYEAYLAEGLSKHPWLSV

SEQ ID NO: 30797 - protein, 54 aa, Neisseria meningitidis; identical to SEQ ID NO: 2207

SEQ ID NO: 30798 - protein, 67 aa, Neisseria meningitidis; identical to SEQ ID NO: 86

SEQ ID NO: 30799 - protein, 38 aa, Neisseria meningitidis; identical to SEQ ID NO: 15032

SEQ ID NO: 30800 - protein, 81 aa, Neisseria meningitidis
MLKSIELNSHIRNRLAEYLKSRGLDFQTAMQEEEGNKEIAAIVHSGLPTLVRKLYSEQKMQKFFWEKRDLIADYISRRMQG

SEQ ID NO: 30801 - protein, 249 aa, Neisseria meningitidis; identical to SEQ ID NO: 6142

SEQ ID NO: 30802 - protein, 186 aa, Neisseria meningitidis
MKILALLIAATCALSACGGQAEEQPASAQPQEQAQSELKTMPVSYTDYQSVANKGLADQKTGLTLPEHVVPADNAEGKNLLHDFSDGLTLTVDTDKADKITAVRVVWNTDAVPQKAEKLSKAAAALIAATAPGDRTLLRDTGDQIKMAIDSHNAQKEPTREWARGGIAYKVTVTNLPSVVLTAKAE

SEQ ID NO: 30803 - protein, 310 aa, Neisseria meningitidis; identical to SEQ ID NO: 714

SEQ ID NO: 30804 - protein, 657 aa, Neisseria meningitidis
MHPIETPDKTFHDGDGVSELGTILPAWWLNQVQSELLAVLTAAGIQPDKSQPNQLLAALNRLAVVITGDQTVNGQKTFTAQTQFPSGIHLSANQTNWNGGHKAYIGADADNAHIVFGDDTLRLHGANNRISYNNHDIFHKANKPRFAEDIEGKPNTLSGYGIGNFKVETFRGDLNTLKTDGIYSLPTAGGSSNLPVENTACHIQVIAGTKHGWCRQLGYPAYTSDVYERHQTSSANDNWSAWKKLNSDGIPVGAIVSFPKAVQNPAGYLKANGTTFAQNTFPDLYRALGNSNRLPDLSRTDIGMTAWFPSDQIPTGWLAFDDIRTRVAETAYPELYRLLTGKYGSIQNVPQAEDRFIRNAGNSLAVGTKQEDEIKRHVHKVFSHWTNHTDAAALGYEDHNERQRSALVSTWTDGDLNDNGFLTPRLDSKMATGGDENRPKALVLKLCIKAADTLGEAVFWIKSHGETINAGALDAGTLAQGLQDKADRDHTHTAAQIQGLDEKISTAVAAQFTRQTIGGVDIVRFPDGTMIQTGSYRFTRSGGPIENEVVFPVAFADGNVKCFVSERHSGRVTGDRRQHNWLFIRAKNHAAAIITNWYEGSCDWMAIGKAASGNAASSPIGPEIPETNEEPQRESGRTSTGPRNRRHRDGLLEALQD

SEQ ID NO: 30805 - protein, 174 aa, Neisseria meningitidis
MNMKKLISAICVSIVLSACNQQSKTAQAEEPVQSIQAADCTAPMDITVEQYLINLEQAFKTQNVSTKIHNKNIVKTDCGYDLTLVMDFGAIALKLDEQQKIRAISVGYILKTDGEKGQNLVNNAINGLHSIQAVLSLTTTDKLGESEAGKQLRQRIQSDRSNSAKRRSGRWYFI

SEQ ID NO: 30806 - protein, 125 aa, Neisseria meningitidis
MSDATYTGAVIMEVNGRDIEIVSIKPQTTTGRKPVKTMNRNGRVNGYCDGVTEHKLSVTAAIPIDGTEIDWDNITKAKITIYPINDEGRRTSYLDCFTVDSGEQYEVDNEARIDIEMIALHKIKE

SEQ ID NO: 30807 - protein, 312 aa, Neisseria meningitidis
MDAYPEAEAPPQSIVELVPVLIAVTDGGLRVLTVAQGTLLPNGPLSPLRNSLQAGVKLWVAKQTSQPMGYVEQLYTFVDTHRRNEHGMPVLYVSYLGLVREAADSILHPDAKWQDCYDYFPWEDLRTDGGQRDAVVGRLRIWANSADTEEVRQMRLKRIHLCWGVEPENWSEEYVLQRYEMLYESGLIVEAAEPQANFDFALTGQPMRHDHRRVLATALSRLRAKIKYRPVIFELMPPEFTLLQLQNSVEAISGRLLHKQNFRRQIQQQNLIEPSDTGVSGSKGRPAQLCRFRDDVLPDRLISDIGLPLGSR

SEQ ID NO: 30808 - protein, 753 aa, Neisseria meningitidis
MLQIEIDGKQVSVEQGATVIEAAHKLGTYIPHFCYHKKLSIAANCRMCLVNVEKAPKPLPACATPVTDGMIVRTHSAKAREAQEGVMEFLLINHPLDCPTCDQGGECQLQDLAVGYGKTTSRYTEEKRSVVGKDMGPLVSAEEMSRCIHCTRCVRFTEEIAGVQEIAMANRGEHSEIMPFIGKAVETELSGNVIDLCPVGALTSKPFRFNARTWELNRRKSVSAHDALGSNLIVQTKDHTVRRVLPLENEAINECWLSDRDRFAYEGLYHESRLKNPKIKQGGEWMDVDWKTALEYVRSAIECIAKDGNQNQVGVWANPMNTVEELYLAKKFADGLGVKNFATRLRQQDKRLSDGLKGAQWLGQSIESLADNDAVLVVGANLRKEQPLLTARLRRAAKDRMALSVLAGSKEELFMPLLSQEAAHPDEWAGRLKNLSANAEHTVTASLKNAEKAAVILGAEVQNHPDYAAIYAAAQELADATGAVLGILPQAANSVGADVLNVNSGESVVEMANAPKQAVLLLNVEPEIDTVDGAKAVAALKQAKSVMAFTPFVSETLLDVCDVLLPIAPFTETSGSFINMEGRLQSFHGVVQGFGDSRPMWKVLRVLGNLFDLKGFEYHDTAAILKDALDAESLSSKLDNRSTWTGEGVQTASDRLVRVGGVGIYHTDAIVRRSAPLQETSHAAVPAARVNPNTLARLGLQDGQTAVAKQNGASVSVAVKADAGLPENVVHLSLHTENAALGALMDTIELAGA

SEQ ID NO: 30809 - protein, 93 aa, Neisseria meningitidis; identical to SEQ ID NO: 13684

SEQ ID NO: 30810 - protein, 864 aa, Neisseria meningitidis
MSKSAVSPMMQQYLGIKAQHTDKLVFYRMGDFYEMFFDDAVEAAKLLDITLTTRGQVDGEPVKMAGVPFHAAEQYLARLVKLGKSVAICEQVGEVGAGKGPVERKVVRIVTPGTLTDSALLEDKETNRIVAVSPDKKYIGLAWASLQSGEFKTKLTTVDKLDDELARLQAAEILLPDSKNAPQLQTASGVTRLNAWQFAADAGEKLLTEYFGCQDLRGFGLDGKEHAVAIGAAGALLNYIRLTQNLMPQHLDGLSLETDSQYIGMDAATRRNLEITQTLSGKKSPTLMSTLDLCATHMGSRLLALWLHHPLRNRAHIRARQEAVAALESQYKPLQCRLKNIADIERIAARIAVGNARPRDLASLRDSLFELAQIDLSANGSSLLETLKAVFPENLSTAEQLRQAILPEPSVWLKDGNVINHGFHPELDELRRIQNHGDEFLLDLEAKERERTGLSTLKVEFNRVHGFYIELSKTQAEQAPADYQRRQTLKNAERFITPELKAFEDKVLTAQEQALALEKQLFDGVLKNLQTTLPQLQKAAKAAAALDVLSTFSALAKERNFARPEFADYPVIHIENGRHPVVEQQVRHFTANHTDLDHKHRLMLLTGPNMGGKSTYMRQVALIVLLAHTGCFVPADAATIGPFDQIFTRIGASDDLASNRSTFMVEMSETAYILHHATEQSLVLMDEVGRGTSTFDGLALAHAVAEHLLQKNKSFSLFATHYFELTYLPEAHAAAVNMHLSALEQGQDIVFLHQIQPGPAGKSYGIAVAKLAGLPVRALKSAQKHLNELENQAAANRPQLDIFSTMPSEKGDEPNVDSFVDKAEEKHFEGILAAALEKLDPDSLTPREALSELYRLKDLCKSVS

SEQ ID NO: 30811 - protein, 280 aa, Neisseria meningitidis; identical to SEQ ID NO: 854

SEQ ID NO: 30812 - protein, 320 aa, Neisseria meningitidis; identical to SEQ ID NO: 22860

SEQ ID NO: 30813 - protein, 275 aa, Neisseria meningitidis
MQNHVISLASAAERRAHIADTFGAHGIPFQFFDALMPSERLEQAMAELVPGLSAHPYLSGVEKACFMSHAVLWKQALDEGLPYIAVFEDDVLLGEGAEKFLAEDAWLQERFDPDSAFIVRLETMFMHVLTSPSGVADYCGRAFPLLESEHWGTAGYIISRKAMRFFLDRFAALPPEGLHPVDLMMFSDFFDREGMPVCQLDPALCAQELHYAKFHDQNSALGSLIEHDRLLNRKQQWRDSPANTFKRRLIRALTKISREREKRRQRREQFIVPFQ

SEQ ID NO: 30814 - protein, 1071 aa, Neisseria meningitidis
MPKRTDLKSILIIGAGPIVIGQACEFDYSGAQACKALREEGYKVILVNSNPATIMTDPEMADVTYIEPIMWQTVEKIIAKERPDAILPTMGGQTALNCALDLARNGVLAKYNVELIGATEDAIDKAEDRGRFKEAMEKIGLSCPKSFVCHTMNEALAAQEQVGFPTLIRPSFTMGGSGGGIAYNKDEFLAICERGFDASPTHELLIEQSVLGWKEYEMEVVRDKNDNCIIICSIENFDPMGVHTGDSITVAPAQTLTDKEYQIMRNSSLAVLREIGVDTGGSNVQFAVNPENGEMIVIEMNPRVSRSSALASKATGFPIAKVAAKLAVGFKLDELRNDITGGKTPASFEPSIDYVVTKIPRFAFEKFPAADDRLTTQMKSVGEVMAMGRTIQESFQKALRGLETGLCGFNPRSSDKAEIRRELANPGPERMLFVADAFRAGFTLEEIHEICAIDPWFLAQIEDLMKEEKAVSDGILSDLDFAALRRLKRKGFSDKRLAQLLNVSEKEVREHRYALKLHPVYKRVDTCAAEFATETAYLYSTYEEECESRPSDRKKVMILGGGPNRIGQGIEFDYCCVHAALALRESGFETIMVNCNPETVSTDFDTSDRLYFEPLTLEDVLEIVRTENPWGVIVHYGGQTPLKLANALVENGVNIIGTSADSIDAAEDRERFQKVLNDLGLRQPPNRIAHNEEEALVKAEEIGYPLVVRPSYVLGGRAMQIVHSAEELQKYMREAVQVSEDSPVLLDFFLNNAIEVDVDCVSDGKDVVIGGIMQHVEQAGIHSGDSGCSLPPYSLSEEIQDEIRRQTKAMAYALGVVGLMNVQFAVQDGVVFVLEVNPRASRTVPFVSKATGVPLAKVGARCMAGISLKEQGVEKEVVPDFYAVKEAVFPFIKFPGVDTILGPEMRSTGEVMGVGASFGEAYYKAQLGAGERLNPTGKIFLSVREEDKERVIKTAKNFQVLGYGICATRGTAQYLTEHGLIVQTINKVPEGRPHIGDALKNGEIALVVNTVSSDPQSVSDSHIIRQSALQQRVPQYTTTAGGEAMSEGAKSRDHLGVYSVQELHGRLKNRS

SEQ ID NO: 30815 - protein, 124 aa, Neisseria meningitidis
MIVLHGIPNCDTVKKAKNRLAEYGMEFEFRDFKKQVPSEAEICSWLEQVPLATLLNKRGTSWRKLDAETQQKVLSSTAEAVKLMSEMPSLIKRPVLECGGKVYAGFSEETYDGIFNRQAPCRQG

SEQ ID NO: 30816 - protein, 61 aa, Neisseria meningitidis; identical to SEQ ID NO: 1836

SEQ ID NO: 30817 - protein, 228 aa, Neisseria meningitidis; identical to SEQ ID NO: 4049

SEQ ID NO: 30818 - protein, 469 aa, Neisseria meningitidis; identical to SEQ ID NO: 3473

SEQ ID NO: 30819 - protein, 394 aa, Neisseria meningitidis
MTPQVLTILGSTGSIGESTLDVVSRHPEKFRVFALAGHKQVEKLAVQCRTFRPEYAVVADAEHAARLEALLKGDGTATQVLHGAQALVDVASADEVSGVMCAIVGAVGLPSALAAAQKGKTIYLANKETLVVSGALFMETARANGAAVLPVDSEHNAVFQVLPRDYAGRLNEHGIASIILTASGGPFLTADLNTFDSITPDQAVKHPNWRMGRKISVDSATMMNKGLELIEAHWLFNCPPDKLEVVIHPQSVIHSMVRYRDGSVLAQLGNPDMRTPIAYCLGLPERIDSGVGDLDFDALSALTFQKPDFDRFPCLKLAYEAMNAGGAAPCVLNATNETAVAAFLDGQIKFTDIAKTVAHCLAQDFSDGIGDIGGLLAQDAQTRAQARAFIGTLR

SEQ ID NO: 30820 - protein, 163 aa, Neisseria meningitidis; identical to SEQ ID NO: 684

SEQ ID NO: 30821 - protein, 260 aa, Neisseria meningitidis
MTDILNKILAAKAQEVAAQKAAVSPEHIRTLAAKAAPVRSFIGSIRGKHRLNLPAVIAEIKKASPSKGLIRPDFRPAEIARAYENAGAACLSVLTDEPYFQGSPEYLKQAREAVSLPVLRKDFIIDEYQVYQARAWGADAVLLIAAALEQEQLERFEAVAHELGMTVLLELHDETELEKCRNLTTPLWGVNNRNLRTFEVSLDQTLSLLPALEGKTVVTESGITGKADVEFMRARGVHTFLIGETFMRADDIEAEVGKLF

SEQ ID NO: 30822 - protein, 201 aa, Neisseria meningitidis; identical to SEQ ID NO: 291

SEQ ID NO: 30823 - protein, 431 aa, Neisseria meningitidis
MAQKIQSVKGMNDLLPVEQKDFKLTAAFWQAFEDTVGRWTRAYGYRQIRTPIVEQTGLFVRSIGEETDVVGKEMYTFSDSNDSLSLSLRPEGTASCLRAVVEHNLLYNSPQKLWYMGPMFRRERPQKGRYRQFHQVGIEALGFEGPDIDAEIVAMSADLWEKLGIREYLTLEINSLGNREERAAHRAALVEYLTRYEDKLDEDSKRRLKTNPLRVLDTKNPDLQEICNAAPRLVDYLGEASQNHYARFKAMLDGLGIQYIENPRLVRGLDYYNQTVFEWTTDKLGAQATVCGGGRYDGLIEELGGKPAPSIGFAMGIERLLLLVSEYGSLEVNAAPDVYAMHQGERADLQVMKYAQALRTQGFNVMQHSGYQSLKAQMKKADNSGARFALIVAQDELANGTVTLKDMNGAHGQQTVAAEDLTHTLQQWKNA

SEQ ID NO: 30824 - protein, 83 aa, Neisseria meningitidis; identical to SEQ ID NO: 9519

SEQ ID NO: 30825 - protein, 222 aa, Neisseria meningitidis
MKNLAIFDLDNTLINTDSDHAWPQYLIKKGLVDAAETEAQNEKFYRDYQNGCLDIDAFLKFHLAPLARYSKEELAEFHREFMAEYIIPHISPMQRMLVQSHQMAGDETLVISSTNEFIITPVCRLFGITNIIGTQLETGSDGRYTGNYIGTPSLKEGKITRLNQWLAERGETLESYGKTYFYSDSKNDLPLLRLVSEPVAVNPDAELEEEAKEKGWPVLNFK

SEQ ID NO: 30826 - protein, 283 aa, Neisseria meningitidis; identical to SEQ ID NO: 9103

SEQ ID NO: 30827 - protein, 319 aa, Neisseria meningitidis
MSKKTKQELENNKLSKRLRHAVGDAINDFNMIEPGDKIMVCLSGGKDSYALLDILRQLQASAPIDFQLVAVNLDQKQPGFPEEVLPTYLESIGVPYKIVEEDTYSTVKRVLDEGKTTCSLCSRLRRGILYRTAKELGCTKIALGHHRDDILATLFLNMFYGGKLKAMPPKLVSDNGEHIVIRPLAYVKEKDLIKYAELKQFPIIPCNLCGSQPNLQRQVIGDMLRDWDKRFPGRIESMFSALQNVVPSHLADTELFDFAGLERGQTLKHGGDLAFDSEKMPERFSDGSEEDESEIKIAPQKAERKVINILANKPKTCGA

SEQ ID NO: 30828 - protein, 132 aa, Neisseria meningitidis
  misc_feature 127, 128: 'Xaa' is any amino acid
MSYTQLTQGERYHIQYLSRHCTVTEIAKQLNRHKSTISREIRRHRTQGQQYSAEKAQRQSQTIKQRKRQPYKLDSQLIQHIDTLIRRKLSPEQVCAYLCKHHQFTLHHSTIYRYLRQDKSTAARCGXXHTLN

SEQ ID NO: 30829 - protein, 46 aa, Neisseria meningitidis; identical to SEQ ID NO: 9631

SEQ ID NO: 30830 - protein, 76 aa, Neisseria meningitidis
LEHRVAVLESGGNTVKIDLFGSNSTMYVCSVTPFQKTFEASDRNEGVARQKVRQACNRETSAMFCEDEAIRCRKFD

SEQ ID NO: 30831 - protein, 142 aa, Neisseria meningitidis
MMFSWFKLFHLFFVISWFAGLFYLPRIFVNMAMIDAPRGNPEYVRLSGMAVRLYRFMSPLGFGAVVFGSAIPFAAGWWGSGWVHVKLCLGLMLLAYQLYCGVLLRRFQNYSNTFSHRWYRVFNEIPVLLMIGALYLVVFKPF

SEQ ID NO: 30832 - protein, 508 aa, Neisseria meningitidis; identical to SEQ ID NO: 25440

SEQ ID NO: 30833 - protein, 123 aa, Neisseria meningitidis; identical to SEQ ID NO: 1603

SEQ ID NO: 30834 - protein, 316 aa, Neisseria meningitidis; identical to SEQ ID NO: 5301

SEQ ID NO: 30835 - protein, 620 aa, Neisseria meningitidis
MALLQISEPGMSAAPHRHRLAAGIDLGTTNSLVATVRSGSAACLPDAEGRVTLPSVVRYLENGGIEVGKTALSAQKTDPLNTVSSAKRLIGRTLAALHQNTHYLPYRFGDNQRVIELHTRQGVKTPVEVSAEILKTLKSRAEETLGGDLVGVVITVPAYFDDAQRQATKDAARLAGLNVLRLLNEPTAAAIAYGLDNASEGTFVVYDLGGGTFDVSVLQLTKGLFEVKATGGNSALGGDDFDHRLFCRLLEQNGLSQLNEQDSQLLLSLVRAAKEQLTTQTEARIQATLSDGMAIDTSISRAEFHNLTQHLVMKTLEPVTQALKDAGVGKNEVKGVIMVGGSTRMLHVQQAVATFFGQTPLNNLNPDEVVALGAAIQANVLAGNKTDGEWLLLDVTPLSLGLETYGGLAEKIIPRNSTIPTARAQDFTTFKDGQTAMTIHVVQGERELVSDCRSLAKFTLRGIPPMAAGAARIRVTFQIDADGLLSVSAQEQSTGVQAQIEVKPSYGLDDGAITRMLKDSMDNAAEDMAARARAEAVVEAESLTDAVNAALELDSDLLDAKELQQIRQGIADLQGRLKDGKAEDIRVAAAKLGSITDNFAAKRMNRNIQRALTGQSVDNI

SEQ ID NO: 30836 - protein, 140 aa, Neisseria meningitidis
MQVTSKWIDGMCFVGTTEGGHSVVMEGSAAEGAAKRGPSPMEMLLLGVAGCSSIDVVMIAEKQRQKVTDCRATVTAKRADDAPRVFTEIHIHFKVFGHDLKESAIERAVQMSAEKYCSASIMLGKAAKITHSFEIAGADK

SEQ ID NO: 30837 - protein, 230 aa, Neisseria meningitidis
MTAFVHTLSDGMELTVEIKRRAKKNLIIRPAGTHTVRISVPPCFSVSALNRWLYENEAVLRQTLAKTPPPQTAENRLPESILFHGRQLALTAHQDTQILLMPSEIRVPEGAPEKQLALLRDFLERQAHSYLIPRLERHARTTQLFPAPSSLTSAKTFWGVCRKTTGIRFNWRLVGAPEYVADYVCIHELCHLAHADHSRAFWALTRRFAPYTPEAKQWLKIHGRELFALG

SEQ ID NO: 30838 - protein, 230 aa, Neisseria meningitidis
MKLIKYLQYQGIGSRKQCQWLIRGGYVSINGTCMDDTDADIDSSSVETLDLDGEAVTVVPEPYFYILLNKPEDYETSHKPKHYRSIFSLFPDNMRNIDMQAVGRLDADTTGVLLITNDGKLNHNLTSPSRKIPKLYEVTLKHPTGETLCETLKNGVLLHDENETVCAADAVLENPTTLLLTITEGKYHQVKRMIAAAGNRVQHLHRRRFAHLETENLKPGEWKFIDCPKF

SEQ ID NO: 30839 - protein, 183 aa, Neisseria meningitidis
MKVLNGWSDRKMWRVLSALPIGVVFFDLIYGFVLNVLQGLDLQRAVPDLEGVLAVTPDIAFNSLQIVANGGMAAVVCFGLAVVFLLNRSVRRRQVLEIGVFRMLGLVAVLAFSAPSVWEWANALPLLLKGADVVNTGNARYVLTALCMPFPAVSCVIGLVGRFRLQTASGRAAKSGGAGKADG

SEQ ID NO: 30840 - protein, 65 aa, Neisseria meningitidis; identical to SEQ ID NO: 926

SEQ ID NO: 30841 - protein, 234 aa, Neisseria meningitidis
MTVLQERYREVSDRIGKLVLQAGRKPHSVSLIAVGKTFPSDGIREVYAAGQRDFGENYIQEWYGKTEELADLTDIVWHVIGDVQSNKTKFVAERAHWVHTICRLKTAVRLSGQRPSSMPPLQVCIEVNIAGEAVKHGVAPEEAVALAVEVAKLPNIVVRGLMCVAKANSSETELKVQFQTMRKLLADLNTAGVKADVLSMGMSDDMPAAIECGATHVRIGSAIFGKRSRLECVQ

SEQ ID NO: 30842 - protein, 159 aa, Neisseria meningitidis; identical to SEQ ID NO: 929

SEQ ID NO: 30843 - protein, 514 aa, Neisseria meningitidis
MCGVLGLVSHEPVNQLLYDGLQMLQHRGQDAAGIATAEGGTFHMHKGKGMVREVFRTRNMRDLTGNAGIAHVRYPTAGNAGSSAEAQPFYVSSPFGIVLAHNGNLTNTAELYENVCNKHLRHVNTSSDSEVLLNVFAHELRREVSKNADPHRLNADNIFNAVAEVHRLVHGAYGVVAMIAGYGMLAFRDPYGIRPLVLGSQTDSEGRKSYAVASESVAFNALAYDLERDIRPGEAVFVGFDGTIIARQCSDKAKLSPCLFEYVYFARPDSVIDGVSVYQSRLDMGVSLAEKIKRELPVDGIDVVMPIPDTSRPSAMELAVHLKKPYREGLIKNRYIGRTFIMPGQATRKKSVRQKLSPMETEFAGKSVLLVDDSIVRGTTSREIVEMVRAAGARKVYIASAAPEVRYPNVYGIDMPTREELIANGRSAAEIAAEIGADGIVFQDLGDLEAVVKALNPKIESFDSSCFNGIYQTGDIDDAYLDRLSAEKSGCGGLKIHPSRMEHSISISDAGDEE

SEQ ID NO: 30844 - protein, 367 aa, Neisseria meningitidis
MLILQAERDSLLKPLQAVTGIVERRHTLPILSNVLIEGKGGQTKLLATDLEIQIDTAGPEGGAGDFRITTNAKKFQDILRALPAGALVSLDWDDSRLTLKAGKSRFALQTLPAADFPMMNVGEDISATFSLEQERFKTMLSQVQYSMAVQDIRYYLNGLLMQVEGSQLRLVATDGHRLAYAACAIDADLPRAEVILPRKTVLELFKLLNNPDDPIQIELLDKQVRFQCNGTTIVSKVIDGKFPDFNRVIPLDNDKIFVLSRAELLGALERVSILANEKFRGARLFLQPGLLSVVCSNNEQEEAREEIEIAYQGGELEVGFNIGYLMDVLRNIHSDDMQLAFGDANRSTLFTVPNNPNFKYIVMPMRI

SEQ ID NO: 30845 - protein, 1532 aa, Neisseria meningitidis
  misc_feature 1526, 1527: 'Xaa' is any amino acid
MNKGLHRTVFSKKHNTMVAVAETANSQGKGKQAGTSAPASPQISDGLYSKLKTTLKTLVCSLVSLSMVLPAHAQITTDKSAPKNQQVVILKTNTGAPLVNIQTPNGRGLSHNRYTQFDVDNKGAVLNNDRNNNPFLVKGSAQLILNEVRGTASKLNGIVTVGGQKADVIIANPNGITVNGGGFKNVGRGILTTGAPQIGKDGALTGFDVRQGTLTVGAAGWNDKGGADYTEILARAVALQGKLQGKNLAVSTGPQKVDYASGEISAGTAAGTKPTIALDTAALGGMYADSITLIANEKGVGVKNAGTLEAAKQLIVTSSGRIENSGRIATTADGTEASPTYLSIETTEKGAAGTFISNGGRIESKGLLVIETGEDISLRNGAVVQNNGSRPATTVLNAGHNLVIESKTNVNNAKGPATLSADGRTMINDATIQAGSSVYSSTKGDTELGGNTRIIAENVTVLSNGSISSAAVIEAQDTAHIESGKPLSLETSTVASNIRLNNGNIKGGKQVVLMADGDIQAKASNLNASGNLYIHAGKDLDLNADKDLSTQSISLRADNTALISSNGNTLTAEKNLDIQAGSLSVRQSNLQSSGGNVQMSATKGNISLNQSWINASQNIDTAALQGNIISDGLTAVAEVGRVSLLANGNVDFNGLNTLIAEGDINAGSVGKGRLKMDNTDIYASAGDVKLVAGGQLDLGNGTVNGGHISLDSNKGSMVVQDVHLNARASLKVDADQTLTINNSKLNSGHNTQINTNHGHMTLNQLDAHSRRHMSISAQGKGKGKDSGQILQNDQQNSKSTLAADGVLSLNSSALQVLDNTTLRGGAINIKAGGGIIKRSHIDWETQDTATMRSAELKPLSGMMSIESGGDNPLTVEPGNRIVSAGDLAVNHNGTFQISARAGNNGNPSAQTASVSAKGNIGIVAGEVDIDAANIAAGKDLALVATKGNISLNSIRNTFSNYQLKTDKHNITQQLTDVEQELSKLTSDPKYRKAQDLPQMLRRKYKRRDKVFGDSEARLRGLRAKINAADEAWAELQSPVKALLERKQLLQQALLTVSQPGSGHENQGSTLSGQNIKLLAAGGIRIQGSKVAATQQANIQAAGFLPAPAAEELQEGRLQSAIDISGVFDTFEYGQQGSDKYGYAIFSRPSEISGKTGVTLSAPNANENSRISLSAANIEAENGKIKIQSYGDQYYYARQSELYTFERRSYKTGKWYNRKHITEVKEHKNAKPDAVTLSASQGIDIKSGGSIDAYATAFDAPKGSINIEAGRKLTLYAVEELNYDKLDSQKRRRFLGISYSKAHDTTTQVMKTALPSRVVAESANLQSGWDTKLQGTQFETTLGGATIRAGVGEQARADAKIILEGIKTTIHNETVSSSKSALWQKQAGRGSNIETLQLPSFTGPVAPVLSAPGGYIVDIPKGNLKTQIEKLAKQPEYAYLKQLQTVKDVNWNQVQLAYDKWDYKQEGLTGAGAAIIALAVAAVTGGVGAGLIGAAQGTASAAVADAAFTALVSQASISLINNKGNMXXTHLIN

SEQ ID NO: 30846 - protein, 122 aa, Neisseria meningitidis; identical to SEQ ID NO: 12772

SEQ ID NO: 30847 - protein, 332 aa, Neisseria meningitidis; identical to SEQ ID NO: 18743

SEQ ID NO: 30848 - protein, 291 aa, Neisseria meningitidis
MLQGSLVALITPMNQDGSIHYEQLRDLIDWHIENGTDGIVAVGTTGESATLSVEEHTAVIEAVVKHVAKRVPVIAGTGANNTVEAIALSQAAEKAGADYTLSVVPYYNKPSQEGMYRHFKAVAEAAAIPMILYNVPGRTVVSMNNETILRLAEIPNIVGVKEASGNIGSNIELINRAPEGFVVLSGDDHTALPFMLCGGHGVITVAANAAPKLFADMCRAALQGDIALARELNDRLIPIYDTMFCEPSPAAPKWAVSALGKCEPHVRLPLVPLTENGQAKVRAALKASGQL

SEQ ID NO: 30849 - protein, 153 aa, Neisseria meningitidis; identical to SEQ ID NO: 2505

SEQ ID NO: 30850 - protein, 273 aa, Neisseria meningitidis; identical to SEQ ID NO: 6485

SEQ ID NO: 30851 - protein, 147 aa, Neisseria meningitidis; identical to SEQ ID NO: 2189

SEQ ID NO: 30852 - protein, 321 aa, Neisseria meningitidis
MSYTQLTQGERYHIQYLSRHCTVTEIAKQLNRHKSTISREIRRHRTQGQQYSAEKAQRQSQTIKQRKRQPYKLDSQLIQHIDTLIRRKLSPEQVCAYLCKHHQFTLHHSTIYRYLRQDKSNGSTLWQHLRICSKPYRKRYGSTWTRGKVPNRVGIENRPAIVDQKSRIGDWEADTIVGKGQKSALLTLVERVTRYTIICKLDSLKAEDTARAAVRALKAHKDRVHTITMDNGKEFYQHTKITKALKAETYFCRPYHSWEKGLNENTNGLIRQYFPKQTDFRNISDREIRRVQDELNHRPRKTLGYETPSVLFLNLFQPLIH

SEQ ID NO: 30853 - protein, 154 aa, Neisseria meningitidis; identical to SEQ ID NO: 9513

SEQ ID NO: 30854 - protein, 244 aa, Neisseria meningitidis; identical to SEQ ID NO: 1832

SEQ ID NO: 30855 - protein, 286 aa, Neisseria meningitidis
LPVFPISLKIHAVKPTVRPYMSPSPFIEMKDVAFAYGDRPILKNINFSIPQGNFAAVMGGSGSGKTTLMRLITGQIRPQSGKVLIEGRDLAGFSADELYEHRRRMGVLFQHGALFTDLSVFDNIAFPMRELTRLPEAVIRDLVLLKLNAVGLRGVENLMPSELSGGMSRRVALARTIALDPEIMLYDEPFTGLDPISLGVIAHLISRVNKALRSTSIMVTHDIEKSLEIVDQVIFLAHGEIMFSGSPQEMRELDSPWVRQFVGGLADGPVAYRYPAQTSLQQDLLG

SEQ ID NO: 30856 - protein, 160 aa, Neisseria meningitidis; identical to SEQ ID NO: 4185

SEQ ID NO: 30857 - protein, 45 aa, Neisseria meningitidis; identical to SEQ ID NO: 7098

SEQ ID NO: 30858 - protein, 402 aa, Neisseria meningitidis
MTGIIHSLLDTDLYKFTMLQVVLHQFPQTHSLYEFRCRNASTVYPLADIKEDLEVELDALCQLRFTHDELDYLRSLRFIKSDFVDYLELFQLQRRFVEVGTDDKGRLNIRIEGPMIQAMFFEIFILAIVNELYFRRLETPAVIEEGERRLQAKAARLKEIAAAQNPDEPPFLISDFGTRRRYKLAWQEHVIRTLLEAAPSIVRGTSNVFLAKKLGITPIGTMAHEFLQAFQALDVRLRNFQKAALESWVHEYRGDLGVALTDVVGMDAFLRDFDLYFAKLFDGLRHDSGDPYVWGDKAYAHYQKLKIDSRTKMLTFSDGLDIERSWALHQYFKDRFKTGFGIGTNLTNDMGHTPLNIVLKLVECNGQSVAKLSDSPGKTMTNNSTFLAYLRQVFDVPEPETP

SEQ ID NO: 30859 - protein, 371 aa, Neisseria meningitidis
  misc_feature 366, 367: 'Xaa' is any amino acid
MAAKDVQFGNEVRQKMVNGVNILANAVRVTLGPKGRNVVVDRAFGGPHITKDGVTVAKEIELKDKFENMGAQMVKEVASKTNDVAGDGTTTATVLAQSIVAEGMKYVTAGMNPTDLKRGIDKAVAALVEELKNIAKPCDTSKEIAQVGSISANSDEQVGAIIAEAMEKVGKEGVITVEDGKSLENELDVVEGMQFDRGYLSPYFINDAEKQIAALDNPFVLLFDKKISNIRDLLPVLEQVAKASRPLLIIAEDVEGEALATLVVNNIRGILKTVAVKAPGFGDRRKAMLQDIAILTGGTVIAEEVGLSLEKATLDDLGQAKRIEIGKENTTIIDGFGDAAQIEARVAEIRQQIETATSDYDKEKLXXHTLN

SEQ ID NO: 30860 - protein, 260 aa, Neisseria meningitidis
  misc_feature 256, 257, 258: 'Xaa' is any amino acid
MENIGRQRPIGVFDSGIGGLTNVRALMERLPMENIIYFGDTARVPYGTKSKATIENFSMQIVDFLLEHDVKAMVIACNTIAAVAGQKIRQKTGNMPVLDVISAGAKAALATTRNNKIGIIATNTTVNSNAYARAIHRNNPDTLVRTQAAPLLVPLVEEGWLEHEVTRLTVCEYLKPLLADGIDTLVLGCTHFPLLKPLIGREAGNVALVDSAITTAEETARVLAQEGLLNTDNNNPDYRFYVSDIPLKFRTIGERXXXHT

SEQ ID NO: 30861 - protein, 199 aa, Neisseria meningitidis
  misc_feature 195, 196, 197: 'Xaa' is any amino acid
MSYTQLTQGERYHIQYLSRHCTVTEIAKQLNRHKSTISREIRRHRTQGQQYSAEKAQRQSQTIKQRKRQPYKLDSQLIQHIDTLIRRKLSPEQVCAYLCKHHQITLHHSTIYRYLRQDKSNGSTLWQHLRICSKPYRKRYGSTWTRGKVPNRVGIENRPAIVDQKSRIGDWEADTIVGKGQKSALLTLVERVTRXXXHT

SEQ ID NO: 30862 - protein, 210 aa, Neisseria meningitidis; identical to SEQ ID NO: 3436

SEQ ID NO: 30863 - protein, 427 aa, Neisseria meningitidis; identical to SEQ ID NO: 8285

SEQ ID NO: 30864 - protein, 410 aa, Neisseria meningitidis; identical to SEQ ID NO: 446

SEQ ID NO: 30865 - protein, 611 aa, Neisseria meningitidis
VNTTPIHSKLAEITGRIIERSRPTREKYLAKIRSAKQMGRLERNQLGCSNLAHGYASMPKSIKIEMLQDTVPNLGIITAYNDMVSAHQPFKDFPDQIKDEAQKNGATAQVAGGTPAMCDGITQGYAGMELSLFSRDVIAMSTAVGLSHQMFDGSLFMGVCDKIVPGLMIGALSFGHIPGIFVPAGPMSSGIGNKEKARTRQLFAEGKVGRNELLKSEMGSYHSPGTCTFYGTANSNQMMMEMMGVHLPAAAFVHPYTDLREALTRYAAGHLARGIKNGTIKPLGEMLTEKSFINALIGLMATGGSTNHTMHLVAMARAAGVILNWDDFDEISSIIPLLIRVYPNGKADVNHFTAAGGLPFVIRELLDAGLLHDDVDTVVGHGMRHYTKEPFLIDGKLEWREAPETSGNDDILRKAGNPFSPDGGLRLMKGNIGRGVIKVSAVREGCRIIEAPAIVFNDQREVLSAFERGELERDFVCVVRYQGPRANGMPELHKLTPPLGILQDRGFKVALLTDGRMSGASGKVPASIHMTPEALMGGNIAKIRTGDLIRFDSVTGELNVLIDEAEWNAREVEHIDLGANQQGCGRELFAGFRSLTGGAETGAMSFGGEFA

SEQ ID NO: 30866 - protein, 144 aa, Neisseria meningitidis; identical to SEQ ID NO: 17472

SEQ ID NO: 30867 - protein, 469 aa, Neisseria meningitidis
MDTQIKTEAGQQNNRRYLTVWRWHFYAGLLVMPFLTLLAVTGLGMLLFANITGKEGERIHVVPQATVQPLSVQAEAARSAVNPETSSVVQYIAPRADDMVAVFRVNNEGKATMVAVDPYTAKVVSTMPRNQGWYYAMDEIHSDMMLGSTGDYLLETTASLTIIMIISGLYLWWVKRRGIKAMLLPPKGRARSWWRNLHGAFGTWVSLILLLFCLSGIAWAGIWGGKFVQAWSQFPAGKWGVEPNPVSVVPTHGEVLNDGKVKEVPWILELTPMPVSGTTVGKDGINPDEPMTLETVDRFAREIGFKGRYQLNLPKGEDGVWTLSQDSMSYDMISPFADRTVHIDQYSGKILADIRFDDYNPFGKFMAASIALHMGTLGWWSVLANVVFCLAVIFIGISGCVMWWKRRPSGAVGMVPPAQKIKLPVWWAMAVPLLLIALLFPTALLAIAVIWLLDTLLLSRIPVLRRWFK

SEQ ID NO: 30868 - protein, 1144 aa, Neisseria meningitidis
MTEPTYIPLRLHTEFSITDGMVRIKKLIAKAQEYGLPALGISDLMNEFGLVKFYKACRGAGIKPIGAADVWIGNPNAPDKPFRAMLIIRNDAGYLRLSELLTEAYVGKDRNIHHAELNPEWLENGDNSGLICLSGAHYGEVGMNLLNGNEDAARAAALKYAAWFPDAFYLELQRLPERPEWEACVSGSVKLAEELGLPVVATHPTQFMNRDDFNAHEARVCIAGGWVLTDKKRPRDFTPDQFFIPPETMLERFADLPEALENTVEIAKRCNLHITLGKNFLPLFPTPDGLSRDDYLIKLSNKGLQERMVQLYPDEAERAAKMPEYQERLDFELNIIIQMKFPGYFLIVQDFINWAKTHGCPVGPGRGSGAGSLVAYSLKITDLDPLKYALLFERFLNPERVSMPDFDVDFCQANRGRVIEYVRDKYGAQAVSQIVTFGTMSSKAVIRDVGRVLELPFMLCDKLSKLIPLEANKPLSLDDAMKAEPQIQELIEAEEADELITLAKKLEDLTRGLGMHAGGVLIAPGKISDYSPVYQADESASPVSMYDKGDVEDVGLVKFDFLGLRNLTIIEMAQNNIKNTTGDIIDVGKIPLDDQAAYQIFRDANTTAVFQFESTGMKKMLKTAHTTKFEELIAFVSLYRPGPMDNIPDFVARMKGQEFQYIHPLLEGILAPTYGIMVYQEQVMQAAQIIGGYSLGGADLLRRAMGKKKPEEMVKHREIFAEGAAKQGISREKSDEIFNYMEKFAGYGFNKSHAAAYALISYQTAWLKAHYPAEFMAATMSSELDNTDQLKHFYDDCRANGIEFLPPDINESDYRFTPYPDMKIRYALGAIKGTGEAAVESIIAARQSGGKFTGLLDFCERVGKEHMNRRTLEALIRGGAFDSIEPNRAMLLANIDLAMNNADQKAANANQGGLFDMMEDAIEPVRLVDAPMWSESEKLAEEKTVIGFYLSGHPFGPYAQEVRQIAPTKLDRLKPQDSVRLAGFVTAVRTMMGKRGKIAFVSLEDLSGQVEIMVGGQTLENCADCLKADQVLIIESKVSRDDYGGGDGLRILANQVMALQTARERYARSLSLALAPHHDIGGLVQLLAAHQLPDTPRIPLQLSYANEKASGRLQVPPKWTVTPSSALFGELETLLGSRSVRVNW

SEQ ID NO: 30869 - protein, 44 aa, Neisseria meningitidis; identical to SEQ ID NO: 6328

SEQ ID NO: 30870 - protein, 55 aa, Neisseria meningitidis; identical to SEQ ID NO: 2625

SEQ ID NO: 30871 - protein, 330 aa, Neisseria meningitidis
MIARHIDRFPLLKLDQVIDWQPIEQYLNRQKTRYLRDHRSRPAYPLLSMFKAVLLGQWHSLSDPELEHSLITRIDFNLFCRFDELSIPDYSTLCRYRNRLAQDDTLSELLELINRQLTEKGLKVEKASAAVVDATIIQTAGSKQRQAIEVDEEGQVGGQTTPSKDKDARWTKKNGLYKLGYKQHTRTDAEGYIEKLHITPANAHECNHLLPLLEGIAEGTTVYADKGYDSAENRQHLEERQLLDGIMRKAHRNRPLTEVQTKRNRYLSKTRYVVEQSFGTLHRKFRYARAAYFGLIKVSAQSHLKAMCLNLLKAANRLSAPAALKGSPDA

SEQ ID NO: 30872 - protein, 612 aa, Neisseria meningitidis
MCGIVGAIRAHHNVVDFLTDGLKRLEYRGYDSSGIAVNTDGKIKRVRRVGRVQLMEDAAREKGISGGIGIGHTRWATHGGVTEPNAHPHISGGMIAVVHNGIIENFESERKRLEGLGYRFESQTDTEVIAHSINHEYAQNGGRLFEAVQEAVKRFHGAYAIAVIAQDKPDELVVARMGCPLLVALGDDETFIASDVSAVIAFTRRVAYLEDGDIALLASDGIKRLTDKNGLPAERKVKVSELSLASLELGPYSHFMQKEIHEQPRTIADTAEVFLDGGFIPENFGKNAKSVFESIRSVKILACGTSYYAALTAKYWLESIAKIPADVEIASEYRYRSVIADPDQLVITISQSGETLDTMEALKYAKSLGHRHSLSICNVMESALPRESSLVLYTRAGAEIGVASTKAFTTQLVALFGLAVTLAKVRGLVSEEDEARYTEELRQLPGSVQHALNLEPQIAAWAQQFAKKTSALFLGRGIHYPIALEGALKLKEITYIHAEAYPAGELKHGPLALVDENMPVVVIAPNDSLLDKVKANMQEVGARGGELFVFADLDSNFNATEGVHVIRAPRHVGKLSPVVHTIPVQLLSYHVALARGTDVDKPRNLAKSVTVE

SEQ ID NO: 30873 - protein, 166 aa, Neisseria meningitidis; identical to SEQ ID NO: 987

SEQ ID NO: 30874 - protein, 135 aa, Neisseria meningitidis; identical to SEQ ID NO: 3544

SEQ ID NO: 30875 - protein, 463 aa, Neisseria meningitidis
MSGQLGKGADSPDLVYGLEDRPPFGNALLSAVTHLLAIFVPMITPALIVGGALELPVEMTAYLVSMAMVASGVGTYLQVNRFGPVGSGMLSIQSVNFSFVTVMIALGAGMKEGGLTKDAMISTLLGVSFVGAFLVCFSAWLLPYLKKVITPTVSGVVVMLIGLSLVHVGITDFGGGFGAKADGTFGSMENLGLASLVLLIVLIFNCMKNPLLRMSGIAVGLIAGYIVALFLGKVDFSALQNLPLVTLPVPFKYGFAFDWHAFIVAGAIFLLSVFEAVGDLTATAMVSDQPIEGEEYTKRLRGGVLADGLVSVIATALGSLPLTTFAQNNGVIQMTGVASRHVGKYIAVILVLLGLFPVVGRAFTTIPSPVLGGAMVLMFGLIAIAGVRILVSHGIRRREAVIAATSVGLGLGVAFEPEVFKNLPVLFQNSISAGGITAVLLSLVLPEDKTEAAVKFDTDHLEH

SEQ ID NO: 30876 - protein, 215 aa, Neisseria meningitidis
MPELPEVETTLRGIAPHIEGKTVEAVVLRQLKLRWQINPDLGEILSGRQVLSCGRRAKYLLIRFQTGVLLIHLGMSGSLRIFTPSDGRIGRPDRHDHVDIVFSDGTVMRYRDPRKFGAILWYEGIEEHHPLLEKLGPEPLSEAFCTDYLYVRLKAQKRALKLALMDNAVVVGVGNIYANESLFRAGISPHRPANRLKKKECALWLNRQSGVAARH

SEQ ID NO: 30877 - protein, 238 aa, Neisseria meningitidis; identical to SEQ ID NO: 3469

SEQ ID NO: 30878 - protein, 101 aa, Neisseria meningitidis
MITLTHYLVLGALLFGISAMGIFMNRKNVLVLLMSIELMLLAVNFNFIAFSQHLGDTAGQIFVFFVLTVAAAESAIGLAIMVLVYRNRQTINVADLNKLKG

SEQ ID NO: 30879 - protein, 267 aa, Neisseria meningitidis; identical to SEQ ID NO: 1506

SEQ ID NO: 30880 - protein, 119 aa, Neisseria meningitidis; identical to SEQ ID NO: 2176

SEQ ID NO: 30881 - protein, 277 aa, Neisseria meningitidis
  misc_feature 2, 3, 4: 'Xaa' is any amino acid
VXXXQQYSAEKAQRQSQTIKQRKRQPYKLDSQLIQHIDTLIRRKLSPEQVCAYLCKHHQITLHHSTIYRYLRQDKSNGSTLWQHLRICSKPYRKRYGSTWTRGKVPNRVGIENRPAIVDQKSRIGDWEADTIVGKGQKSALLTLVERVTRYTIICKLDSLKAEDTAWAAVRALKAHKDRVHTITMDNGKEFYQHTKITKALKAETYFCRPYHSWEKGLNENTNGLIRQYFPKQTDFRNISDREIRRVQDELNHRPRKTLGYETPSVLFLNLFQPLIH

SEQ ID NO: 30882 - protein, 79 aa, Neisseria meningitidis
  misc_feature 75, 76, 77: 'Xaa' is any amino acid
MKKQITAAVMMLSMIAPAMANGLDNQTFENQVFHTQADAPMQLAELSQRDERTDGLRTLVHRNLHAADSCAALGXXXHT

SEQ ID NO: 30883 - protein, 332 aa, Neisseria meningitidis; identical to SEQ ID NO: 155

SEQ ID NO: 30884 - protein, 119 aa, Neisseria meningitidis
  misc_feature 2, 3, 4: 'Xaa' is any amino acid
VXXXEYHRYLERIEDHLDTDWLPENGESNPFLHMSLHLSVQEQAGIDQPHGIRAIHDTLCAKRGWLEAEHEMMEALAETLWTAQRYGTGLDVNFYMTRLRKLIGLGAEDQARLNPHEIA

SEQ ID NO: 30885 - protein, 219 aa, Neisseria meningitidis
MDTWHDALGGEKQQPYFQEILNAVRQERLSGQIIYPPEADVFNAFRLTAFDRVKAVILGQDPYHGAGQAHGLAFSVRQGVRIPPSLLNIYKELETDIEGFSIPAHGCLTAWAEQGVLLLNTVLTVRAGQAHSHALLGWERFTDTVIRQLATHRKHLVFMLWGGYAQQKGRLIDSQNHLILTAPHPSPLSAYRGFFGCRHFSQANSYLSRHGIDPINWKL

SEQ ID NO: 30886 - protein, 277 aa, Neisseria meningitidis
MPHALVLQFPSAEALPSDFPSRLPEPDYADEKRMRFIVEEGFSLSGADAALLGSRQIDHAVLSDMDFGELGLIVSDMDSTLITIECVDEIAAGVGLKDKVAEITERSMRGELDFEQSLRSRVALLAGLDEQILADVYENVLKLSPGAEFLLDECKRHDVKFLLVSGGFTFFTERLQQRLGFEYQHANVLEIENGRLTGRLKGRIIDAQAKADLLREYRSRLGLQPHQVLAMGDGANDIPMLKEAGIGVAYRAKPKARAAADACINFGGLERVRGLFG

SEQ ID NO: 30887 - protein, 88 aa, Neisseria meningitidis; identical to SEQ ID NO: 1100

SEQ ID NO: 30888 - protein, 197 aa, Neisseria meningitidis
LWQHLRICSKPYRKRYGSTWTRGKVPNRVGIENRPAIVDQKSRIGDWEADTIVGKGQKSALLTLVERVTRYTIICKLDSLKAEDTARAAVRALKAHKDRVHTITMDNGKEFYQHTKITKALKAETYFCRPYHSWEKGLNENTNGLIRQYFPKQTDFRNISDREIRRVQDELNHRPRKTLGYETPSVLFLNLFQPLIH

SEQ ID NO: 30889 - protein, 327 aa, Neisseria meningitidis; identical to SEQ ID NO: 6287

SEQ ID NO: 30890 - protein, 371 aa, Neisseria meningitidis
MLKFTLHKKDGYARRGTLELNHGKIETPVFMPVGTYGSVKAMNPQNLHDIKAQIILGNTYHLWLRPGLEVVEQFGGLHGFIGWDKPILTDSGGFQVFSLSDMRKLTEEGCTFKSPINGDKLFLSPEISMKIQTVLNSDIAMQLDECTPGEATREQAKKSLQMSLRWAERSKKAFEDLKNPNALFGIVQGAMYEDLREESLRGLEQFDFPGLAVGGLSVGEPKPEMYRMLRAVGPILPEHKPHYLMGVGTPEDLVYGVAHGIDMFDCVMPTRNARNGWLFTRFGDLKIKNAKHKLDKRPIDESCTCYACQNFSRAYLHHLHRAGEILGAQLNTIHNLHFYQVIMAEMRDAIEQGKFADWQARFHENRARGTD

SEQ ID NO: 30891 - protein, 65 aa, Neisseria meningitidis; identical to SEQ ID NO: 127

SEQ ID NO: 30892 - protein, 253 aa, Neisseria meningitidis; identical to SEQ ID NO: 8360

SEQ ID NO: 30893 - protein, 542 aa, Neisseria meningitidis
MISTNGITMQFGAKPLFENVSVKFGEGNRYGLIGANGSGKSTFMKILGGDLEQTAGEVAIENGVRLGKLRQDQFAYEEMRVLDVVMMGHTEMWAAMTERDAIYANLEATEDDYMKAAELEAKFAEYDGYTAEARAAELLSGVGISEDLHNATMAEVAPGFKLRVLLAQALFSKPDVLLLDEPTNNLDINTIRWLEGVLNQYDSTMIIISHDRHFLNEVCTHMADLDYNTITIYPGNYDDYMLASAQSRERALKDNAKAKEKLQELQEFVARFSANKSKARQATSRLKQADKIKSEMVEVKPSTRQNPYIRFEADEKAKLHRQAVEVEKLAKRFETQLFKNLNFILEAGQRLAIIGPNGAGKSTLLKLLAGAYNPEYSDGLLPDEGTIKWAEKASVGYYPQDHENDFDVDMDLSEWMRQWGQEGDDEQVIRGTLGRLLFGSNDVVKKVKVLSGGEKGRMLYGKLLLLKPNVLVMDEPTNHMDMESIESLNMALEKYNGTLIFVSHDRQFVSSLATQIIELDGKGGYEHYLGDYESYLEKKGVA

SEQ ID NO: 30894 - protein, 118 aa, Neisseria meningitidis
  misc_feature 3, 4: 'Xaa' is any amino acid
VCXXDCPFCKRLEHEFEKMTDVTVYSFMMPIAGLHPDAARKAQILWCQPDRAKAWTDWMRKGKFPVGGSICDNPVAETTSLGEQFGFNGTPTLVFPNGRSQSGYSPMPQLEEIIRKNQ

SEQ ID NO: 30895 - protein, 47 aa, Neisseria meningitidis
  misc_feature 41, 42: 'Xaa' is any amino acid
MSTFFQQTAQAMIAKHIDRFPLLKLDQVIDWQPIEQYLNRXXTHLIN

SEQ ID NO: 30896 - protein, 456 aa, Neisseria meningitidis; identical to SEQ ID NO: 8567

SEQ ID NO: 30897 - protein, 678 aa, Neisseria meningitidis
MTDNALLHLGEEPRFDQIKTEDIKPALQTAIAEAREQIAAIKAQTHTGWANTVEPLTGITERVGRIWGVVSHLNSVTDTPELRAAYNELMPEITVFFTEIGQDIALYNRFKTIKNSPEFDTLSPAQKTKLDHDLRDFVLSGAELPSEQQAELAKLQTEGAQLSAKFSQNVLDATDAFGIYFDDAAPLAGIPEDALAMFAAAAQSEGKTGYKIGLQIPHYLAVIQYADNRELREQIYRAYVTRASELSDGGKFDNTANIDRTLANALQTAKLLGFKNYAELSLATKMADTPEQVLNFLHDLARRAKPYAEKDLAEVKAFARESLNLADLQPWDLGYASEKLREAKYAFSETEVKKYFPVGKVLNGLFAQIKKLYGIGFTEKTVPVWHKDVRYFELQQNGETIGGVYMDLYAREGKRGGAWMNDYKGRRRFSDGTLQLPTAYLVCNFAPPVGGREARLSHDEILTLFHETGHGLHHLLTQVDELGVSGINGVEWDAVELPSQFMENFVWEYNVLAQMSTHEETGEPLPKELFDKMLAAKNFQRGMFLVRQMEFALFDMMIYSEDDEGRLKNWQQVLDSVRKEVAVIQPPEYNRFALSFGHIFAGGYSAGYYSYAWAEVLSADAYAAFEESDDVAATGKRFWQEILAVGGSRSAAESFKAFRGREPSIDALLRHSGFDNAA

SEQ ID NO: 30898 - protein, 558 aa, Neisseria meningitidis
MSQQYVYSMLRVSKVVPPQKTIIKDISLSFFPGAKIGLLGLNGAGKSTVLRIMAGVDKEFEGEAVPMGGIKIGYLPQEPELDPEKTVREEVESGLGEVAAAQKRLEEVYAEYANPDADFDALAEEQGRLEAIIAAGSSTGGGAEHELEIAADALRLPEWDAKIDNLSGGEKRRVALCKLLLSKPDMLLLDEPTNHLDAESVEWLEQFLVRFPGTVVAVTHDRYFLDNAAEWILELDRGHGIPWKGNYSSWLEQKEKRLENEAKSEAARVKAMKQELEWVRQNAKGRQAKSKARLARFEEMSNYEYQKRNETQEIFIPVAERLGNEVIEFVNVSKSFGDKVLIDDLSFKVPAGAIVGIIGPNGAGKSTLFKMIAGKEQPDSGEVKIGQTVKMSLIDQSREGLQNDKTVFDNIAEGRDILQVGQFEIPARQYLGRFNFKGSDQSKITGQLSGGERGRLHLAKTLLGGGNVLLLDEPSNDLDVETLRALEDALLEFAGSVMVISHDRWFLDRIATHILACEGDSKWVFFGGNYQEYEADKKRRLGEEGAKPKRIKYKPVTR

SEQ ID NO: 30899 - protein, 256 aa, Neisseria meningitidis
VSETQNEQPVQPLVEHLIELRRRLMWMVIGILVCFFGMMPFAQQLYTFIANPLMANLPKDTSMIATDVIAPFFVPVKVTLMAAFLISLPHTLYQIWAFVAPALYQNEKRLITPLVLSSVSLFFIGMAFAYFLVFPVIFKFLAGVTPVGVNMATDIDKYLSFILGMFVAFGTTFEVPIVVILLTKIGVVTTGQLKRARPYVIVGAFVIAAIITPPDVISQTLLAIPLILLYEAGIWFGRFFTPRSEQDGDIQPPATT

SEQ ID NO: 30900 - protein, 94 aa, Neisseria meningitidis
LLADGIDTLVLGCTHFPLLKPLIGREAGNVALVDSAITTAEETARVLAQEGLLNTDNNNPDYRFYVSDIPLKFRTIGERFLGRTMEQIEMVSLG

SEQ ID NO: 30901 - protein, 196 aa, Neisseria meningitidis
MGLELPLILGTSSVFRREQMEMLGIAFQAASPDFDETPMLGESAPQTALRLAEGKARSLAGRFPEALIVGADQVAWCDGRQWGKPMNLANAHKMLMHLSGREIEFYSAVVLLNTVTGRMQRHIDKTVVVMRKLDELHILRYLEREPDAVYCSCALKSEALGALLIERIESTDPNALIGLPVFRLVDFLKNEGVEVL

SEQ ID NO: 30902 - protein, 221 aa, Neisseria meningitidis; identical to SEQ ID NO: 4230

SEQ ID NO: 30903 - protein, 504 aa, Neisseria meningitidis; identical to SEQ ID NO: 646

SEQ ID NO: 30904 - protein, 130 aa, Neisseria meningitidis
MYSFEANANAVKISETVSVDTGQGAKIHKFVPKNSKTYSSDLIKTVDLTHIPTGAKARINAKITASISRAGVLAGGGKLARLGAKFSTRAVPYVGTALLAHDVYETFKEDIQARGYQYDPETDKFAKVSG

SEQ ID NO: 30905 - protein, 358 aa, Neisseria meningitidis
MKPSILEKLQQLGDRLEEVTHLLGQPEATADMDNYRKLTREHAELSPVVEVFQHYRRAQSDLADAEEMLSDPEMKDFAAEEIEAAKAKINTLDTELQKLLLPKDADDDKNIFIEIRAGTGGDEAALFAGDLLRMYSRYAERNRWQVEIVSANESELGGYKEVIARIVGLGAYSRLKFESGGHRVQRVPATESQGRIHTSACTVAVMPEADELEDIELNPADLRIDTFRASGAGGQHINKTDSAVRITHLPTGMVVECQDGRSQHANKAQAMKVLAARLNDAQKREAQAKEAAERKSLIGSGDRSERIRTYNYPQGRVTDHRINLTLHKLDFVMDGDLEEITNALIAEHQAELLAAMGD

SEQ ID NO: 30906 - protein, 60 aa, Neisseria meningitidis; identical to SEQ ID NO: 2288

SEQ ID NO: 30907 - protein, 201 aa, Neisseria meningitidis; identical to SEQ ID NO: 9165

SEQ ID NO: 30908 - protein, 275 aa, Neisseria meningitidis
MKPDIYALLERALLSGDPDEKGRLTDEAFAAVQNMDGAETNTPPLDFPRAGRPDKPVLVAPSQLTPRKMNTTEGYAAMLHAIAHIEFNAVNLALDAAYRFRTLPFQFVRDWVKVAKEEVYHFRLMRERLRAFGFDYGDFEAHNHLWDMAYKTAYDPLLRMALVPRVLEARGLDVTPGIRAKVAQRGDSETCGVLDIIYRDEVGHVAIGNHWYQHLCRERGLEPVALFRSLITRYDMFIFRGYVNIEAREKAGFSRFELDMLEDFEQGLKQNKNTV

SEQ ID NO: 30909 - protein, 443 aa, Neisseria meningitidis
MDSGILKLRVSAGEIGDIRYEEKRDGKSAEGSISTFNNKFPLYRNKILNLRDVEQGLENLRRLSSVKTDIQIIPSEEEGKSDLQIKWQQNKPIRFSIGIDDAGGKTTGKYQGNVALSFDNPLGLSDLFYVSYGRGLVHKTDLTDATGTETESGSRSYSVHYSVPVKKWLFSFNHNGHRYHEATEGYSVNYDYNGKQYQSSLAAERMLWRNRLHKTSVGMKLWTRQTYKYIDDAEIEVQRRRSAGWEAELRHRAYLNRWQLDGKLSYKRGTGMRQSMPAPEENGGDILPGTSRMKIITAGLDAAAPFILGKQQFSYATAIQAQWNKTPLVAQDKLSIGSRYTVRGFDGEQSLSGERGFYWQNTLGWHFHPRHQFYLGADYGRVSGESAQYASGKRLAGAVAGFRGSHKVGGIFAYDLFAGKPLHKPEGFQTANTVYGFNLNYSF

SEQ ID NO: 30910 - protein, 75 aa, Neisseria meningitidis; identical to SEQ ID NO: 821

SEQ ID NO: 30911 - protein, 154 aa, Neisseria meningitidis; identical to SEQ ID NO: 2266

SEQ ID NO: 30912 - protein, 257 aa, Neisseria meningitidis
MSANILAIANQKGGVGKTTTTVNLAASLASRGKRVLVVDLDPQGNATTGSGIDKASLQSGVYQVLLGDADVKSAAVRSKEGGYAVLGANRALAGAEIELVQEIAREVRLKNALKAVAEDYDFILIDCPPSLTLLTLNGLVAAGGVIVPMLCEYYALEGISDLIATVRKIRQAVNPDLDITGIVRTMYDSRSRLVAEVSEQLRSHFGDLLFETVIPRNIRLAEAPSHGMPVMAYDAQAKGTKAYLALADELMARVSGK

SEQ ID NO: 30913 - protein, 218 aa, Neisseria meningitidis; identical to SEQ ID NO: 10429

SEQ ID NO: 30914 - protein, 685 aa, Neisseria meningitidis
MTRKILVTSALPYANGSIHLGHMVEHIQTDVWVRFQKLRGHECYYCCADDTHGTPVMLAAQKQGIAPEDMIAKVREEHLADFTGFNIGYDNYYSTHSPENKQFSQDIYRALKTGGKIESRVIEQLFDPEKQMFLPDRFVKGECPKCHAQDQYGDNCEVCGTTYSPTELINPYSAVSGVKPELRESEHFFFKLGECADFLKAWTSGNNPHDGKPHLQPEALNKMKEWLGEGEETTLSDWDISRDAPYFGFEIPDAPGKYFYVWLDAPVGYMASFKNLCDRIGVDFDEYFKADSQTEMYHFIGKDILYFHALFWPAMLHFSGHRAPTGVYAHGFLTVDGQKMSKSRGTFITAKSYLEQGLNPEWMRYYIAAKLNSKIEDIDLNLQDFISRVNSDLVGKYVNIAARASGFIAKRFEGRLKDVADSALLAKLAAESDTIAEQYESREYAKALRDIMALADIVNEYVDANKPWELAKQEGQDARLHEVCSELINAFTMLTAYLAPVLPKVAENAAKFLNLEAITWANTRETLGKHAINKYEHLMQRVEQKQVDDLIEANKQSIAAAAVPAAEESKYEKVAEQASFDDFMKIDMRVAKVLNCEAVEGSTKLLKFDLDFGFEKRIIFSGIAASYPNPAELNGRMVIAVANFAPRKMAKFGVSEGMILSAATADGKLKLLDVDAGAQPGDKVG

SEQ ID NO: 30915 - protein, 335 aa, Neisseria meningitidis
MSTFFQQTAQAMIAKHIDRFPLLKLDQVIDWQPIEQYLNRQRTRYLRDHRGRPAYPLLSMFKAVLLGQWHSLSDPELEHSLITRTDFNLFCRFDELSIPDYSTLCRYRNWLAQDNTLSELLELINRQLTEKGLKIEKASAAVVDATIIQTAGSKQRQAIEVDEEGQVSGQTTPSKDSDARWIKKNGLYKLGYKQHTRTDAEGYIEKLHITPANAHECKHLPPLLEGVPRGTTVYADKGYDSAENRQHLEEHQLQDGIMRKACRNRPLSETQTKRNRYLSKTRYVVEQSFGTLHRKFRYARAAYFGLIKVSAQSHLKAMCLNLLKAANRLSAPAAA

SEQ ID NO: 30916 - protein, 675 aa, Neisseria meningitidis
LSLSEFIERRTSFNPMVILTTLFFVCVLVVLVLTVPDQVQMWLDRAKEVIFTEFSWFYVLTFSIFLGFLLILSVSSLGNIRLGRDEDVPEFGFLSWLAMLFAAGMGVGLMFFGVAEPLMHYFSDITAGTPEHRQQQALLHTVFHWGVHAWSVYGTIALALAYFGFRYKLPLALRSCFYPLLKEKISGRFGDAIDIMALLATFFGIITTLGFGASQLGAGLQEIGWIAENSFSVQVLIIAAVMSLAVVSAISGVGKGVKVLSELNLGLAFLLLFFVLAAGPTVYLLSAFGDNIGNYLGNLVRLSFKTYAYEREHKPWFESWTVLYWAWWCSWAPFVGLFIARISKGRTIREFVFGVLLIPGLFGVLWFTVFGNTAIWLNDGVAGGMLEKMTSSPETLLFKFFNYLPLPELTSIVSLLVISLFFVTSADSGIYVLNNITSRDKGLSAPRWQAVMWGVLMSAVAVLLMRSGGLGNLQSMTLIVSLPFALLMLIMCFSLWKGLSADKKYFETRVNPTSVFWTGGKWKERLVQIMSQTQEQDILKFLKHTASPAMHELQRELSEEYGLSVRVDKMFHQDEPAIEFVIRKETMRDFMYGIKSVGQDVSDQLINDGKLPHIRHQTTYKPYAYFFDGRVGYDVQYMNKDELIADILKNYERYLMLLDDVGQELMAHEQVELAE

SEQ ID NO: 30917 - protein, 42 aa, Neisseria meningitidis; identical to SEQ ID NO: 9053

SEQ ID NO: 30918 - protein, 259 aa, Neisseria meningitidis; identical to SEQ ID NO: 5157

SEQ ID NO: 30919 - protein, 255 aa, Neisseria meningitidis; identical to SEQ ID NO: 7056

SEQ ID NO: 30920 - protein, 320 aa, Neisseria meningitidis; identical to SEQ ID NO: 1339

SEQ ID NO: 30921 - protein, 92 aa, Neisseria meningitidis; identical to SEQ ID NO: 419

SEQ ID NO: 30922 - protein, 445 aa, Neisseria meningitidis
MTFQNKKILVAGLGGTGISMIAYLRKNGAEVAAYDAELKPERVSQIGKMFDGLVFYTGRLKDALDNGFDILALSPGISERQPDIEAFKQNGGRVLGDIELLADIVNRRGDKVIAITGSNGKTTVTSLVGYLCIKCGLDTVIAGNIGTPVLEAEWQREGKKADVWVLELSSFQLENTESLRPTAATVLNISEDHLDRYDDLLDYAHTKAKIFRGDGVQVLNSDDVFCRAMKRAGREVKWFSLEHEADFWLERETGRLKQGNEDLIATQDIPLQGLHNATNVMAAVALCEAVGLPREALLEHVKTFQGLPHRVEKIGEKNGVVFIDDSKGTNVGATAAAIAGLQNPLFVILGGMGKGQDFTPLRDALAGKAKGVFLIGVDAPQIRRDLDGCDLNMTDCATLEEAVQKAYAQAEAGDIVLLSPACASFDMFKGYAHRSEVFIGAFKAL

SEQ ID NO: 30923 - protein, 143 aa, Neisseria meningitidis; identical to SEQ ID NO: 28

SEQ ID NO: 30924 - protein, 264 aa, Neisseria meningitidis
MTLPMQETRFSILLDELAAKQEAAIAPHLLADGTKVWIRKAGRHNARWRYALLGMVARYLKLGVLKPVPSLGGEPAITTESKRLYELRAAGIAVPELLAVRKNALMFGNLEGIPLDTQIRQEAEAGKSDAWLAGLEAIARVHKKRQFLSQAFARNMMSDGKNISFLDFEDDPSEVLTIAQCQARDWLCYIHSTALILKNGGLLEAAAEKWGGVLSDQPAEIQKLIAATVKPILPIRRLEHPRWGRDALRLAASISLISLADMPP

SEQ ID NO: 30925 - protein, 394 aa, Neisseria meningitidis; identical to SEQ ID NO: 17803

SEQ ID NO: 30926 - protein, 365 aa, Neisseria meningitidis
MNQTFTLPDTRPYPQNPIKNHLLLNAYQLAHNSSQASRKLSSGQLQTEIRGMLEQNHYINLSLALTMSPDAGTYAALLSSVNAVLDCEKEGEVQWFALPVVLVSGCKKERAIEMKLPTEALFACLQNYPHLRVLTQETQWLPYLVHSSDLSAVAPDEWWRAKQNTEAAAQHLRRFAPRPLLLPEGQSVRVVYALGFGSGKVQTALGQNLLQAGLPLMQVWQENLASEGVTLFANPLSPDSPVRALSDGSHTRQRMAMDVFAANAIRAVRMQSPRVGVVAAAKAGGQVLFGFNATDGAFEVVPQVFSWQLSFTDNIGVIQQNFLDLMAECRVEHVYLLHNPLGEQESIPSYAEALKREGHNPFFSV

SEQ ID NO: 30927 - protein, 301 aa, Neisseria meningitidis; identical to SEQ ID NO: 1112

SEQ ID NO: 30928 - protein, 206 aa, Neisseria meningitidis
MNSTASKTLKGLSLVFFASGFCALIYQVSWQRLLFSHIGIDLSSITVIISVFMVGLGVGAYFGGRIADRFPSSIIPLFCIAEVSIGLFGLVSRSLISGLGHLLVEADLPIIAAANFLLLLLPTFMMGATLPLLTCFFNRKIHNVGESIGTLYFFNTLGAALGSLAAAEFFYVFFTLSQTIALTACFNLLIAASVWLRYRKDGYSEH

SEQ ID NO: 30929 - protein, 126 aa, Neisseria meningitidis
MPLKFQPRERSVIMCDFRGYEESEMVKKRPVVVIARNRHNGKLVTVVPLSSTEPVPLADYHHKMSGNPLPDKPHIQCWAKCDMTATVGLARLDRYKPKGRDRCIPIISEEDFQAIKTAVAKAFKLY

SEQ ID NO: 30930 - protein, 386 aa, Neisseria meningitidis
MRKKLTALVLSALPLAAVADVSLYGEIKAGVEGRNIQLQLTEPLQNIQQPQVTKRKSRIRTKISDFGSFIGFKGSEDLGEGLKAVWQLEQDVSVAGGGASQWGNRESFIGLAGEFGTLRAGRVANQFDDASQAIDPWDSNNDVASQLGIFKRHDDMSVSVRYDSPEFSGFSGSVQFVPAQNSKSAYTPAHFVQNKQNQPPTLVPAVVGKPGSDVYYAGLNYKNGGFAGNYAFKYAKHANVGRDAFELFLLGSGSDEAKGTDPLKNHQVHRLTGGYEEGGLNLALAAQLDLSENADKTKNSTTEIAATASYRFGNAVPRISYAHGFDLIERGKKGENTSYDQIIAGVDYDFSKRTSAIVSGAWLKRNTGIGNYTQINAASVGLRHKF

SEQ ID NO: 30931 - protein, 92 aa, Neisseria meningitidis
MYYQVGNKCIEKHQAENLYFSLVVPRIKENGQIVRPEYNGSLWKMSDGQPLRLLLAECSPKDNLQSGLETGWIVFGILASVYFVSLLKKVLK

SEQ ID NO: 30932 - protein, 299 aa, Neisseria meningitidis
MKTNSEELTVFVQVVESGSFSRAAEQLAMANSAVSRIVKRLEEKLGVNLLNRTTRQLSLTEEGAQYFRRAQRILQEMAAAETEMLAVHEIPQGVLRVDSAMPMVLHLLAPLATKFNERYPHIRLSLVSSEGYINLIERKVDIALRAGELDDSGLRARHLFDSRFRVVASPEYLAKHGTPQSTEELAGHQCLGFTEPGSLNTWAVLDAQGNPYKISPHFTASSGEILRSLCLSGCGIACLSDFLVDNDIAEGKLIPLLAEQTSDKTHPFNAVYYSDKAVNLRLRVFLDFLVEELGNNLCG

SEQ ID NO: 30933 - protein, 471 aa, Neisseria meningitidis; identical to SEQ ID NO: 16258

SEQ ID NO: 30934 - protein, 177 aa, Neisseria meningitidis
MFPPDKTLFLCLSALLLASCGTTSGKHRQPKPKQTVRQIQAVRISHIDRTQGSQELMLHSLGLIGTPYKWGGSSTATGFDCSGMIQFVYKNALNVKLPRTARDMAAASRKIPDSRLKAGDLVFFNTGGAHRYSHVGLYIGNGEFIHAPSSGKTIRTEKLSTPFYAKNYLGAHTFFTE

SEQ ID NO: 30935 - protein, 592 aa, Neisseria meningitidis
LGVDPDASEWKKVLLPWTVRASNDDDQFNTFNKEENNGKPKYSQKYRSRDNGKHERNLGDIVNSPIVAVGEYLATSANDGMVHIFKKGNGGDERNYSLKLSYIPGTMPRKDIESKDSTLAKELRAFAEKGYVGDRYGVDGGFVLRKVNNLNGQDRVFMFGAMGFGGRGAYALDLTKADSSNPTGVSLFDVKNDNNNGKNGNNSVELGYTVGTPQIGKTHNGKYAAFLASGYATKEINNNDNKTALYVYDLENSNGNGTLIKKIEVPNGKGGLSSPTLVDKDLDGTVDIAYAGDRGGKMYRFDLSSQSPDQWTVRPIFEGTKPITSAPAISQLKDKRVVIFGTGSDLSEEDVDNMEEQYIYGIFDDDTATTGTVNFSGSGGGLLEQVLRRDNDNKTLFLTDYKRSDGSGNKGWVVKLKDGQRVTVKPTVVLRTAFVTIHKYTGTDKCGAETAILGINTADGGKLTKKSARPIVPEANTAVAQYSGHKKGTNGKSIPIGCMQKSNEIVCPNGYVYDKPVNVRYLDEKKTDGFSTTADGDAGGSGIDPDGKRSGKNNRCFSQKGVRTLLMNDLDSLDITGPTCGMKRISWREVFY

SEQ ID NO: 30936 - protein, 238 aa, Neisseria meningitidis; identical to SEQ ID NO: 18492

SEQ ID NO: 30937 - protein, 421 aa, Neisseria meningitidis; identical to SEQ ID NO: 23144

SEQ ID NO: 30938 - protein, 140 aa, Neisseria meningitidis; identical to SEQ ID NO: 15282

SEQ ID NO: 30939 - protein, 410 aa, Neisseria meningitidis; identical to SEQ ID NO: 5446

SEQ ID NO: 30940 - protein, 418 aa, Neisseria meningitidis; identical to SEQ ID NO: 1968

SEQ ID NO: 30941 - protein, 178 aa, Neisseria meningitidis; identical to SEQ ID NO: 1654

SEQ ID NO: 30942 - protein, 204 aa, Neisseria meningitidis
MNFTRLLNQVLSTVQKKGNTFSDSPLNSFGGGALVAGVASMLLNGKNRKTITKIGSTAALGYLAYRGYQMWQQNKGRATVTQSDFQPAGETEETYSRTVLRTMIATAASDGMIDEAERRTIEQESGTDPETAAWLAAEYRLPASIEDIAAAVGNDEALAAEAYLAARLVCADLSRKETVFLARLSQALELDDNLVENLERQLGF

SEQ ID NO: 30943 - protein, 219 aa, Neisseria meningitidis; identical to SEQ ID NO: 8224

SEQ ID NO: 30944 - protein, 505 aa, Neisseria meningitidis
MSPKKIPIWLTGLILLIALPLTLPFLYVAMRSWQVGINRAVELLFRPRMWDLLSNTLTMMAGVTLISIVLGIACALLFQRYRFFGKTFFQTAITLPLCIPAFVSCFTWISLTFRVEGFWGTVMIMSLSSFPLAYLPVEAALKRISLSYEEVSLSLGKSRLQTFFSAILPQLKPAIGSSVLLIALHMLVEFGAVSILNYPTFTTAIFQEYEMSYNNNTAALLSAVLMAVCGIVVFGESIFRGKAKIYHSGKGVARPYPVKTLKLPGQIGAIVFLSSLLALGIIIPFSVLVHWMMVGTSGTFALVSVFDAFVRSLSVSALGAVLTILCALPLVWASVRYRNFLTVWIDRLPFLLHAVPGLVIALSLVYFSINYTPAVYQTFIVVILAYFMLYLPMAQTTLRTSLEQLPKGMEQVGATLGRGHFFIFRTLVLPSILPGITAAFALVFLNLMKELTATLLLTADDIHTLSTAVWEYTSDAQYAAATPYALMLVLFSGIPVFLLKKYAFK

SEQ ID NO: 30945 - protein, 286 aa, Neisseria meningitidis
MSDLSVLSPFAVPLAAVFGLLVGSFLNVVIYRVPVMMERGWTVFAKEYLNLPLTEEESRTFNLMKPDSCCPKCRVPIRAWQNIPIVSYLLLRGKCASCQTKISIRYPLIELLTGVLFGLVAWQYGWSWITLGGLVLTAFLISLTFIDADTQYLPDSMTLPLIWLGLIFNLDGGFVPLQSAVLGAVAGYGSIWLLCAVYKLIKGEIGMGNGDFKLIAALGAWLGISALPVLIFVSSLIGLVAAIVMRVAKGQHFAFGPALTVSGWIIFTANDSVWRAVNWWLTHPVL

SEQ ID NO: 30946 - protein, 544 aa, Neisseria meningitidis; identical to SEQ ID NO: 3460

SEQ ID NO: 30947 - protein, 206 aa, Neisseria meningitidis; identical to SEQ ID NO: 1164

SEQ ID NO: 30948 - protein, 139 aa, Neisseria meningitidis; identical to SEQ ID NO: 921

SEQ ID NO: 30949 - protein, 388 aa, Neisseria meningitidis
MNLHEYQAKELLAGYGLPVQGGILAHNGEEAAAAYDKLGGKFAVVKAQVHAGGRGKAGGVKVVKSREEAKEVAESLIGTNLVTYQTDANGQPVNSVLVCEDIYPVQTELYLGAVVDRSTRRVTFMASTEGGVEIEKVAAETPEKIFKVTVDPLVGLQPCQAREVAFQLGLKDKQINEFVKLMTGAYKAFVENDFALFEVNPLAVRENGALACVDGKIGIDSNALYRLPKIAELRDKSQENERELKASEFDLNYVALEGNIGCMVNGAGLAMATMDIIKLKGGQPANFLDVGGGATKDRVVEAFKLILEDKSVKGVLINIFGGIVRCDMIAEAIVAAVKEINVDVPVVVRLEGNNAELGAKILNESGLKLTSADGLNDAAEKIVAAVNA

SEQ ID NO: 30950 - protein, 145 aa, Neisseria meningitidis; identical to SEQ ID NO: 1767

SEQ ID NO: 30951 - protein, 176 aa, Neisseria meningitidis; identical to SEQ ID NO: 26619

SEQ ID NO: 30952 - protein, 155 aa, Neisseria meningitidis; identical to SEQ ID NO: 6437

SEQ ID NO: 30953 - protein, 397 aa, Neisseria meningitidis
MTEDERFAWLQLAFTPYIGAESFLLLLRRFGSASNALSAPAEQVALAVRHKQAAEAWRNAEKRASARQAAEAALEWEMRDGCRLMLLQDEDFPEMLTQGLTAPPVLFLRGNVRLLHKPSAAIVGSRHATPQAMRIAKDFGRALGGKGIPVVSGMASGIDTAAHQGALQAEGGTIAVWGTGIDRIYPPSNKNLAYEIAERGLIVSEFPLDTRPFAGNFPRRNRLIAALSQVTLVVEAALESGSLITAGLAAEMGREVMAVPGSIDNPHSKGCHKLIKDGAKLTECLDDILNECPRLLQNEGASSYSINKGMPEKRITAVQTASDQLSLPEGKMPSEKTENRPVGGSILDRMGFDPVHPDVLAGQLAMPAADLYAALLELELDGSVAAMPGGRYQRIRT

SEQ ID NO: 30954 - protein, 261 aa, Neisseria meningitidis
MGFLQGKKILITGMISERSIAYGIAKACREQGAELAFTYVVDKLEERVRKMAAELDSELVFRCDVASDDEINQVFVDLGKHWDGLDGLVHSIGFAPKEALSGDFLDSISREAFNTAHEISAYSLPALAKAARPMMRGRNSAIVALSYLGAVRAIPNYNVMGMAKASLEAGIRFTAACLGKEGIRCNGISAGPIKTLAASGIADFGKLLGHVAAHNPLRRNVTIEEVGNTAAFLLSDLSSGITGEITYVDGGYSINALSTEG

SEQ ID NO: 30955 - protein, 215 aa, Neisseria meningitidis; identical to SEQ ID NO: 16051

SEQ ID NO: 30956 - protein, 513 aa, Neisseria meningitidis
MKFLDREASIAKPGFNRWLVPPAALAVHLAIGQIYAYSVFNAPLTKLIGITESAAGDWKLTTVGWIFSIALAMLGASAALFGTWMERVGPRKAIFAAACCFSLGFFVSAFGVRTHNLFLLYLGNGVIGGVGLGLGYIGPVSTLMKWFPDKPGMATGLAIMGFGGGAMLASPLSVSLMNAFSNAASVGVAETFAVLGLLYLALMMFGAFTIRVPADGWKPEGYTAPKTQNKLVSSNHVNVSQAMKTPQFWLLFWVLCLNVTAGIGVLGQASVMIQELFSETSVGRQSAVGAGAAAGFVSLLSLFNMGGRFLWSSVSDKIGRKDTYTIFFVLGSLLYFAVPSIGEGGSKALFIIGFCVIISMYGGGFAAIPAYLKDLFGTYQVGAIHGRILLAWSTAAVIGPVLVNYIRQSQIDSGIPAAQAYSVTMYIMAGLLIIGLLCNLAVKSVHEKHHEKDIKTAARSGNPDDETAISDAYLVGEKVSGGGISVWWRWALAVIPLAYGVVMVFVKALDLFS

SEQ ID NO: 30957 - protein, 158 aa, Neisseria meningitidis
  misc_feature 3, 4: 'Xaa' is any amino acid
VCXXIKKNDLYKLGYKQHTRTDEEGYIEKLHITPANAHECTHLSPLLEGIDEGTTVYADKGYDSAENRQHLKEHQLPDGIMRKACRNRPLSEVQTKRNRYLSKTRYVVEQSFGTLHRKFRYARAAYFGLIKVSAQSHLKAMCLNLLKAANRLSAPAAA

SEQ ID NO: 30958 - protein, 213 aa, Neisseria meningitidis; identical to SEQ ID NO: 6185

SEQ ID NO: 30959 - protein, 148 aa, Neisseria meningitidis; identical to SEQ ID NO: 4019

SEQ ID NO: 30960 - protein, 157 aa, Neisseria meningitidis; identical to SEQ ID NO: 3112

SEQ ID NO: 30961 - protein, 607 aa, Neisseria meningitidis
  misc_feature 603, 604, 605: 'Xaa' is any amino acid
MTRFKYSLLFAALLPVYAQADVSVSDDPKPQESTELPTITVTADRTASSNDGYTVSGTHTPLGLPMTLREIPQSVSVITSQQMRDQNIKTLDRALLQATGTSRQIYGSDRAGYNYLFARGSRIANYQINGIPVADALADTGNANTAAYERVEVVRGVAGLLDGTGEPSATVNLVRKRLTRKPLFEVRAEAGNRKHFGLDADVSGSLNTEGTLRGRLVSTFGRGDSWRRRERSRDAELYGILEYDIAPQTRVHAGMDYQQAKETADAPLSYAVYDSQGYATAFGPKDNPATNWANSRHRALNLFAGIEHRFNQDWKLKAEYDYTRSRFRQPYGVAGVLSIDHNTAATDLIPGYWHADPRTHSASVSLIGKYRLFGREHDLIAGINGYKYASNKYGERSIIPNAIPNAYEFSRTGAYPQPASFAQTIPQYGTRRQIGGYLATRFRAADNLSLILGGRYSRYRTGSYDSRTQGMTYVSANRFTPYTGIVFDLTGNLSLYGSYSSLFVPQSQKDEHGSYLKPVTGNNLEAGIKGEWLEGRLNASAAVYRARKNNLATAAGRDPSGNTYYRAANQAKTHGWEIEVGGRITPEWQIQAGYSQSKTRDQXXXHT

SEQ ID NO: 30962 - protein, 416 aa, Neisseria meningitidis
MFVPLAMLAGMFSYYETFHETEALQDDLLRQAALYVAPDSKPETLPEGDGDTRILVQMPQQEDPVVSLPAHLADGLHTLQADGDDDYYRVYIRTTEQGRIAVMQENEYREDLAADAARQSVLPLLAALPLMILLTVWITHKAMRPVRKLSQSLEQRRINDLSALSVDNIPSEIRGFVTAINLLLKRADEDIRHRQRFVADAAHELRTPMTALSLQAERLNNMSLPPDAARQSAVLQQSIRRNKHLLEQLLALARSQSDETPLTKTTFGLQSRFRQVLQELMPLALEKRQDIGVAVGGDVEVSADETEIYTLIKTFADNAVRYTPPEGRIDLGFTDEGKYLAVWVEDNGNGIPESERARVLDPFYRILGTEQQGTGLGLSIADTLAKKYGGHLELTDSRRFGHGLLIRALLDKETLK

SEQ ID NO: 30963 - protein, 563 aa, Neisseria meningitidis
MSASQLLSRLTQTVGEKYIITDPAKTEQYRQGYRFGEGRALAVVRPGTILEMWKILQACVEADVIVITQAANTGLTGGSTPDGNDYDRDIVIVNTMRMNIIQTINNNEQVVCLPGSTLNQLELLLKPLGREPHSVIGSSCIGASVLGGVCNNSGGALVQRGPAYTEMALFAQINEEGRLELVNHLGIDLGDTPEEILTNLQGHHYQNKDIKQDAGKGHDHAYCEHVRQVDEPTAARFNADPARHYEASGCAGKLMVFAVRLDTFPQEKQTAVFYIGTNDINELTDIRRAALGEFESLPVSGEYIHRHAFDIADVYGKDTFYVIKKFGTHQLPKLFDLKARVDRFGKKASFLPKHFSDKAMQFVSKYLPDHLPKSMRDYRDKYEHHLILKMGGKGVDEARAFLKEYFAHHSGAFFECNAEETQAAMLHRFAVASAAIRYRAVHDDEVEDLVALDIALRRDDRDWFEKLPSEIDNKIIHKLYYGHFMCHVFHQDYIIKKGNDCMALEHEMLHLLDQRGAQYPAEHNVGHLYEAKPALKQFYRKLDPTNSFNPGVGKTSKKKNWAE

SEQ ID NO: 30964 - protein, 248 aa, Neisseria meningitidis
MNVLISNDDGYLSEGIAVLARVTAEFANVRVVAPERDRSGVSNSLTLERPLQLKQAQNGFYYVNGTPTDCIHIGQSVFSDFQADFVFSGINRGANMGDDTLYSGTVAAATEAYLMGIPAVAFSLNDASGRYWATAEKALWTLLAHFFKTPPQSPILWNINIPAVEPEDVRGIKIARLGRRHHGQNVIPARNPRGEQIYWIGPVGRVSDKEEGTDFGECGAGFITVTPLQIDLTAYPDMAETAAFWHAD

SEQ ID NO: 30965 - protein, 671 aa, Neisseria meningitidis; identical to SEQ ID NO: 5020

SEQ ID NO: 30966 - protein, 352 aa, Neisseria meningitidis
MTAALHIGHLSKSFQNTPVLNDISLSLDPGEILFIVGASGCGKTTLLRCLAGFEQPDFGEISLSGRTIFSKNTNLPVRERRLGYVVQEGVLFPHLTVYRNTAYGLGNGKGKTAQERQRIEAMLDLTGISELAGRYPHELSGGQQQRVALARALAPDPELILLDEPFSALDEQLRRQIREEMMSVLRQNGKSAVFVSHDREEALQYADKIAVIQQGKLLQAASPAELYRRPANLDAALFIGEGIVFPAVLNADGTADCGLGRLPVQSAAPAGTRGTLLIRPEQFSLYPHSAPAAAIHAVVLKTTPKARHTEISLRAGQTVLTLNLPAAPTLSDGISAVLHLDGPALFFPENTL

SEQ ID NO: 30967 - protein, 344 aa, Neisseria meningitidis; identical to SEQ ID NO: 22928

SEQ ID NO: 30968 - protein, 128 aa, Neisseria meningitidis
  misc_feature 122, 123: 'Xaa' is any amino acid
MMKFKYVFLLACVVVSLSYRLNAAPMFNDNPVVYGKIKVQSWKARRDFNIVKQDLDFSCGAASVATLLNNFYGQTLTEEEVLKKLDKEQMRASFEDMRRIMPDLGFRSERLCPVFRAARTVXXTHLIN

SEQ ID NO: 30969 - protein, 233 aa, Neisseria meningitidis; identical to SEQ ID NO: 23597

SEQ ID NO: 30970 - protein, 367 aa, Neisseria meningitidis
MNTTANPSNIIVGLSGGVDSSVTAALLKQQGYQVRGVFMQNWEDDDNDEYCSIKQDSFDAIAVADIIGIDIDIVNFAAQYKDKVFAYFLQEYSAGRTPNPDVLCNAEIKFKCFLDYAVGQGADTIATGHYARKEVRNGVHYLLKGLDRNKDQSYFLYRLKPFQLERAIFPLGGLEKPEVRRLAAEFKLPTAAKKDSTGICFIGERPFREFLQKYLPTDNGKMVTPEGKTVGEHVGLMFYTLGQRKGLGIGGGGEPWFVAAKDLTKNELIVVQGHDHPLLYTRSLVMNDLSFTLPERPKAGRYTCKTRYRMADAPCELRYLDEETAELVFDEPQWAVTPGQSAVLYDGDICLGGGIIQTTDKPVIITR

SEQ ID NO: 30971 - protein, 410 aa, Neisseria meningitidis
MGLKHFLEKIEPHFLPGGKHEKWYALYEAAATIFYTSGAVTRKAAHVRDALDSKRMMILVWLALFPAMFYGMYNVGAQAFGALTPDLLQQSIANDWHYTLADALGINMSSEAGVSGKMLFGAIYFLPIYATVFVVGGFWEVLFATVRKHEINEGFFVTSILFALIVPPTLPLWQAALGISFGVVVAKEVFGGTGKNFMNPALAGRAFLFFAYPANLSGDAVWTAVDGYSGATALAQWAAHGADGLKNAVTGQTITWMDAFIGKLPGSIGEVSTLALLIGGAFIVFARIASWRIIAGVMIGMIAMSSLFNFIGSDTNAMFAMPWYWHLVVGGFAIGMLFMATDPVSASFTNVGKWWYGALIGVMCVLIRVVNPAYPEGMMLAILFANLFAPIFDYFVAQANIKRRKARSNG

SEQ ID NO: 30972 - protein, 248 aa, Neisseria meningitidis
METPPNTPQRSLRQNSIYLLPNSFTIAALFSAFYAITQSMHGRYETAAIAVFISMLLDGMDGRVARLTNSQSAFGEQLDSLADMVSFGVAPALIAYKWQLWQFGKIGYSVAFIYCACAALRLALFNTLIGKVDKRWFIGVPSPTAAALIVGLIWVNHSVEKFPAVHWWALGITLFAGLSMIVQIPFWSFKEINIRRQVPFVGMLLAVLLLLLVTWEPSLVLFLFFLGYSLSGYIMAARRFWKKYRKAD

SEQ ID NO: 30973 - protein, 376 aa, Neisseria meningitidis
MIKISTRFDAGSVVVKDLTDPSNIRLALRPDNASDFAQWFYFRLQGAAYQNCIMHFENAAEAAYPKGWEGYQACASYDRRNWFRVPTSYENGVLTVNHTPLSNSVYYAYFEPYSEEQHLNLLGDAQGSGLCRIDDLGSTVQGRDINLLTIGNQVESDLKIWITARQHPGETMAEWFVEGLLGRLLDPQDPTARTLLDRATFYIVPNMNPDGSALGNLRTNAAGANLNREWENPTLEKSPEVFFVRERMLETGVDLFLDIHGDEGLPFVFVAGTEGVPNYNPRISALETQFKTALLNASPDFQDEYGYEKDAPGQANVTLATNWVGNRFNCLAYTLEMPFKDNANLPDDDFGWNGQRSLRLGEAALSAILNVIGDLR

SEQ ID NO: 30974 - protein, 188 aa, Neisseria meningitidis; identical to SEQ ID NO: 7019

SEQ ID NO: 30975 - protein, 138 aa, Neisseria meningitidis; identical to SEQ ID NO: 14452

SEQ ID NO: 30976 - protein, 415 aa, Neisseria meningitidis; identical to SEQ ID NO: 2921

SEQ ID NO: 30977 - protein, 630 aa, Neisseria meningitidis; identical to SEQ ID NO: 24215

SEQ ID NO: 30978 - protein, 223 aa, Neisseria meningitidis
  misc_feature 2, 3: 'Xaa' is any amino acid
VXXHQITLHHSTIYRYLRQDKSNGSTLWQHLRICSKPYRKRYGSTWTRGKVPNRVGIENRPAIVDQKSRIGDWEADTIVGEGQKSALLTLVERVTRYTIICKLDSLKAEDTARAAVRALKAHKDRVHTITMDNGKEFYQHTKITKALKAETYFCRPYHSWEKGLNENTNGLIRQYFPKQTDFRNISDREIRRVQDELNHRPRKTLGYETPSVLFLNLFQPLIH

SEQ ID NO: 30979 - protein, 186 aa, Neisseria meningitidis; identical to SEQ ID NO: 6815

SEQ ID NO: 30980 - protein, 233 aa, Neisseria meningitidis; identical to SEQ ID NO: 6431

SEQ ID NO: 30981 - protein, 226 aa, Neisseria meningitidis
MIFQTVWFSDVVLSVSWIVLILILAASAPSAFRSLARYRSALPLCTVIFSAAWCLNASAGGGQLAQMNYHLLAVNLVALMVGTSAAFWLAALLMLPYCLLFAGSVGAYPPNALVLILPALAVNRLSRMLVNRLPPNIFIFIFVNGFLASAAGILLTGLVLTGILDAANAFPSEILWTTALPVFILLAWAEAFLSGISTAIFVALKPHWINTFDDNRYLKSDRGIWR

SEQ ID NO: 30982 - protein, 57 aa, Neisseria meningitidis; identical to SEQ ID NO: 6070

SEQ ID NO: 30983 - protein, 397 aa, Neisseria meningitidis
MNSKHLIAFSALFAATQAEALPVASVSLDTVTVSPSAPYTDTNGLLTDYGNAAASPWMKKLQSVAQGSGETFRILQIGDSHTAGDFFTDSLRKRLQKTWGDGGIGWVYPANVKGQRMAAVRHNGNWQSLTSRSAAADFPLGGILAHTGSGGSMTLTASDGKTGKQRISLFAKPLLAEQTLTVNGNTVSANGGGWQVLDTRAALPLTIQTEMPWDIGFINIENPAGGITVSAMGINGAQLTHWSKWRADRMNDLAQTGADLVILSYGTNEAFGDNIDIADTEQKWLDTVRQIRDSLPAAGILIIGAPESLKNTLGVCGTRPVRLTEVQQMQRRVARQGQTMFWSWQNAMGGICSMKNWLNQGWAAKDGVHFSAKGYRRAAEMLADSLEELVRAAAIRQ

SEQ ID NO: 30984 - protein, 304 aa, Neisseria meningitidis; identical to SEQ ID NO: 794

SEQ ID NO: 30985 - protein, 140 aa, Neisseria meningitidis; identical to SEQ ID NO: 2533

SEQ ID NO: 30986 - protein, 330 aa, Neisseria meningitidis; identical to SEQ ID NO: 3133

SEQ ID NO: 30987 - protein, 482 aa, Neisseria meningitidis
MFKRSVIAMACIFALSACGGGGGGSPDVKSADTLSKPAAPVVSEKETEAKEDAPQAGSQGQGAPSAQGSQDMAAVLEENTGNGGSATTDNPKNEDEGAQNDMPQNAADTDSLTPNHTPDPNMPAVNMENQAPDTGESVQPENQPDAANAGDGMQGDDPSAGGENAGNTAAQGTNQAENNQAAGSQNPASSTNPSTTNSGGDFGRTNVGNSVVIDGPSQNITLTHCKDKVCGSEFLYEEAPSKSEFEKLSNEEKINKYKKNGGKFTGLVATRVENNGLNQYTIIYQAQPTRSARSRRSRRSLPAEMPLIPVNQADTLIVDGEAVSLTGHSGNIFAPEGNYRYLTYGAEKLSGGSYALSVQGEPAKGEMLAGTAVYNGEVLHFHTENGRPYPTRGRFAAKVDFGSKSVDGIIDSGDDLHMGTQKFKAVIDGNGFKGTWTENGGGDVSGRFYGPAGEEVAGKYSYRPTDAEKGGFGVFAGKKEQD

SEQ ID NO: 30988 - protein, 101 aa, Neisseria meningitidis; identical to SEQ ID NO: 1118

SEQ ID NO: 30989 - protein, 243 aa, Neisseria meningitidis; identical to SEQ ID NO: 19739

SEQ ID NO: 30990 - protein, 249 aa, Neisseria meningitidis; identical to SEQ ID NO: 467

SEQ ID NO: 30991 - protein, 106 aa, Neisseria meningitidis
MNFQDYLATFPSIDHLGGLDVQDADGKTVHHIPAVQGKLGSLKLYNALAERFGGKLDKEAAEQGLIWFAEHVDDARAHPGKHPNIDLLENVVQSGETFLLKPLAAQ

SEQ ID NO: 30992 - protein, 431 aa, Neisseria meningitidis
MAIYQSGVIFDQVDTANPDCWTLDEYVKRGGYTALRKILSGNISQTDVIDEVKTSGLRGRGGAGFPTGLKWSFMPRSFPGEKYVVCNTDEGEPGTFKDRDIIMFNPHALIEGMIIAGYAMGAKAGYNYIHGEIFEGYQRFEAALEQARAAGFLGKNILGSDFEFELFAHHGYGAYICGEETALLESLEGKKGQPRFKPPFPASFGLYGKPTTINNTETFSSVPFIIRDGGQAFADKGIPNAGGTKLFCISGHVERPGNYEVPLGTPFAEVLKMVGGMRGGKKLKAVIPGGSSAPVLPADIMMQTNMDYDSISKAGSMLGSGAIIVMDEDVCMVKALERLSYFYYDESCGQCTPCREGTGWLYRIVHRIVEGKGKMEDLDLLDSVGNQMAGRTICALADAAVFPVRSFTKHFRDEFVHYIEHGGPMKPNKWC

SEQ ID NO: 30993 - protein, 212 aa, Neisseria meningitidis; identical to SEQ ID NO: 324

SEQ ID NO: 30994 - protein, 369 aa, Neisseria meningitidis
LLFFQIGKMTVLREVHMSKNAQKTLLAVCSFEVQPKDGRIQLLPYGEFRAVDGRPTDVPAWYLTEENGHDVALLANSSRNQLVVDYEHQTLYKEKNGQPAPAAGWMRWLEFTPKGMFAEVEWTDKAAAAIAAKEYRYISAVFSYDTKGYVSKIFHAALTNFPALDGMDEVLAAASAQILKPETEQNPMKELLQQLFGLPDAGEEELKAVLSALVEAKPKDVALSADVFAQLAEKDSRIAALTAQTAKPDLTKYAPISVVQELQSKVAALTAKQEADKGNELITAALTSGKLLPAQKEWAEGVLKQPGGLAFLTGFIENAQPVAALAGSQTGGKAPDERVAALTAEEAAAAKMLGMSGEEFVKIKESEVK

SEQ ID NO: 30995 - protein, 55 aa, Neisseria meningitidis; identical to SEQ ID NO: 1257

SEQ ID NO: 30996 - protein, 252 aa, Neisseria meningitidis
MNPKTPPDHTEDAVRLSKRMAQLGLCSRREADGYIEQGWVTVNGKTAVLGQKVSPADRIELNKKAHEQQAARITILLNKPVGYVSAQAEKGYKSAAELITSENRWESDTSRIRFDPKHKIGLAPAGRLDIDSVGLLVLTQDGRIAKQLIGENSGSEKEYLVRVRGKLDEKGLALLNHGLSLDGEKLRPAQVEWQNEDQLRFVLKQGKKRQIRRMCELVGLRVVGLKRIRMGKVKLGRLPPGKWRYLAPGESF

SEQ ID NO: 30997 - protein, 916 aa, Neisseria meningitidis
MLTNIAKKIFGSRNDRLLKQYRKSVARINALEEQMQALSDADLQAKTAEFKQRLADGQTLDGILPEAFAVCREASRRTLGMRHFDVQLIGGMVLHDGKIAEMRTGEGKTLVATLAVYLNALAGKGVHVVTVNDYLASRDAGIMEPLYNFLGLTVGVIISDMQPFDRQNAYAADITYGTNNEFGFDYLRDNMVTDQYDKVQRELNFAVVDEVDSILIDEARTPLIISGQADDNIQLYQIMNTVPPHLVRQETEEGEGDYWVDEKAHQVILSEAGHEHAEQILTQMGLLAENDSLYSAANIALMHHLMAALRAHSLFHKDQHYVIQDGEIVIVDEFTGRLMSGRRWSEGLHQAVEAKEGVEIKRENQTLASITFQNYFRLYTKLSGMTGTADTEAFEFQSIYNLETVIIPTNRPVQRKDFNDQIFRSAEEKFEAVVKDIEECHKRGQPVLVGTTSIENSELVSHLLQKAGLPHNVLNAKEHEREALIVAQAGKVGAITVATNMAGRGTDIVLGGNLKHQTDAIRADEALSDEEKQAQISALEDGWQAEHDKVMEAGGLHIIGTERHESRRIDNQLRGRSGRQGDPGSSRFYLSFEDPLLRLFALDRAAAILNRLAPERGVAIEHNLLTRQIEGAQRKVEGRNFDMRKQVLEYDDVANEQRKVIYSQRNEILTSKDISDLMQEIRSDVVSDLVDTYMPPDSMEEQWDIPTLENRLAAEFRLHEDIQSWLKADNAIDGQDIKERLIERIENEYAAKTELVGKQAMADFERNVMLQVIDNQWREHLAAMDYLRQGIHLRSYAQKNPKQEYKREAFTMFQDLWNGIKFHIASLLTSVQIEQNPVAVVEEQPIGNIQSIHSESPDMEELLGQSQTDLVTEAFNPDGTDFSPEALEARGQIVHRNDPCPCGSGLKYKQCHGKLA

SEQ ID NO: 30998 - protein, 296 aa, Neisseria meningitidis; identical to SEQ ID NO: 337

SEQ ID NO: 30999 - protein, 114 aa, Neisseria meningitidis
MLPNKVLGKYDWNVDGKTGIGAAWVVAAFVLPMLVWAIFMLSRMQGWLAPTKANPIWALVWLLICLPCLLIASKCLGWKGWRRVVNIFACLTVCAILSVPASLLIAFTLRDLLK

SEQ ID NO: 31000 - protein, 60 aa, Neisseria meningitidis
  misc_feature 56, 57, 58: 'Xaa' is any amino acid
MTTRQIILDTETTGLYADGGDRLVEFAGLEMVNRQMTDKNLHLYVHPERDMPEEAXXXHT

SEQ ID NO: 31001 - protein, 214 aa, Neisseria meningitidis; identical to SEQ ID NO: 18686

SEQ ID NO: 31002 - protein, 351 aa, Neisseria meningitidis
VFETPTFEQIRERILRDTKSLWPDADISPDSDHYVHASRLASCAEGQYAHQSWIVRQIFPDTADREYLERHASMRGLRRRNPTTASGTLTVSGIAQSMLSDGLQVRIGQRFYRTTARAVIGSGGTAEIPAIADEPGAAANVRDGEAQLMAAPAGVSTECRLTVQGGTDRESDASLLARLLEIIRRPPAGGNRYDYKNWALSVDGVTSAYVYPLRRGLGTVDIAITSADGVPSEETVRRVQAYIDEMRPVTAKNALVLKPTVTAVPVTVQVKLDGIDLDDAKRRIRTALKEYFDTLIPGDGLTVSQIEAAISNVDGVIDRRLTAPTANRAADTVNRIEWFKAGAINVTEMPS

SEQ ID NO: 31003 - protein, 416 aa, Neisseria meningitidis
MFSKSVTLAQYDPDLAAAIAQEDQRQQDHVELIASENYVSCAVMEAQGSQLTNKYAEGYPGKRYYGGCEYVDIVEQLAIDRVKKLFGAQYANVQPHSGSQANQAVYASVLKPGDTILGMSLAHGGHLTHGASVNISGKLYNAVTYGLDENEVLDYAEVERLALEHKPKMIVAGASAYALQIDWAKFREIADKVGAYLFVDMAHYAGLIAGGEYPNPVPFCDFVTTTTHKTLRGPRGGVILCRDNTHEKALNSSIFPSLQGGPLMHVIAAKAVAFKEALQPEFKQYAKQVKINAAAMAEELVKRGLRIVSGRTESHVFLVDLQPMKITGKAAEAALGKAHITVNKNAIPNDPEKPFVTSGIRIGSAAMTTRGFNEADARVLANLVADVLSNPEDEANLAKVREQVTALCNKYPVYGA

SEQ ID NO: 31004 - protein, 365 aa, Neisseria meningitidis; identical to SEQ ID NO: 1845

SEQ ID NO: 31005 - protein, 264 aa, Neisseria meningitidis; identical to SEQ ID NO: 6469

SEQ ID NO: 31006 - protein, 404 aa, Neisseria meningitidis; identical to SEQ ID NO: 756

SEQ ID NO: 31007 - protein, 876 aa, Neisseria meningitidis
MQEQYRPAAIEPAAQKKWDDARIFNVSEDASKPKYYCLSMFPYPSGKLHMGHVRNYTIGDVLSRFKRLNGFNVMQPMGWDAFGMPAENAAMKHNVAPAAWTYDNIEYMKTQLKSLGFAIDWERETATCKPEYYRWEQWLFTKLFEKGIVYRKNGTVNWDPVDQTVLANEQVIDGRGWRSGALIEKREIPMYYFKITDYAEELLNDLDKLEHWPEQVKTMQRNWIGKSRGMTVRFAVSDDSKQGLEGDYAKFLQVYTTRPDTLMGATYVAVAAEHPLATAAAADKPELQAFIAECKAGSVAEADMATMEKKGVPTGRYVVNPLNGDKLEVWIANYVLWGYGDGAVMAVPAHDERDFEFATKYNLPKKQVIAVGDNAFDENQWQEWYGDKENGVLVNSGDLDGLDFQTAFDAVAAKLQSQGAGEPKTQYRLRDWGISRQRYWGCPIPIVHCEKCGDVPVPADQLPVVLPENVVPDGMGSPLAKMPEFYETACPCCGGAAKRETDTMDTFMESSWYFFRYMSPKFSDGMVSAEAAKYWGAVDQYIGGIEHAILHLLYARFFTKLMRDEGLVNVGEPFERLLTQGMVVCETYYRENDKGGKDWINPADVELTFDDKGRPVSAVLKADGLPVVISGTEKMSKSKNNGVDPQELINAYGADTARLFMMFAAPPEQSLEWSDSGVEGAHRFLRRLWRTVYEYLKQGEAVKAFAGSQDGLSKELKDLRHKLHATTAKVSDDYGRRQQFNTAIAAVMELLNQYDKTDTGGEQGRAVAQEVLETAVRLLWPIVPHICETLWSELNGAKLWEAGWPTVDEAALVKSEIEVMVQVNGKLRGKITVAADASKADLEAAALANEGAVKFMEGKPAKKIIVVPGRLVNIVV

SEQ ID NO: 31008 - protein, 433 aa, Neisseria meningitidis; identical to SEQ ID NO: 68

SEQ ID NO: 31009 - protein, 262 aa, Neisseria meningitidis
MMENGKTVPRWRFALKSAGWHLLISLSVAGLAALLVFKVWYPYPYAELTGGLSLYQLVVAVDIVCGPLLTLILASPKKKTKARMVDFSMVGIIQLAALVYGLHSVSLARPVIEAFEKDRINVVTAAEVAVEDLHKAPEGLQSLSWFGIRRIALKEPEDADEKNKTLDLSLKGIEPSMRPDRWLPYSDKEAEEIRKHLKPLKVLADARKTTVADILKQAGLAEGEELYYLPFTSSRQKEWIVITDKEGNTKGYAPIDGFIIIP

SEQ ID NO: 31010 - protein, 205 aa, Neisseria meningitidis
MTFLPLKSPLKFYAVVPTADWVERMVEAGADTVQLRCKALHSDELKREIARCAAACQGSHTQLFINDHWREAIEAGAYGVHLGQEDMDTADLAAIAAAGLRLGLSTHSVAELDRALSVHPSYIASGAIFPTTTKQMPTAPQGLDKLREYVKQAGGTPVVAIGGIDLNNARAVLATGVSSLAAVRAVTEAANPEAVVKAFQALWDG

SEQ ID NO: 31011 - protein, 265 aa, Neisseria meningitidis
MLKQRVITAMWLLPLMLGMLFYAPQWLWAAFCGLIALIALWEYARMGGLCKIKTNHYLVATLVFGVVAYAGGWMLPNLVWYVVLAFWLAIMPLWLRFKWRLNGGWQVYAVGWLLIMPFWFALVSLRPHPDNALPLLAVMGLVWIADVFAYFSGKAFGKHKIAPAISPGKSWEGAIGGAVCVAVYMTAVRSAGWTAFDTGWFDTVLIGLVLTVVSVCGDLLESWLKRAAGIKDSSNLLPGHGGVFDRTDSLIAVISVYAAMMSVLN

SEQ ID NO: 31012 - protein, 260 aa, Neisseria meningitidis; identical to SEQ ID NO: 29209

SEQ ID NO: 31013 - protein, 117 aa, Neisseria meningitidis; identical to SEQ ID NO: 5140

SEQ ID NO: 31014 - protein, 592 aa, Neisseria meningitidis
MNKIYRIIWNSALNAWVAVSELTRNHTKRASATVKTAVLATLLFATVQANATDEDEEEELESVQRSVVGSIQASMEGSGELETISLSMTNDSKEFVDPYIVVTLKAGDNLKIKQNTNENTNASSFTYSLKKDLTGLINVETEKLSFGANGKKVNIISDTKGLNFAKETAGTNGDTTVHLNGIGSTLTDTLLNTGATTNVTNDNVTDDEKKRAASVKDVLNAGWNIKGVKPGTTASDNVDFVRTYDTVEFLSADTKTTTVNVESKDNGKKTEVKIGAKTSVIKEKDGKLVTGKGKDENGSSTDEGEGLVTAKEVIDAVNKAGWRMKTTTANGQTGQADKFETVTSGTNVTFASGKGTTATVSKDDQGNITVKYDVNVGDALNVNQLQNSGWNLDSKAVAGSSGKVISGNVSPSKGKMDETVNINAGNNIEISRNGKNIDIATSMAPQFSSVSLGAGADAPTLSVDDEGALNVGSKDANKPVRITNVAPGVKEGDVTNVAQLKGVAQNLNNRIDNVDGNARAGIAQAIATAGLVQAYLPGKSMMAIGGGTYRGEAGYAIGYSSISDGGNWIIKGTASGNSRGHFGASASVGYQW

SEQ ID NO: 31015 - protein, 494 aa, Neisseria meningitidis
MSKPVFKKIALYTLGAISGVAVSLAVQGFAAEKDRRDNEVLPVQSIRTMAEVYGQIKANYYQDKPDADLFEGAMKGMVAGLDPHSEYMDKKGYAEIKESTSGEFGGLGMEIGQEDGFVKVVSPIEDTPAERAGVKSGDFIVKIDNVSTRGMTVSEAVKKMRGKPGTKITLTLSRKNADKPIVVNLTRAIIKVKSVRHHLIEPDYGYIRVSQFQERTVESVNTAAKELLKENKGKPLKGLVLDLRDDPGGLLTGAVGVSAAFLPSEAVVVSTKGREGMEGFVLKARPEDYIFKAGADPLAGIPAELKTIPMTVLINSGSASASEIVAGALQDHKRAVIVGTQSFGKGSVQTLIPLSNGSAVKLTTALYYTPNDRSIQAQGIVPDVEVKDKERIFESREADLVGHIGNPLGGEDVNGETLAVPLEKDADKPAVKEKGKKKKDEDLSSRRIPNPAKDDQLRKALDLVKSPEQWQKSLGLAAKKPVSNKDKKDKKDKK

SEQ ID NO: 31016 - protein, 90 aa, Neisseria meningitidis
LNVFGFSADDFSEEETTFGVWPCNWQAVQLFIAVSTQWRIGMSGATGLDYSAVAAVMECGNIKSKKRKALLEKVRLMELEVLSMWAGEHE

SEQ ID NO: 31017 - protein, 307 aa, Neisseria meningitidis
VPSEHPFSDGISTPNPKETMNDTAQITASYGRRYIVRTPDGTTYEASTRKKRVDFACGDRVRISPVNAEQVVIEDFLPRQSLLYRQDAWKTKLIAANVTQLLIVTAAVPSPSVRLLQRALLAAEAAGIRAVIVLNKADLPETALWREKLKFYETLGYPVIETRALENADLLRPVLQGHSNILLGQSGMGKSTLTNALLGSQTARTGDISAALDSGKHTTTHARLYDLNGETQLIDSPGLQEFGLHHLQAADLPRYFPDFRHLVGQCRFHNCTHRAEPGCAFKAAAETRAASPERLAFLQGITDELPG

SEQ ID NO: 31018 - protein, 141 aa, Neisseria meningitidis; identical to SEQ ID NO: 3635

SEQ ID NO: 31019 - protein, 146 aa, Neisseria meningitidis; identical to SEQ ID NO: 235

SEQ ID NO: 31020 - protein, 191 aa, Neisseria meningitidis
  misc_feature 187, 188, 189: 'Xaa' is any amino acid
MSTFFQQTAQAMIAKHIDRFPLLKLDQVIDWQPIEQYLNRQKTRYLRDHRGRPAYPLLSMFKAVLLGQWHSLSDPELEHSLITRIDFNLFCRFDELSIPDYSTLCRYRNWLAQDDTLSELLELINCQLTEKGLKVEKASAAVVDATIIQTAGSKQRQAIEVDEEGQVSGQTTPSKDSDARWIKKNGXXXHT

SEQ ID NO: 31021 - protein, 107 aa, Neisseria meningitidis
MKKLLIAAMMAAALAACSQEAKQEVKEAVQAVESDVKDTAASAAESAASAVEEAKDQVKDAAADAKASAEEAVTEAKEAVTEAAKDTLNKAADTTQEAADKMKDAAK

SEQ ID NO: 31022 - protein, 636 aa, Neisseria meningitidis
MTLETLLALPRNIKKICFLIHDFLMIFIAFWFTQSLKADYSNEWFDPANWQSFLLTAPLTIGLFVRMGLYRAVTRFISFRILSTALAGSLASAVLFFLNTLIFEERLRLALPIVYFLLLFVSVTGSRMVLRGLLSEHPKKQMIPVIIYGAGRSGRQLLEAVKQMREYSAAAFVDDDPKLWHTVIYDLAVYQPDAIAFLIERYGVEKILLAIPGATQEQRRRIINKLEAYPCEVLTIPGMKDLMDGKISIGTLKKISVSDLLGRDSVAPDDRLMSADIEGKTVMVTGAGGSIGSELCRQIIRRRPEKLLLFELSEFALYAIEKELRETCIQKRLDTEILPFLGSVQNRTLLEHVMTAFSVATVYHAAAYKHVPMVEFNTVEGIRNNIFGTLECALAATTSGVRTFVLISTDKAVRPTNTMGASKRMAELCLQALAAEPGQKTRFSMVRFGNVLGSSGSVVPLFEKQIAEGGPLTLTHPEITRYFMTIPEAAQLVIQAGAMGTGGDVFVLDMGESVKIIDLARQMITLSGLKPNTPEQPDGDIEILITGLRPGEKLYEELLIGDNVRKTAHPRIMTADEAMLPWHELSVLLDRIRSACDRYDQQAIRTLLINAPTGFAPSDGICDLLWVRETHRKNAV

SEQ ID NO: 31023 - protein, 142 aa, Neisseria meningitidis
  misc_feature 136, 137: 'Xaa' is any amino acid
MSYTQLTQGERYHIQYLSRHCTVTEIAKQLNRHKSTISREIRRHRTQGQQYSAEKAQRQSRTIKQRKRQPYKLDSQLIQHIDTLIRRKLSPEQVCAYLCKHHQITLHHSTIYRYLRQDKSNGSTLWQHLRICSKPXXTHLIN

SEQ ID NO: 31024 - protein, 263 aa, Neisseria meningitidis
MITVNTLQKMKAAGEKIAMLTAYESSFAALMDDAGVEMLLVGDSLGMAVQGRKSTLPVSLRDMCYHTECVARGAKNAMIVSDLPFGAYQQSKEQAFAAAAELMAAGAHMVKLEGGVWMAETTEFLQMRGIPVCAHIGLTPQSVFAFGGYKVQGRGGKAQALLNDAKAHDDAGAAVVLMECVPAELAKKVTETVSCPTIGIGAGADCDGQVLVMHDMLGIFPGKTAKFVKNFMHGQSSIQAAVRAYVAEVKAKTFPAAEHIFAD

SEQ ID NO: 31025 - protein, 168 aa, Neisseria meningitidis
MNTLQKGFTLIELMIVIAIVGILAAVALPAYQDYTARAQVSEAILLAEGQKSAVTEYYLNHGEWPSNNTSAGVASASKIKGKYVEKVEVKNGVVTATMLSSGVNKEIQGRKLSLWAKRQDGSVKWFCGQPVTRASTATDAVTADTAAANKKIDTKHLPSTCRDASSAS

SEQ ID NO: 31026 - protein, 292 aa, Neisseria meningitidis
VVGNGKKYAAPLLVLGCVVFGLGSLIVRSVPVGSYAIAFWRLLISVFVFWFLARFFRQKFPKNRKTVRYALTAGVFLSFDLALWHESIHAVGPGISTLLNSLQIFFLSAIGVFFFGERLSGLKKAGLISAVAGVAMIAGAEFGYNGNAVWGFVSGLVSGLMLALSMVFVRKTHEIETVALFPSMMILSLGGAVSLVVPALLMDGGALYPTTWKDAGLVLVYGVVMQCFAWAMVAYAIPLLSLSLTGLLLLSEPVAALFIDYFGLGKPIEGVQWAGVALTLSAIYLGSLKQQS

SEQ ID NO: 31027 - protein, 436 aa, Neisseria meningitidis
MTDLFAREPDAPLAERLRPHTLDDVVGQEHLIGEGKPLRVAVEGGKPHSMLLWGPPGVGKTTLARILAQSFNAQFLPVSAVFSGVKDIREAIDKAEIALQQGRATILFVDEVHRFNKAQQDAFLPHVESGLLTFIGATTENPSFEVNPALLSRAQVYVLQPLSSDDLKKLIAKVLALPEYQEFTIETDAQKLLVNTADGDARRLLNLLEQLLRAADTRRLKNLTAEFLADSLGAQIRRFDKGGESFYNQISALHKSVRGSHPNAALYWFCRMLDGGTDPRYLARRIVRIAWEDIGLADPRAFQIANDAAATFERLGSPEGELALAQAVLYLAAAAKSNAGYKAYNQMRHFVKENASDEVPVHLRNAPTKLMKELGYGREYRYAHDEPNAYAAGESYMPDGLDEPDFYQPVPRGLEIKIGEKLAWLKSLDEEALKAK

SEQ ID NO: 31028 - protein, 522 aa, Neisseria meningitidis
MNQTDTRRGGRFLRTVEWLGNMLPHPVTLFIIFIVLLLIASAVGAYFGLSVPDPRPVGAKGRADDGLIYVVSLLDADGLIKILTHTVKNFTGFAPLGTVLVSLLGVGIAEKSGLISALMRLLLTKSPRKLTTFMVVFTGILSNTASELGYVVLIPLSAIIFHSLGRHPLAGLAAAFAGVSGGYSANLFLGTIDPLLAGITQQAAQIIHPDYVVGPEANWFFMVASTFVIALIGYFVTEKIVEPQLGPYQSDLSQEEKDIRHSNEITPLEYKGLIWAGVVFVALSALLAWSIVPADGILRHPETGLVSGSPFLKSIVVFIFLLFALPGIVYGRVTRSLSGEQEVVNAMAESMSTLGLYLVIIFFAAQFVAFFNWTNIGQYIAVKGATFLKEVGLGGSVLFIGFILICAFINLMIGSASAQWAVTAPIFVPMLMLAGYAPEVIQAAYRIGDSVTNIITPMMSYFGLIMATVIKYKKDAGVGTLISMMLPYSAFFLIAWIALFCIWVFVLGLPVGPGAPTFYPAP

SEQ ID NO: 31029 - protein, 680 aa, Neisseria meningitidis
MMSPETRKQLKITDVSAKKLDKLNLHTAWDLVLHLPLRYEDETHIMPIKDAPIGVPCQVEGEVIHQEVTFKPRKQLIVQIADGSGSVLFLRFIHFYASHQKQTAVGKRIRAVGEIKHGFYGDEMIHPKIRDAEGGGLAESLTPVYPTVNGLNQPTLRRIIQTALDVTPLHDTLPDALLCRLKLPHLAESLRLLHSPPPSFTIHQLSDGTLPAWQRLKFDELLAQQLSMRLARQKRIGGTAAALGGDGTLTQALRQALPFALTDAQEKVVSEICRDMAQTYPMHRLLQGDVGSGKTIVAALFALTAIESGAQVAVMAPTEILAEQHFIKFKQWLEPLGIEVVRLFGSLRKKAKDEAKAKLADGSVKIAVGTHALFSDGVAFHNLGLTIVDEQHRFGVAQRLALKNKGREVHQLMMSATPIPRTLAMSFFADLDVSVIDELPPGRTPIKTRLVNNVRRAEVEGFVLGTCRKGRQAYWVCPLIEESETLQLQTAAETLARLQTALPELNIGLVHGRMKAAEKAEVMARFSSGGLNVLVATTVIEVGVDVPNAALMVIEHAERMGLAQLHQLRGRVGRGAAESVCVLLFAEPLGELAKARLKVIYEHTDGFEIARQDLNIRGPGEFLGARQSGVPMLRFAKLEEDLHLLEQARETAPLLIEQNPEIVEAHLARWLSGREGYLGV

SEQ ID NO: 31030 - protein, 258 aa, Neisseria meningitidis
MTLIHPTAVIDPKAELDSSVKVGAYTVIGPNVQIGANTEIGPHAVINGHTSIGENNRIFQFASLGEIPQDKKYRDEPTKLIIGNGNTIREFTTFNLGTVTGIGETRIGDDNWIMAYCHLAHDCVVGNHTIFANNASLAGHVTIGDYVVLGGYTLVFQFCHIGDYAMTAFAAGVHKDVPPYFMASGYRAEPAGLNSEGMRRNGFTAEQISAVKDVYKTLYHRGIPFEEAKADILRRAETQAELAVFRDFFTQSTRGIIR

SEQ ID NO: 31031 - protein, 453 aa, Neisseria meningitidis
MLKKVLIANRGEIALRVLRACREMGIATVAVHSEADKDSLHVKLADESVCIGPAASAQSYLNIPAIIAAAEVSCADAVHPGYGFLAENADFAEQVEQSGFTFIGPKPDTIRLMGDKVSAKHAMIAAGVPCVPGSDGALPDDGEEILKIADKVGYPVIIKASGGGGGRGMRVVEKKEDLLQSVEMTKAEAGAAFGNPMVYMERYLQRPRHVEIQVIADEHGNAVYLAERDCSLQRRHQKVIEEAPAPFITEKERAKIGNACADACKRIGYRGAGTFEFLYEDGEFFFIEMNTRVQVEHPVTELITGVDIVQEQLRIAAGLPLQYKQKDIQVEGHAFECRINAEDPYNFIPSPGPIESCHLPGGFGIRVDSHIYQGYRIPPYYDSLIGKICVHGKTREQAMAKMRVALAELAVTGIKTNTPLHRDLFADAGFQKGGVSIHYLEHWLEDRKAKQDK

SEQ ID NO: 31032 - protein, 397 aa, Neisseria meningitidis; identical to SEQ ID NO: 5952

SEQ ID NO: 31033 - protein, 55 aa, Neisseria meningitidis; identical to SEQ ID NO: 13928

SEQ ID NO: 31034 - protein, 211 aa, Neisseria meningitidis
LNIKYSGIENRFETAILKKNGVRYGFVSFAPNLAAVKLNDYAKVRKLITKTKQKADIVIVMFHGGAEGKQAEHLPFDTEIFYGENRGNVVEFARLAVDSGADVVFGQGPHVTRAVELYRDRFISYSGGNFATYGAINTSGISGIAPIFKIITDKQGRFVSGNIIPITQIGDKIPKIDPEKTVIGRIIYLNRSDFPKGNGLDVSPDGSITRR

SEQ ID NO: 31035 - protein, 436 aa, Neisseria meningitidis; identical to SEQ ID NO: 21183

SEQ ID NO: 31036 - protein, 200 aa, Neisseria meningitidis; identical to SEQ ID NO: 4060

SEQ ID NO: 31037 - protein, 211 aa, Neisseria meningitidis
MIVSIDVDAQKTFTPLCPKELPVNEGHLIVEELNAQAALADLRVMTKDAHHMVAKWLVDNPVDMLKPTGLPDADLTWVAHAMVGTRGYELLDGLPSAKEYDYCVWKGVDPELHPYGACFHDIEEKLSTGLIEWLRCQNTDTVIIGGLATDYCVKTTVLQLLKGGRWQVVVNEAACRGIAPETIETAWQEMHSAGAIILKNADEINKYINNQ

SEQ ID NO: 31038 - protein, 360 aa, Neisseria meningitidis
MFLWLAHFSNWLTGLNIFQYTTFRAVMAALTALAFSLMFGPWTIRRLTALKCGQAVRTDGPQTHLVKNGTPTMGGSLILTAITVSTLLWGNWANPYIWILLGVLLATGALGFYDDWRKVVYKDPNGVSAKFKMVWQSSVAIIAGLALFYLAANSANNILIVPFFKQIALPLGVVGFLVLSYLTIVGTSNAVNLTDGLDGLATFPVVLVAAGLAIFAYASGHSQFAQYLQLPYVAGANEVVIFCTAMCGACLGFLWFNAYPAQVFMGDVGALALGAALGTVSVIVRQEFVLVIMGGLFVVEAVSVMLQVGWYKKTKKRIFLMAPIHHHYEQKGWKETQVVVRFWIITIVLVLIGLSTLKIR

SEQ ID NO: 31039 - protein, 371 aa, Neisseria meningitidis
MKVGFVGWRGMVGSVLMQRMKEENDFAHIPEAFFFTTSNVGGAAPDFGQAAKTLLDANNVAELAKMDIIVTCQGGDYTKSVFQALRDSGWNGYWIDAASSLRMKDDAIIVLDPVNRNVIDNGLKNGVKNYIGGNCTVSLMLMALGGLFQNDLVEWATSMTYQAASGAGAKNMRELISGMGTIHAQVADELADPSSAILDIDRKVSDFLRSEDYPKANFGVPLAGSLIPWIDVDLGNGQSKEEWKGGVETNKILGRSDNPTVIDGLCVRIGSMRCHSQAITLKLKKDLPVSEIETILAGTNDWVKVIPNEKEASIHELTPAKVTGTLSVPVGRIRKLGMGGEYISAFTVGDQLLWGAAEPLRRVLRIVLGSL

SEQ ID NO: 31040 - protein, 231 aa, Neisseria meningitidis
MKAMILAAGRGERMRPLTDTTPKPLLDVAGKPLIGWHLCRLKQAGFTEIVINHAWLGRQIEEALGDGSAYGVNIAYSPEPEGGLETAGGIARALPLLGGQPFLVVNGDVLTDIDFTAAFQTASSLPEHISAHLWLVENPPHNPDGDFSLLPDGSVQSEVSGGNGLTFSGVGIYRPEMFDGIEAGSVAKLAPVLRGEMRQNRVSGQKHTGLWLDVGTVCRLKEAQALAGAWK

SEQ ID NO: 31041 - protein, 205 aa, Neisseria meningitidis
MSAYRKGNIFIISAASGTGKTTLVSRLLANHNGLRVSVSHTTRPPREGEANGVHYHFVSKEEFESLIAQEAFLEYADVFGNYYGTSAEGVNALAAAGYDVILEIDVQGAAQVRDALPEAVGIFILPPSFDVLAARLNGRGTDSREVIQRRLAKARHEIEQSVLFDFVVVNDDLARAEEDLVHIVNACRLKRSRQLGFIADLLENS

SEQ ID NO: 31042 - protein, 330 aa, Neisseria meningitidis
MKQKIFVLYTGGTIGMTQSSEGLRPDTALVGQALAPFSNGMDFDWHVCGPLIDSSAVQLQNWCAWLDIIAAALPQYDGVLVLHGTDTLAYTANLFALALQGLDKPIVLTGSQWPYNAVGSDAPRNLATAVAAFPLGLKQTLIAFDGKLYPAVGSSKVSTETAAGFDNPHFGALAEWDETQGWHNVRIPNQDAADVSDGLKIHYPDPQAKIAVRTLIPGFAVQELADGLGQLPAQALILQSYGHGNTPADEGFIRAVQDFTQQGRLLLNISQVRQGKTAAVYAQGNAFRNSGIINGGKCNFETATALMTLAVSQGWGKEEVEKELVRLQLL

SEQ ID NO: 31043 - protein, 861 aa, Neisseria meningitidis
MLEAYRKAAAERAALGIPALPLNAQQTADLVELLKSPPAGEGEFLIELLAHRVPPGVDDAAKVKASFLAAVAEGSASSPLISPEYATELLGTMLGGYNIHALIELLDDDKLAPIAAKGLKHTLLMFDSFHDVQEKAEKGNKYAQEVLQSWADAEWFASRAKVPEKITVTVFKVDGETNTDDLSPAPDAWSRPDIPLHALAMLKNPRDGITPDKPGEVGPIKLLEELKAKGHPVAYVGDVVGTGSSRKSATNSVIWHTGEDIPFVPNKRFGGVCLGGKIAPIFFNTQEDSGALPIEVDVSALKMGDVVDILPYEGKIVKNGETVAEFELKSQVLLDEVQAGGRINLIIGRGLTAKAREALKLPASTAFRLPQAPAESKAGFTLAQKMVGRACGLPEGQGVRPGTYCEPRMTTVGSQDTTGPMTRDELKDLACLGFSADMVMQSFCHTAAYPKPVDVKTHKELPAFISTRGGVSLRPGDGVIHSWLNRLLLPDTVGTGGDSHTRFPIGISFPAGSGLVAFAAATGVMPLDMPESVLVRFSGKLQPGVTLRDLVNAIPLYAIKQGLLTVAKAGKKNIFSGRILEIEGLPDLKVEQAFELTDASAERSAAGCTVKLNKEPIIEYMKSNVVLMKNMIANGYQDPRTLERRIKAMEKWLANPELLEADKDAEYAAVIEINMDDIKEPIIACPNDPDDVCFMSERSGTKIDEVFIGSCMTNIGHFRAASKLLEGKADTPVRLWIAPPTKMDAKQLSDEGHYGVLGRAGARMEMPGCSLCMGNQAQVREGATVMSTSTRNFPNRLGKNTFVYLGSAELAAICSKLGKIPTVEEYQANIGIINEQGDKIYRYMNFNEIDSYNEVAETVNV

SEQ ID NO: 31044 - protein, 98 aa, Neisseria meningitidis
  misc_feature 2, 3, 4: 'Xaa' is any amino acid
VXXXKFGVSEEQIAAGRADAAFQRLMAYECRRAFRMLKAGSPLARELNGRIGLELRMIVLGAQLILQKLDACRYDVFAQRPVLDKKDWLIMLKKALWK

SEQ ID NO: 31045 - protein, 164 aa, Neisseria meningitidis
MKKTLLAIIAVSALSACRQAEEGPPPLPRQISDRSVGHYCSMNLTEHNGPKAQIFLNGKPDQPVWFSTIKQMFGYTKLPEEPKGIRVIYVTDMGNVTDWTNPNADTEWMDAKKAFYVIDSGFIGGMGAEDALPFGNKEQAEKFAKDKGGKVVGFDDMPDTYIFK

SEQ ID NO: 31046 - protein, 205 aa, Neisseria meningitidis
MPYTEDMRPGDTANPYGASKAMVERMLTDIQKADPRWSVILLRYFNPIGAHESGLIGEQPNGIPNNLLPYICQVASGRLPQLSVFGGDYPTPDGTGMRDYIHVMDLAEGHIAAMKAKGGVAGVHLFNLGSGRAYSVLEIIRAFEAASGLTIPFEIKPRRAGDWACSFADPSHTKQQTGWETKRGLQQMMEDSWRWVSRNPNGYGD

SEQ ID NO: 31047 - protein, 90 aa, Neisseria meningitidis
MKKTGKYLIYAAAFTAFCFAFQENRSEAKQPDITLSASLCEKFNILNAKDMDAEQVSLSKECDIIESSHDWEKEYGNLNEQEMLAGIVYE

SEQ ID NO: 31048 - protein, 242 aa, Neisseria meningitidis; identical to SEQ ID NO: 6039

SEQ ID NO: 31049 - protein, 222 aa, Neisseria meningitidis
LVRTADGYKAIAHIQAGDRVLSKDEASGETGYKPVTAQYGNPYRETVYIEISDGIGNSQTLISNRIHPFYSQGKWIQAGRLKKGDTLLSESGAKQTVQNITLKQQPLKAYNLTVADWHTYFVKGNQAETEGVWVHNACPPKRAPEYHAGTVSESNFLNAAEKWLGENYKSYPNGRYVSQDGMRQVRYGHHETNSSTHHGHFESYDKPNGRVIENSAVTIIRD

SEQ ID NO: 31050 - protein, 105 aa, Neisseria meningitidis
MVIIDRILTEAFAEDISIRTAAALQVIIACTADQSVVTVFAVQMIIAFATIQYIVTIIAVQGVVAFSSIERIIAIATVDTVVACITIQQVIPVGTVQIVIAQSAI

SEQ ID NO: 31051 - protein, 208 aa, Neisseria meningitidis; identical to SEQ ID NO: 3160

SEQ ID NO: 31052 - protein, 311 aa, Neisseria meningitidis; identical to SEQ ID NO: 9342

SEQ ID NO: 31053 - protein, 149 aa, Neisseria meningitidis; identical to SEQ ID NO: 14161

SEQ ID NO: 31054 - protein, 210 aa, Neisseria meningitidis; identical to SEQ ID NO: 48

SEQ ID NO: 31055 - protein, 156 aa, Neisseria meningitidis; identical to SEQ ID NO: 681

SEQ ID NO: 31056 - protein, 173 aa, Neisseria meningitidis
MSCFSIKRMSAFRARITAFFAAFVFLTAALPAYAERLPDFLAKIQPSEIVPGADRYSKPEGKPMVARVYKGDEQLGLVYITTDAVNTRGYSSKPIDTLMALAKDGTIAGAKLVDHHESIMLIGIPHLPAPGRAIRSNWLPAYIKPNFTSTNRLRLKGLPTVLQPSKETGAGVP

SEQ ID NO: 31057 - protein, 545 aa, Neisseria meningitidis
MDFKRLTAFFAIALVIMIGWEKMFPTPKPVPAPQQATQQQAVTASAEAALAPATPITVTTDTVQAVIDEKSGDLRQLTLLQYKATGDEHKPFVLFNDGKEYTYVAQSELLDAQGNNILKGIGFSAPKKQYSLEGDKVEVRLSAPETRGLKIDKVYTFTKGSYLVNVRFDIANGSGQTANLSADYRIVRDHSEPEGQGYFTHSYVGPVVYTPEGNFQKVSFSDLDDDAKSGKSEAEYIRKTPTGWLGMIEHHFMSTWILQPKGGQSVCAAGDCRIDIKRRNDKLYSTSVSVPLAAIQNGAKSEASINLYAGPQTTSVIANIADNLQLAKDYGKVHWFASPLFWLLNQLHNIIGNWGWAIVVLTIIVKAVLYPLTNASYRSMAKMRAAAPKLQAIKEKYGDDRMAQQQAMMQLYKDEKINPLGGCLPMLLQIPVFIGLYWALFASVELRQAPWLGWITDLSRSDPYYILPIIMAATMFAQTYLNPPPTDPMQAKMMKIMPLVFSVMFFFFPAGLVLYWVVNNLLTIAQQWHINRSIEKQRTQGEVVS

SEQ ID NO: 31058 - protein, 273 aa, Neisseria meningitidis; identical to SEQ ID NO: 7095

SEQ ID NO: 31059 - protein, 304 aa, Neisseria meningitidis
MQNFGKVAVLMGGFSSEREISLDSGTAILNALKSKGIDAYAFDPKETPLSELKAQGFQTAFNILHGTYGEDGAVQGALELLGIPYTGSGVAASAIGMDKYRCKLIWQALGLPVPEFAVLHDDTDFDAVEEKLGLPMFVKPAAEGSSVGVVKVKGKGRLKSVYEELKHLQGEIIAERFIGGGEYSCPVLNGKGLPGIHIIPATEFYDYEAKYNRDDTIYQCPSEDLTEAEESLMRELAVRGAQAIGAESCVRVDFLKDTDGKLYLLEINTLPGMTSHSLVPKSAAVTGVGFADLCIEILKTAHVG

SEQ ID NO: 31060 - protein, 152 aa, Neisseria meningitidis; identical to SEQ ID NO: 6877

SEQ ID NO: 31061 - protein, 89 aa, Neisseria meningitidis; identical to SEQ ID NO: 4489

SEQ ID NO: 31062 - protein, 305 aa, Neisseria meningitidis
MSIIHYLSLHVESARTALKQLLRQPFGTLLTLIMLAVAMTLPLFMYLGIQSGQSVLGKLNESPQITVYMETAAAQSDSDTVRSLLARDKRLDNIRFIGKEDGLEELQSNLDQNLISMLDGNPLPDVFIVTPDPATTPAQMQAIYRDITKLPMVESANMDTEWVQTLYQINEFIRKILWFLSLTLGMAFVLVAHNTIRLQILSRKEEIEITKLLGAPASFIRRPFLYQAMWQSILSAAVSLGLCGWLLSAVRPLVDAIFKPYGLNIGWRFFYAGELGLVFGFVIALGVFGAWLATTQHLLGFKAKK

SEQ ID NO: 31063 - protein, 423 aa, Neisseria meningitidis
MKLLVIGNGGREHALAWKLAQSPKVETVFVASGNAGTAIEPKLQNIDLTAHQDLIEFCRKENIVFTVVGPEAPLAAGVVDDFRAAGLKIFGPTQYAAQLESSKDFAKAFMAKYNIPTAQYQTFENADAAHDYVNQKGAPIVIKADGLAAGKGVIVAMTLDEAHAAIDDMLLDNKMGNASARIVIEDFLQGEEASFIVMVDGNNVLPMATSQDHKRLLDGDKGLNTGGMGAYSPAPVVTPVVYERAMNEIILPTVAGMKAEGHEFTGFLYAGLMIDQSGAPHTIEFNCRFGDPETQPIMSRLNSDLSDLVEAAIDGKLDSVTAEWSPQTAVGVVLAAQNYPETPKKGDVISGLDAANQVGKVFHAGTTANEKGDVLTNGGRVLCVVGLGDNVAQAKAKAYGALEKISFDGMQYRKDIADKAINR

SEQ ID NO: 31064 - protein, 457 aa, Neisseria meningitidis; identical to SEQ ID NO: 7200

SEQ ID NO: 31065 - protein, 230 aa, Neisseria meningitidis; identical to SEQ ID NO: 1058

SEQ ID NO: 31066 - protein, 262 aa, Neisseria meningitidis; identical to SEQ ID NO: 5957

SEQ ID NO: 31067 - protein, 57 aa, Neisseria meningitidis
MSFGRRNTDWQAWGQHRRRATKFMVKRNREQEVAEYQAQFEDKDGKGRLKTEGNKDE

SEQ ID NO: 31068 - protein, 812 aa, Neisseria meningitidis
MTEKSHKKTAKGRAGSPSPTSARNKKADNGARGNKVSERLKAVKELQKTETKKARPEHVVNLIGDALWLMGLAATLYLAISLISFDMGDPSWSHSSPVVEDVANWGGLFGAYVADVGYYLFGWSFWWWIAAACVMLYKNFRLHAKQTENEAYNHKIAAAALFVLTVFSPVLEYFVLGGKYADSLPVGAGGMVGIRVGAVFAWLLGKSGSLLIILVVLLLSLSLLVQISWLEFLNGAGRAVQNRLSALSGKVMALGKRRPNTKTDGVDTQNTRRMVKEAKNITAKPVALPEGSSSNRKSVAVSVAPPPKIQVSLFEDDEPRQAGEYHKPTLNLLRIPDSEPVSINPAELERTAELIESKLAEFGIGVQVVSATSGPVITRYEIEPAQGVKGSQIVALSKDLARSMSLQSVRIVETIAGKNTMGIELPNDKRQDVMLSEILFSPVFAGAKSKLTVALGKDIAGTPVVGDLAKMPHLLVAGMTGSGKSVGVNGMIMSMLFKATPDEVRFIMIDPKMLELSIYDGIPHLLCPVVTDMREAGQALNWCVAEMEKRYRLLSHAGVRNLEGFNQKVEAAKAAGKPLLNPFSLNPDNPEPLEKLPMIVVVIDELADLMMTERKAVEQQIARLAQKARAAGIHMIVATQRPSVDVVTGLIKANIPTRMAFTVQSKIDSRTILDQMGADELLKYGDSLFLQPGSAEPTRLQGAFVSDDEVHQVVNYVKSQAPADYIEGLLSGEAALETANIVNPNADSDELFDQAVAYVLESKKTSISSLQRQLRIGYNRAANLMEALENAGVVSPTDLNGSRKILAHKDHL

SEQ ID NO: 31069 - protein, 398 aa, Neisseria meningitidis
MPSEPFRRHNATNTLISITQDDTMTHIKPVIAALALIGLAACSGSKTEQPKLDYQSRSHRLIKLEVPPDLNNPDQGNLYRLPAGSGAVRASDLEKRRTPAVQQPADAEVLKSVKGIRLEREGSQRWLVVDGKSPAEIWPLLKAFWQENGFDIKSEEPAIGQMETEWAENRAKIPQDSLRRLFDTVGLGGIYSTGERDKFIVRIEQGKNGVSDIFFAHKAMKEVYGDKNKDTTMWQPSASDPNLEAAFLTRFMQYLGVDGQQAENALAKKPILPAANEMARIEGKSLIVFGDYGRNWRRTALALDRIGLTVVGQNTERHAFLVQKAPNESNAVTEQKPGLFKRLLGKGKAEKPAEQPELIVYAEPVANGSRIVLLNKDGSAYAGKDASALLGKLHSELR

SEQ ID NO: 31070 - protein, 337 aa, Neisseria meningitidis; identical to SEQ ID NO: 24761

SEQ ID NO: 31071 - protein, 417 aa, Neisseria meningitidis; identical to SEQ ID NO: 9265

SEQ ID NO: 31072 - protein, 447 aa, Neisseria meningitidis
MIKIKKGLNLPIAGRPEQVIYDGPVITEVALLGEEYAGMRPSMKVKEGDAVKKGQVLFEDKKNPGVVFTAPASGKIAVIHRGEKRVLQSVVIAVEGNDEIEFERYAPDALADLSGEEVRRNLIQSGLWTALRTRPFSKIPAVDAEPSAIFVNAMDTNPLAADPVVVIKEAAEDFKLGLLVLSRLTERKIHVCKAAGVDVPSENAANIETHEFGGPHPAGLSGTHIHFIEPVGANKTVWTINYQDVIAIGRLFATGRLNTERVIALGGSQVNKPRLLRTVLGAKVSQITAGELVDADNRVISGSVLNGAIAQGAHDYLGRYHNQISVIEEGRSKELFGWVAPQPDKYSITRTTLGHFLKNKLFKFTTAVNGGDRAMVPIGTYERVMPLDILPTLLLRDLIVGDTDSAQALGCLELDEEDLALCSFVCPGKYEYGPLLRKVLETIEKEG

SEQ ID NO: 31073 - protein, 84 aa, Neisseria meningitidis; identical to SEQ ID NO: 3171

SEQ ID NO: 31074 - protein, 859 aa, Neisseria meningitidis
MRYDKLTAKFQQALAEAQSLALAADGSYLEAGFVLKALLDDQNSGAAALLAHSGVNVPQVKQRLQQHLNSLPKVSGQGGDILPSRELQAVLNLMDKAATKRGDAYIASELFLLALVQQNDAAGKILKEAGATEQNINAAIDAVRGGQNVNDANAEDQRDALKKYTLDLTQRARDGKLDPVIGRDDEIRRAIQVLQRRTKNNPVLIGEPGVGKTAIVEGLAQRIVNGEVPESLRNKRLLVLDLAALIAGAKYRGEFEERLKGVLNDLAKDDGNTLIFIDEIHTLVGAGKTDGAMDAGNMLKPALARGELHCIGATTLDEYRQYIEKDAALERRFQKVLVGEPSVEDTIAILRGLQERYEIHHGIDITDPAIVAAAELSDRYITDRFLPDKAIDLIDEAASRVKMEKETKPEAMDKIDRRLIQLRMEKAHVEKEKDDASKKRLELIDEEINGLQKEYADLDEIWKAEKAISDGAANIKKQIDEVKIKIEQAKRQGDLALASKLMYEDLEHLEKQRAAAERADTDSTKPANKLLRNNVGAEEIAEVVSRMTGIPVSKMMEGERDKLLKMEEVLHRRVVGQDEAVRAVSDAIRRSRSGLADPNKPYGSFLFLGPTGVGKTELCKALAGFLFDSEDHLIRIDMSEYMEKHAVARLIGAPPGYVGYEEGSYLTEQVRRKPYSVILLDEVEKAHPDVFNILLQVLDDGRLTDGQGRTVDFKNTVIVMTSNIGSQHIQQMGIQDYEAVKEVVMEDVKEHFRPEMINRIDEVVVFHGLDQDNIRNIAKIQLKGLEKRLEKQNLRLTVSDAALDIIAKAGFDPIYGARPLKRAIQSEIENPLAKALLAGNYAPESEIRVEADGDRLKFA

SEQ ID NO: 31075 - protein, 99 aa, Neisseria meningitidis
MTASMYILLVLALIFANAPFLTTRLFGIVPLKRKHFGHHLIELAAGFALTAVLAYILESRVGAVHNQGWEFYATVVCLYLIFAFPCFVWRYFWHTRNRE

SEQ ID NO: 31076 - protein, 113 aa, Neisseria meningitidis; identical to SEQ ID NO: 3580

SEQ ID NO: 31077 - protein, 268 aa, Neisseria meningitidis; identical to SEQ ID NO: 28554

SEQ ID NO: 31078 - protein, 293 aa, Neisseria meningitidis; identical to SEQ ID NO: 9178

SEQ ID NO: 31079 - protein, 252 aa, Neisseria meningitidis
MGDSVIYYVEQADEPVNRAGERARKTFKYFWRELFWERRRIIPALDFAMVKAPFFQDGEDGEICEHMWIDDIYFDGLYIYGVLNNEPGELTNVEQGESICVPVDDISDWMFVCNGIPYGGFTVQAMRGQMTEEERTEHDAAWGIDFGDPGQILLVYEEKEHPENLEEHPMCRNCIDDFRQQLSQNSDYLREQDEDGYTPLHHEAIAGNALMVQAMLEYGANPASTTSEGYTALDFACLTGWQNVADLLEPRH

SEQ ID NO: 31080 - protein, 374 aa, Neisseria meningitidis
MLKKWLNKILPSGRSSKKAESKTVIPAERHNIRAEMLSFAAENVIRRLKGARFQAYVVGGAIRDLLLGIEPKDFDVATDATPEQVHKLFRRSRIIGRRFQIVHVMNGAEIIEVTTFRGGAKVHQNAHGRIMKDNTYGSIEEDAMRRDFTCNALYYDPEKEEILDFHNGIADVAARRLVMIGDAAERYQEDPVRILRAIRLSGKLGFDLSEETAAPIAESICRLKHEPVARLFDEIMKLLFSGHARECLKRLNGFDIPDDIHPLLNALRVSDGIAGKMTVLALKNTDERLRADKSVSVGFVLAALMWPELERHWKSNLQQGLKPAPALSDAINTMRETVERGWGVPQRFSATMREIWMFQPQFENRKGARPRSLR

SEQ ID NO: 31081 - protein, 887 aa, Neisseria meningitidis
MSTQLHDVDPIETQEWLDALSSVLEYEGGERAQYLLENLVKYCRDKGVRMPHGTTTPYLNTVSVENEKGIPGDQNIEHRIRAFVRWNAAAIVLRAGKKDLELGGHIASFQSAATMYEVGFNHFWKAKGEGEEGDLVFFQGHVAPGIYARAFVEGRLTEDQLNNFRQEVDGHGLPSYPHPHLLPDFWQFPTVSMGLGPIMAIYQARFLKYLESRGLAKTKGRKVWCFCGDGEMDEPESQGAIALAAREGLDNLIFVINCNLQRLDGPVRGNGKIIQELEGNFAGAGWNVVKVIWGRRWDRLLAKDKDGILRQRMEECLDGDYQTYKSKDGAYVREHFFNTPELKALVADMTDEQLWALNRGGHDPQKVYNAYDRAANHADGKPTVILAKTIKGYGMGASGEGQNVAHQAKKMDKASLKQFRDRFDIPVTDEQIESGDLPYLTFAPDTEEYKYLHARRDALGGYLPQRKPTQEVLEVPELSAFDAQLKSSGEREFSTTMAFVRILSTLLKDKKIGKRVVPIVPDESRTFGMEGMFRQYGIWNPKGQQYTPQDKDQLMFYKESVDGQILQEGINEPGAMADWIAAATSYANSNFAMIPFYIYYSMFGFQRIGDLAWAAGDMHARGFLLGGTAGRTTLNGEGLQHEDGHSHIQADLIPNCVSYDPTFQYEVAVIVQDGLRRMYANNEDVFYYITLMNENYTHPDMPEGAEQDILKGMYLLKAGGKGDKKVQLMGSGTILQEVIAGAELLKADFGVEADIWSCPSFNLLHRDAVEVERFNRLHPLEAEKVPFVTSQLQGHDGPVIAATDYIRSYADRIRAYIPNDYHVLGTDGFGRSDSRANLRRFFEVDRYNVAVAALSALAEQGKVSKETVQQAIEKYGIKADSAPSWKR

SEQ ID NO: 31082 - protein, 194 aa, Neisseria meningitidis
MISRLTGKLVEKNPPQIIIDVNGVGYEADVSMQTFYNLPPVGESVQLFTQLIIREDAHLLFGFATAEERKTFRQLIKVSGIGAKTALGILSAMTADELAQAVAEEDVKRLSSAPGIGKKTAERMVLELRGKLVAHAVTDGLFAAAPAADETEDIVGTLLALGYSEREAKAAVKGVPKGTDVGEGVRLALKNLLK

SEQ ID NO: 31083 - protein, 165 aa, Neisseria meningitidis; identical to SEQ ID NO: 3132

SEQ ID NO: 31084 - protein, 321 aa, Neisseria meningitidis; identical to SEQ ID NO: 4435

SEQ ID NO: 31085 - protein, 60 aa, Neisseria meningitidis; identical to SEQ ID NO: 4635

SEQ ID NO: 31086 - protein, 798 aa, Neisseria meningitidis
MIKKILTTCFGLVFGFCVFGVGLVAIAILVTYPKLPSLDSLQHYQPKMPLTIYSADGEVIGMYGEQRREFTKIGDFPEVLRNAVIAAEDKRFYRHWGVDVWGVARAAVGNVVSGSVQSGASTITQQVAKNFYLSSEKTFTRKFNEVLLAYKIEQSLSKDKILELYFNQIYLGQRAYGFASAAQIYFNKNVRDLTLAEAAMLAGLPKAPSAYNPIVNPERAKLRQKYILNNMLEEKMITVQQRDQALNEELHYERFVRKIDQSALYVAEMVRQELYEKYGEDAYTQGFKVYTTVRANHQKVATEALRKALRNFDRGSSYRGAENYIDLSKSEDVEETVSQYLSGLYTVDKMVPAVVLDVTKKKNVVIQLPGGRRVTLDRRALGFAARAVNNEKMGEDRIRRGAVIRVKNNGGRWAVVQEPLLQGALVSLDAKTGAVRALVGGYDFHSKTFNRAVQAMRQPGSTFKPFVYSAALSKGMTASTVVNDAPISLPGKGPNGSVWTPKNSDGRYSGYITLRQALTASKNMVSIRILMSIGVGYAQQYIRRFGFRSSELPASLSMALGTGETTPLKVAEAYSVFANGGYRVSSHVIDKIYDRDGRLRAQMQPLVAGQNAPQAIDPRNAYIMYKIMQDVVRVGTARGAAALGRTDIAGKTGTTNDNKDAWFVGFNPDVVTAVYIGFDKPKSMGRVGYGGTIAVPVWVDYMRFALKGKQGKGMKMPEGVVSSNGEYYMKERMVTDPGLTLDNSGIAPQPSRRAKEDDGGAAEGGRQAADDEVRQDMQETPVLPSNTGSKQQQLDSLF

SEQ ID NO: 31087 - protein, 768 aa, Neisseria meningitidis
MAKNLLIVESPSKAKTLKKYLGGDFEILASYGHVRDLVPKSGAVDPDNGFAMKYQLISRNGKHVDAIVAGAKEAENIYLATDPDREGEAISWHLLEILKSKRGLKNIKPQRVVFHEITKNAVLDAVAHPREIEMDLVDAQQARRALDYLVGFNLSPLLWKKIRRGLSAGRVQSPALRLICERENEIRAFEAQEYWTVHLDSHKGRSKFTAKLAQYNGAKLEQFDLPNEAAQADVLKELEGKEAVVTAIEKKKRSRNPAAPFTTSTMQQDAVRKLGFTTDRTMRTAQQLYEGIDVGQGAIGLITYMRTDSVNLADEALTEIRHYIENKIGKEYLPSAAKQYKTKSKNAQEAHEAIRPTSVYRTPESVKPFLSADQFKLYQMIWQRTVACQMTPAKFDQTTVDITVGKGVFRVTGQVQTFAGFLSVYEESSDDEEGEDSKKLPEMSEGDKLPVDKLYGEQHFTTPPPRYNEATLVKALEEYGIGRPSTYASIISTLKDREYVTLEQKRFMPTDTGDIVNKFLTEHFAQYVDYHFTAKLEDQLDEIAGGKRQWIPVMDKFWKPFIKQVEEKEGIERAKFTTQELDETCPKCGEHKLQIKFGKMGRFVACAGYPECSYTRNVNETAEEAAERIAKAEAEQAELDGRECPKCGGRLVYKYSRTGSKFIGCANYPKCKHVEPLEKPKDTGVQCPQCKKGNLVERKSRYGKLFYSCSTYPDCNYATWNPPVAEECPNCHWPVLTIKTTKRWGVEKVCPQKECGWKEQIEPPAPKE

SEQ ID NO: 31088 - protein, 334 aa, Neisseria meningitidis
MQRQIKLKNWLQTVYPERDFDLTFAAADADFRRYFRATFSDGSSVVCMDAPPDKMSVAPYLKVQKLFDMVNVPQVLHADTDLGFVVLNDLGNTTFLTAMLQEQGETAHKALLLEAIGELVELQKASREGVLPEYDRETMLREINLFPEWFVAKELGRELTFKQRQLWQQTVDTLLPPLLAQPKVYVHRDFIVRNLMLTRGRPGVLDFQDALYGPISYDLVSLLRDAFIEWEEEFVLDLVIRYWEKARAAGLPVPEAFDKFYRWFEWMGVQRHLKVAGIFARLYYRDGKDKYRPEIPRFLNYLRRVSRRYAELAPLYALLVELVGDEELETGFTF

SEQ ID NO: 31089 - protein, 260 aa, Neisseria meningitidis
LQKVVRHIAQTEIMPRFLNTPSHRKEDGSMLSEADIAAQTAFAAALPLLIDCPMLGEEMSRQEQSALWEQYSGEKGLWIVDPIDGTNNFVNGLPHFAVSVAFVRNGRAELGVIYNPVSGECFYAERGQGAFLNGTRLPLRLVDKKLNEAIAGVEIKYLRSGKLSSRMSTLAPFGTIRSMGSSTLDWCYLACGRYDVYVHGGQKLWDYAAGALIFEEAGGRLTTLEGDGFWSGEHVFKRSVVAALEPKLFERWVGWIRENQ

SEQ ID NO: 31090 - protein, 99 aa, Neisseria meningitidis; identical to SEQ ID NO: 7449

SEQ ID NO: 31091 - protein, 307 aa, Neisseria meningitidis
MQYSTLAGQTDNSLVSNNFGFLRLPLNFMPYESHADWVITGVPYDMAVSGRSGARFGPEAIRRASVNLAWEHRRFPWTFDVRERLNIIDCGDLVFSFGDSRDFVEKMEAHAGKLLSSGKRCLSLGGDHFITLPLLRAHARYFGKLALIHFDAHTDTYDNGSEYDHGTMFYTAPKEGLIDPSRSVQIGIRTEHSKKLPFTVLTAPQVNEDSVEETVRKIKETVGNMPVYLTFDIDCLDPSFAPGTGTPVCGGLSSDRALKILRGLTDLDIVGMDVVEVAPSYDQSDITALTGATIALEMLYLQGAKKD

SEQ ID NO: 31092 - protein, 484 aa, Neisseria meningitidis
MSIEPTPPNLENDGIENDVERVSADFDRVHSLCEILEPAFEQIENGTPLEDAPLRDKLTELTVLLSELHPADVAAVLESLPPRERNIVWILVKPEDDGEVLLEVSDAVRETLIESMDKDELLAAVDDLDADELAELADDLPHQVVYEALQTRDEEERAQVKAAMSYEDNQVGAIMDFELVSIRADVACEVVLRYLRRFDSLPDHTDKIFVVDENDVLQGVLPIRKLLVADPEDLVENVMAKDVVRFRAEDDVEEAAQAFERYDLVTAPVVDENKKLIGRVTVDEMVDVIREESEADMLNMAGLQEEEDLFAPVLDSVKNRWMWLAVNLCTAFLASRVIGAFEGSIEKIVALAALMPIVAGIGGNSGNQTITMIVRAMAMGQLTDMQAGRLLKKEVGVALVNGIIWGTVMGAVSWLLYGSLGIGLVMIAAMTLNLLLAATVGVLIPVVMEKFGRDPALGSSVLITAVTDSGGFLIFLGLATLFLL

SEQ ID NO: 31093 - protein, 231 aa, Neisseria meningitidis
MSELILKCEGVGKRYRDGGLDVRVLHGLDLEIRAGESTGIIGSSGSGKSTLLHILGGLDMPSEGRVLLMGEDLRTLNQRRLGDLRNRHLGFVYQFHHLLPEFSALENVMMPLLIGKKSREEAAETAMAMLEKVGLKHRSTHRAGELSGGERQRAAIARALVTQPKCLLADEPTGNLDRANARNVLDMMLELKTELGTGLVVVTHDDELAGRFGRVMVMKDGNLHPKQGANA

SEQ ID NO: 31094 - protein, 314 aa, Neisseria meningitidis; identical to SEQ ID NO: 26522

SEQ ID NO: 31095 - protein, 125 aa, Neisseria meningitidis; identical to SEQ ID NO: 348

SEQ ID NO: 31096 - protein, 257 aa, Neisseria meningitidis; identical to SEQ ID NO: 780

SEQ ID NO: 31097 - protein, 167 aa, Neisseria meningitidis; identical to SEQ ID NO: 189

SEQ ID NO: 31098 - protein, 311 aa, Neisseria meningitidis; identical to SEQ ID NO: 6357

SEQ ID NO: 31099 - protein, 300 aa, Neisseria meningitidis
MDSLMTLLSVLVPMFAGFFIRVPKPYLPALDKVLSVLVYAVLLLIGVSLSRVEDLGSRLDDMALTVLWLFVCTVGTNLLALAVLGKLFPWRIKGKGKGVSVGVSGSVGQLGCVLLGFASGKLMRDIWMPSESAGMYCLMLLVFLIGVQLKSSGVSLRQVLVNRRGIRLSVWFMLSSLSGGLLFAASADGVSWTKGLAMASGFGWYSLSGLVMTEAYGAVWGSIALLNDLARELFALAFIPLLMKRFPDAAVGVGGATSMDFTLPVIRGAGGLEAVPVAVSFGVVVNIAAPFLMVVFSALG

SEQ ID NO: 31100 - protein, 558 aa, Neisseria meningitidis
MLTYTPPDARPPAKTHEKPWLLLLMAFAWLWPGVFSHDLWNPAEPAVYTAVEALAGSPTPLVAHLFGQTDFGIPPVYLWVAAAFKHLLSPWAADPYDAARFAGVFFAVVGLTSCGFAGFNFLGRHHGRSVVLILIGCIGLIPVAHFLNPTAAAFAAAGLVLHGYSLARRRVIAASFLLGTGWTLMSLAAAYPAAFALMLPLPVLMFFRPWQSRRLMLTAVASLAFALPLMTVYPLLLAKTQPALFAQWLDDHVFGTFGGVRHVQTAFSLFYYLKNLLWFALPALPLAVWTLCRTRLFSTDWGILGVVWMLAVLVLLAVNPQRFQDNLVWLLPPLALFGAAQLDSLRRGAAAFVNWFGIMAFGLFAVFLWTGFFAMNYGWPAKLAERAAYFSPYYVPDIDPIPMAVAVLFTPLWLWAITRKNIRGRQAVTNWAAGVTLTWALLMTLFLPWLDAAKSHAPVVRSMEASLSPELKRELSDGIECIDIGGGDLHTRIVWTQYGTLPHRVGDVQCRYRIVRLPQNADAPQGWQTVWQGARPRNKDSKFALIRKIGENILKTTD

SEQ ID NO: 31101 - protein, 441 aa, Neisseria meningitidis
MKKYLFRAALYGIAAAILAACQSKSIQTFPQPDTSVINGPDRPVGIPDPAGTTVGGGGAVYTVVPHLSLPHWAAQDFAKSLQSFRLGCANLKNRQGWQDVCAQAFQTPVHSVQAKQFFERYFTPWQVAGNGSLAGTVTGYYEPVLKGDDRRTAQARFPIYGIPDDFISVPLPAGLRSGKALVRIRQTGKNSGTIDNAGGTHTADLSRFPITARTTAIKGRFEGSRFLPYHTRNQINGGALDGKAPILGYAEDPVELFFMHIQGSGRLKTPSGKYIRIGYADKNEHPYVSIGKYMADKGYLKLGQTSMQGIKSYMRQNPQRLAEVLGQNPSYIFFRELTGSGNDGPVSALGTPLMGEYAGAVDRHYITLGAPLFVATAHPVTRKALNRLIMAQDTGSAIKGAVRVDYFWGYGDEAGELAGKQKTTGYVWQLLPNGMKPEYRP

SEQ ID NO: 31102 - protein, 347 aa, Neisseria meningitidis
MIPATYTLSQITARLGGEWRGEDISVTAVRPLADAQAEHISFLANPKYKAEVHDSSAGAVIVSAKAADGFEGRNLIVADDPYLYFAKVARLFSPVVKARGGIHPTAVVEPSATVPANCEIGANAYIGANTVLGEGCRILANAVVQHDCKLGDEVVLHPNAVVYYGCTLGRRVEIHSGAVIGADGFGLAFAGDSWFKIPQTGAVTLGDDVEIGSNTNIDRGAMSDTTVGNGTKIDNQVQIGHNCKIGSHTVIAAKTGISGSVTIGSYCIIGGGVGTVGHIEIADKTTIGGGTSVTHSITESGKHLAGIFPMSTHKEWARNAVYIHRLSEMNKRLKTLEQQLSDGKDTQ

SEQ ID NO: 31103 - protein, 214 aa, Neisseria meningitidis
MKLKHLLPLLLSAVLSAQAYALTEGEDYLVLDKPIPQEQSGKIEVLEFFGYFCVHCHHFDPLLLKLGKALPSDAYLRTEHVVWQPEMLGLARMAAAVNLSGLKYQANPAVFKAVYEQKIRLENRAVAGKWALSQKGFDGKKLMRAYDSPEAAAAALKMQKLTEQYRIDSTPTVVVGGKYRVIFNNGFDGGVHTIKELVAKVREERKRQPPAVQK

SEQ ID NO: 31104 - protein, 587 aa, Neisseria meningitidis
MGFPVRKFDAVIVGGGGAGLRAALQLSKSGLNCAVLSKVFPTRSHTVAAQGGISASLGNVQEDRWDWHMYDTVKGSDWLGDQDAIEFMCRAAPEAVIELEHMGMPFDRVESGKIYQRPFGGHTAEHGKRAVERACAVADRTGHAMLHTLYQQNVRANTQFFVEWTAQDLIRDENGDVVGVTAMEMETGEVYIFHAKAVMFATGGGGRIYASSTNAYMNTGDGLGICARAGIPLEDMEFWQFHPTGVAGAGVLITEGVRGEGGILLNADGERFMERYAPTVKDLASRDVVSRAMAMEIYEGRGCGKNKDHVLLKIDHIGAEKIMEKLPGIREISIQFAGIDPIKDPIPVVPTTHYMMGGIPTNYHGEVVVPQGDEYEVPVKGLYAAGECACASVHGANRLGTNSLLDLVVFGKAAGDSMIKFIKEQSDWKPLPANAGELTRQRIERLDNQTDGENVDALRRELQRSVQLHAGVFRTDEILSKGVREVMAIAERVKRTEIKDKSKVWNTARIEALELDNLIEVAKATLVSAEARKESRGAHASDDHPERDDENWMKHTLYHSDANTLSYKPVHTKPLSVEYIKPAKRVY

SEQ ID NO: 31105 - protein, 184 aa, Neisseria meningitidis; identical to SEQ ID NO: 4537

SEQ ID NO: 31106 - protein, 76 aa, Neisseria meningitidis; identical to SEQ ID NO: 8288

SEQ ID NO: 31107 - protein, 304 aa, Neisseria meningitidis; identical to SEQ ID NO: 3139

SEQ ID NO: 31108 - protein, 67 aa, Neisseria meningitidis
MPSEACLVFRRHFLRLKQRIGNPALPVHGNLHLKTICIPNHTPIPISVICTLPVLGNHRFFAYNSRI

SEQ ID NO: 31109 - protein, 321 aa, Neisseria meningitidis
MNLNKLKNKLFRRPGQRVVIAVPYIWLLVLFLIPFAIVLKISFAEQEISIPPFTPLISIDEDLGRLNIAISYQNYADIFQNFWHTLNPFGDSENSNIYLMTYWSSIKTALMTTVICLLVGYPTAYAISRANPSVRNGLLLAIMLPFWTSFLLRVYAWMGLLGHNGIVNNLLIKMGIISEPLDLFYNAFSLNLVMVYAYLPFMILPLYTQLVKLDNRLLEAASDLGAGPVKSFLTITLPLSKTGIIAGSMLVFVPAVGEFVIPELVGGSENLMIGKVLWQAFFDQNNWPLASAVAVVMVALLVVPIALFQHYENRELEEGAK

SEQ ID NO: 31110 - protein, 259 aa, Neisseria meningitidis; identical to SEQ ID NO: 7119

SEQ ID NO: 31111 - protein, 311 aa, Neisseria meningitidis
MGHNMMTTQKWYEHITNVIIGNTANFNSGCPEAIDYVDERKGVPLAAMRHILMYTEAAASHAYLFEHDLNKFKQYAYVAGKLGILRSVNSTDPEPFFFPCDMLNIQDPMFLMLMSDSPQLREFLVRNIDNIANDTEAFVNRYDLNRHMIYNTLLMVEGKQLDRLKQRSEKVLAHPTPSKWLQKRLYDYRFFLAFAEQDAEAMKAALEPLFDKKTARMAAKETLSYFDFYLQPQIVTYAKIASMHGFDLGIDHEIAPRDLIVYDPLPADEYQDIFDFMKQYDLSYPYEYLQDWIDYYTFKTDKLVFGNAKRE

SEQ ID NO: 31112 - protein, 758 aa, Neisseria meningitidis; identical to SEQ ID NO: 13907

SEQ ID NO: 31113 - protein, 268 aa, Neisseria meningitidis
MWHWDIILILLAVGSAAGFIAGLFGVGGGTLIVPVVLWVLDLQGLAQHPYAQHLAVGTSFAVMVFTAFSSMLGQHKKQAVDWKTVFAMMPGMIFGVFAGALSAKYIPAFGLQIFFILFLTAVAFKTLHTGPQTASRPLPGLPGLTAVSTLFGAMSSWVGIGGGSLSVPFLIHCGFPAHKAIGTSSGLAWPIALSGAISYLLNGLNIAGLPEGSLGFLYLPAVAVLSAATIAFAPLGVKTAHKLSSAKLKKSFGIMLLLIAGKMLYNLL

SEQ ID NO: 31114 - protein, 221 aa, Neisseria meningitidis
MDSWFEDTAMGRYVAKLEQDFFGRYLDSYRFSGMCAVQVGGPWLSLSEDVVCVPRDMSMSAENMALADVSADMLLFPHTLEGGVPSQILSEAHRILKPSGRLMLTGFNPYSLWGFSRWFDGERLPEKRFCLPLPELKRQLADVGFDIEFGKFMVYLPPVSSLGQIRFWRFMEKAGDRWWPQCAAVYGLVLVKRAAGVTPLPEWDGYLGGKALAAGAARVAD

SEQ ID NO: 31115 - protein, 322 aa, Neisseria meningitidis; identical to SEQ ID NO: 4958

SEQ ID NO: 31116 - protein, 92 aa, Neisseria meningitidis; identical to SEQ ID NO: 600

SEQ ID NO: 31117 - protein, 374 aa, Neisseria meningitidis; identical to SEQ ID NO: 25378

SEQ ID NO: 31118 - protein, 672 aa, Neisseria meningitidis; identical to SEQ ID NO: 26284

SEQ ID NO: 31119 - protein, 87 aa, Neisseria meningitidis; identical to SEQ ID NO: 1364

SEQ ID NO: 31120 - protein, 603 aa, Neisseria meningitidis; identical to SEQ ID NO: 3231

SEQ ID NO: 31121 - protein, 467 aa, Neisseria meningitidis; identical to SEQ ID NO: 28954

SEQ ID NO: 31122 - protein, 281 aa, Neisseria meningitidis; identical to SEQ ID NO: 8149

SEQ ID NO: 31123 - protein, 154 aa, Neisseria meningitidis; identical to SEQ ID NO: 6562

SEQ ID NO: 31124 - protein, 815 aa, Neisseria meningitidis
VPEYALNSMSFGNGFRKSDDLIFKSVFRDSSSAVLGGVARFRKSDGGKIDLPYTFCEHKKTGEKMWRWRCWDNPRPLYGLDSLAADPSLPVLVVEGEKCKNAADAQGYNYAVLTWHGGCNNWDKSDWSAVVDRDVVLWPDCDSLRQKLTKKERDDGVDPESKPFLPRNEQGGMKAMLGIAEVLTKQNCRVWLVNIPSPGIWPHGFDIADAIADGGRICDPSEVLSWMGAADWLVEYVPEAEMPSENSPAPIQDMEPESEQLHESLEATGNQGGAGDVDDEYLAKLQKLKSEFGLVEGKDHGVNRKTGVTYTRKAMTVHFGKDVVDAWYEWGRAPVLTMYEINRLKKDYALIQAVKDDDTQDMMERFIYLDGSASIWDNKLWRVVPEKAARLSMTPDGFKIWVNSPSRIVKRFDRLVFEPGRVLSDDYINIFRGMPIEPKFPIPKEDMPETNYELYRLFPEIKPILNLINHLCNGDYQQVEYILNWLAYPLQNVGAKMTTAVVMHGHIHGAGKSFFFEEIVKPMYGEYGATYGQEDLESNYTANRSGKMFGIFEEVYTNQQKYNKTGSQKHMITGKTMRVERKFQDAYEEANHMNCVFLSNESHPFKIEENDRRYFVVWPEKKLDKKLRDEVLDCIGNDGVRLFYSFLLCWNFYLTYGQQGAENEKGYEVIKLEEPVRFDPNTPPPMTAAKQNVISYGRYAWQTFYSEWAGGGIKDLPFCCCITDDLWLVYKEWCRQNGERETGKTKFLQHIAEKMPRARRWWRTKNKDGDVSCQNWIFKPAGWQAADGLPEMDALGNEVLRFRSAGWRYRGGEEV

SEQ ID NO: 31125 - protein, 107 aa, Neisseria meningitidis; identical to SEQ ID NO: 2106

SEQ ID NO: 31126 - protein, 241 aa, Neisseria meningitidis
MPRFHLPENLSVGQTVALPDNIVRHLNVLRVRPNENITLFDGKGKAHAARLTVLEKRRAEAEILHEDTTDNESPLNITLIQSISSGDRMDFTLQKSVELGVTAIQPVISERCIVRLDGERAAKRLARWQEIVISACEQSGRNTVPPVLPIIGYREALDKMPSESTKLIMSINRARKLADIRQPSGAIVFMVGPEGGWTEQEEQQAFEAGFQAVTLGKRILRTETAPLAALAAMQTLWGDFA

SEQ ID NO: 31127 - protein, 72 aa, Neisseria meningitidis
LVETVKAVLQRAIETGGSTLRDFVDSDGKSGYFQQEYTVYGRHNQPCPQCGGLVVKETLGQRGTFYCPNCQK

SEQ ID NO: 31128 - protein, 635 aa, Neisseria meningitidis
MNPSPLLDLIDSPQDLRRLDKKQLPRLAGELRAFLLESVGQTGGHFASNLGAVELTIALHYVYDTPEDKLVWDVGHQSYPHKILTGRKNQMHTMRQYGGLAGFPKRSESEYDAFGVGHSSTSIGAALGMAAADKLLGSDRRSVAIIGDGAMTAGQAFEALNCAGDMDVDLLVVLNDNEMSISPNVGALPKYLASNVVRDMHGLLSTVKAQTGKVLDKIPGAMEFAQKVEHKIKTLAEEAEHAKQSLSLFENFGFRYTGPVDGHNVENLVDVLKDLRSRKGPQLLHVITKKGNGYKLAENDPVKYHAVAKLPKESAAQMPSENKPAAKPTYTQVFGKWLCDRAAADSRLVAITPAMREGSGLVEFEQRFPDRYFDVGIAEQHAVTFAGGLACEGMKPVVAIYSTFLQRAYDQLVHDIALQNLPVLFAVDRAGIVGADGPTHAGLYDLSFLRCVPNMIVAAPSDENECRLLLSTCYQADAPAAVRYPRGTGTGAPVSDGMETVEIGKGIIRREGEKTAFIAFGSMVAPALAVAEKLNATVADMRFVKPIDEELIVRLARSHDRIVTLEENAEQGGAGGAVLEVLAKHGICKPVLLLGVADTVTGHGDPKKLLDDLGLSAEAVERRVRAWLSDRDAAN

SEQ ID NO: 31129 - protein, 112 aa, Neisseria meningitidis; identical to SEQ ID NO: 3481

SEQ ID NO: 31130 - protein, 185 aa, Neisseria meningitidis; identical to SEQ ID NO: 9800

SEQ ID NO: 31131 - protein, 158 aa, Neisseria meningitidis; identical to SEQ ID NO: 5652

SEQ ID NO: 31132 - protein, 186 aa, Neisseria meningitidis; identical to SEQ ID NO: 2093

SEQ ID NO: 31133 - protein, 557 aa, Neisseria meningitidis; identical to SEQ ID NO: 15995

SEQ ID NO: 31134 - protein, 289 aa, Neisseria meningitidis
MKPIKKAVFPVAGMGTRFLPATKASPKEMLPIVDKPLIQYAVEEAVEAGCTEMVFVTGRNKRSIEDHFDKAYELETELEMRHKDKLLEHVRNILPPNITCLYIRQAEALGLGHAVLCARAAIGDEPFAVILADDLIDAPKGALKQMVEVYERSGNSILGVETVEPSQTGSYGIVETEQLKQFQRITGIVEKPKPEDAPSNLAVVGRYILTPRIFDLLTGLPRGAGNEIQLTDGIAKLLDHEFVLAHPFEGTRYDCGSKLGYLEATVAYGLKHPETGEPFRRLLEKYRTE

SEQ ID NO: 31135 - protein, 161 aa, Neisseria meningitidis
MKYRRFYRNGGTYFFTVVANKRQRILTDDAVRLALRQAVMAVRERYPFEILAWVLMPDHLHTIWRLPDNDSAYSERWRQRHSQYLIGGNLRLWQKRFWEHTIRDEADFSCHFDYLHFNPVKHGYVGQISDWRFSTFHRYVKQGIYPHNWGGGNADFSIGYD

SEQ ID NO: 31136 - protein, 88 aa, Neisseria meningitidis
  misc_feature 83, 84: 'Xaa' is any amino acid
MKKMFVLFCMLFSCAFSLAAVNINAASQQELEALPGIGPAKAKAIAEYRAQNGAFKSVDDLTKVKGIGPAVLAKLKDQASVGXXHTLN

SEQ ID NO: 31137 - protein, 66 aa, Neisseria meningitidis
MAKICSIMFCIVVYRFRTFVRLKAGKHRNESTQRKCRLNMCSGGVLLGGIGAERLKKGFRRSLGVW

SEQ ID NO: 31138 - protein, 201 aa, Neisseria meningitidis
LNTLYLGSNSPRRMEILTQLGYRVIQLPAGIDESVKAGETPFAYVQRMAEEKNRTALTLFCETNGTMPDFPLITADTCVVSDGIILGKPRSQAEAIEFLNRLSGKQHTVLTAVCIHYRGKTSSRVQTNRVVFKPLSSEEISAYVQSGEPMDKAGAYAVQGIGGIFIQSIGGSFSGIMGLPVYETVSMLQDLGYRTPPFIRA

SEQ ID NO: 31139 - protein, 1305 aa, Neisseria meningitidis
MTYPIPKPREKSRWPNLSQGSLPLALARYLPHKQLKVVLTQDAEQALRLQTAWRFFRPHDTAVFLPDWETLPYERFSPHQDLVSERLSALWQIKSGAADVLFVPVATAMQKLPPVPFLAGRTFWLKTGQTLDIGRLKTDLVDAGYNHVSHVVAAGEFAVRGGIVDLFPMGSEMPYRIDLFDDEIDSIKTFDTETQRTISPVSEIRLLPAHEFPTDSEAQKIFRSRFREEVDGNPNDAAVYKAVSNGHFGAGVEYYLPLFFENELETLFDYIGEDVLFVSLGDVHAEANRFWSDVKSRYTMAQGDETYPPLLPQHLYLSADVFAGRLKNYGQVLPDVSGKEHTLPDLAVNRQSDEPLQALKDFQTTFEGRILLCAESLGRRETMLGFLQQNGLKAKPVSDWQGFLSAHEPLMITVAPLAYGFKLGGLQSPNQQQTAPAPERESRGESKAAADQTEFSAAATSPLPSPLPQEREQNTAAVSDNLKTESSLYLVANNLYGQTRQQPAPSPERESRGESKAVSAQTEFSAAATSPLPSPLPQEREQSAAVVSDSLKAAAVSTESSLPPGKSNLHGQIQQQPAPSPVGEGWGEGKAVAAQSAIAVITESDLYQYVARSRIHNRRKKHAAVSDGLLRDLAEINIGDPVVHEEHGIGRYMGLVTMDLGGETNEMMLLEYAGEAQLYVPVSQLHLISRYSGQAHENIALHKLGSGAWNKAKRKAAEKARDTAAELLNLYAQRAAQSGHKFEINELDYQAFADGFGYEETEDQAAAIAAVIKDLTQAKPMDRLVCGDVGFGKTEVALRAAFVAVMGGKQVAVLAPTTLLVEQHAQNFADRFADFPVKVASLSRFNNSKATKAALEGMADGTVDIVIGTHKLVQDDIKFKNLGLVIIDEEHRFGVRQKEQLKRLRANVDILTMTATPIPRTLSMALEGLRDFSLITTAPSRRLAVKTFVKPFSEGSVREAVLRELKRGGQVFFLHNEVDTIENMRERLETLLPEARIGVAHGQLRERELEQVMRDFLQQRFNVLLCSTIIETGIDIPNANTIIINRADKFGLAQLHQLRGRVGRSHHQAYAYLLTPEYITKDAEKRLDAIAAADELGAGFTLAMQDLEIRGAGEILGEGQSGEMIQVGFTLYTEMLKQAVRDLKKGHQPDLDAPLGITTEIKLHSPALLPESYCPDIHERLVLYKRLAVCETVQQINAIHEELVDRFGLPEQPVKTLIESHHLRLMAKELGINAIDAAGEAVTVTFGKNNNIDPTEIILLIQNDKKYRLAGADKLRFTAEMENIEVRINTVKNVLKTLQNRCLPK

SEQ ID NO: 31140 - protein, 686 aa, Neisseria meningitidis
MTQTLLIELLTEELPPKALNNLGNHFAASVAEGLEKAQLVDGAAEFTAYASPRRLAVQVKNVKAVQADQKIVKKGPAVANAMKDGAPTKALEGFARGAGAKIEDLTIVHDGKQDVYAYEYVQTGKPLGELLEDIINQAVKKLPIPKVMRWGSSTFTFVRPVHGLIVLHGGDIVNVSVLGLQSSNQTLGHRFLSNGEITIENADSYAEQMRGQGKVVASFAERKAAIQTALEGQARRLNATVAADEALLDEVTALVEYPVVLEAGFEEHFLAVPQECLILTMQQNQKYFPLLDQNGKLMNRFLLVSNLQTADPSHIIQGNERVLRARLSDAEFFYKQDQKATLESRLPKLANVVYHNKIGSQAERIERLQSIAAHIAKALGAGAAAAERAARLAKADLVTEMVGEFPELQGTMGKYYARLDGETEEIAEAIEQHYQPRFAGDKLPESKIAAAVALADKLETLVGIWGIGLIPTGDKDPYALRRAALGILRMLMQYGLDVNELIQTAFDSFPKGLLNEKTPSETADFMQARLAVLLQNDYPQDIVAAVLAKQPRRLDDLTAKLQAVAAFKQLPEAAALAAANKRVQNLLKKADAELGAVNESLLQQDEEKALFAAAQGLQPKIAAAVAEGNFQTALSELASVKPQVDAFFDGVMVMAEDAAVKQNRLNLLNRLAEQMNAVADIALLGE

SEQ ID NO: 31141 - protein, 238 aa, Neisseria meningitidis
MSDKKYNVDEGEIAKFSRIADKWWDKSGEFKTLHDINPLRLDYIDGHADLCGKRVLDVGCGGGILAESMARRGAAFVKGIDMAEQSLETARLHAALNNVADIEYECIRVEDLAEAEPHSFDVVTCMEMMEHVPDPAAIVRACAKLVKPDGMVFFSTINKNPKSYLHLIVAAEYLLKFVPKGTHDWKKFIAPAELARMCRQAGLDVADTKGMTYHVLSQTYALCDSTDVNYMFACRPAF

SEQ ID NO: 31142 - protein, 119 aa, Neisseria meningitidis
MYFVDRTAVVLKPTVRFLEWLKSTDENMPDLTIEQLRANCSVFLVPQFDEPEAVVSYFDERYRQIFEAELAGWDIDKDKWPQDMSLKVFWEFFDTEIHDMVLDMEEADLNITPVFDNMM

SEQ ID NO: 31143 - protein, 248 aa, Neisseria meningitidis
MKSSTQAVLEHTAIPKHIAVIMDGNGRWAKKRFLPRIMGHKRGLDALENMVKHCAKLGVQYLTVFAFSTENWRRPEDEVSFLMGLFLQALQKQVRRLHENNMRLKILGSRERFSRQILKGIEEAEALTANNTGLTLSIAADYGGRWDILQAANKLIAEGVSEITEDTLAKHLMLGDAPEPDLFIRTGGETRISNFLLWQMAYAELYFTDILWPDFDETALDAAVASFQKRERRFGRTSEQLPIEQQRN

SEQ ID NO: 31144 - protein, 77 aa, Neisseria meningitidis
LKAETYFCRPYHSWEKGLNENTNGLIRQYFPKQTDFRNISDREIRRVQDELNHRPRKTLGYETPSVLFLNLFQPLIH

SEQ ID NO: 31145 - protein, 197 aa, Neisseria meningitidis
MRKQNALTGIPTSDGQRGFALFIVLMVMIVVAFLVVTAAQSYNTEQRISANESDRKLALSLAEAALREGELQVLDLEYDTDSKVTFSENCGKGLCTAVNVRTNNDNEEAFDNIVVQGKPTVEAVKRFCPANSTDLCIDKKGMEYKKGTRSVSKPPRYIIEYLGVKNGENVYRVTAKAWGKNANTVVVLQSYVSNNDE

SEQ ID NO: 31146 - protein, 325 aa, Neisseria meningitidis
MIYPWHNEQWRQIAEHWERRPNAWLFAGKKDTGKTTFARFAAKALLCETPALGCKPCGECMSCHLFGQGSHPDFYEITPLSDEPENGRKLLQIKIDAVREIIDNVYLTSVRGGLRVILIHPAESMNVQAANSLLKVLEEPPPQVVFLLVSHAADKVLPTIKSRCRKMVLPAPSHEEALAYLRERGVAEPEERLAFHSGAPLFDEADGVRALRIKLLDILAEPRLLKILDYAALFDKEKLPLAVFVGWMQKWLVDLGLCLQHMKPVYYPAYEDRLLQTVSGFRPRNVFAAEDMLKQLAPYGFHTLNVKMQIEHLLINYLELKKENG

SEQ ID NO: 31147 - protein, 282 aa, Neisseria meningitidis; identical to SEQ ID NO: 1327

SEQ ID NO: 31148 - protein, 189 aa, Neisseria meningitidis; identical to SEQ ID NO: 8960

SEQ ID NO: 31149 - protein, 206 aa, Neisseria meningitidis
MLKQAVTGMTKQERITTQAYNEMTKSVAGSNSIVLNDVQGDTTINNHHTHTHNRSVADGKALSMRLTPRPLLSDRQAAAFARTGKLTGSFDLFASVVAPSQYTFAVAMPDTSMSPVIEKGDLLVVEPRMCPADEDIALIELSDKRLVVAHLVIDIAGRMLIYQTGRPSEAFDLPEGSTILGVVLEVKKRFMSAAQARRRVDSDYHP

SEQ ID NO: 31150 - protein, 128 aa, Neisseria meningitidis; identical to SEQ ID NO: 9112

SEQ ID NO: 31151 - protein, 461 aa, Neisseria meningitidis; identical to SEQ ID NO: 7704

SEQ ID NO: 31152 - protein, 132 aa, Neisseria meningitidis; identical to SEQ ID NO: 1178

SEQ ID NO: 31153 - protein, 96 aa, Neisseria meningitidis; identical to SEQ ID NO: 1755

SEQ ID NO: 31154 - protein, 381 aa, Neisseria meningitidis
MSISLIGLHITIAIILFFTTNFMGKKSSIFGYYQLSFSEENHSPAFNIFYRAFTPILFIVIFSWVVTSFEIPISLEKINYVVIYYFIIRLLSVFVFEKTHIVNWFNQLTIPILSITLSFIVYNKMILPKSFLLPSSQEVATTFWIALGGYIYNILNNESGHLKSYEERRVNYVKHMHKKFESYFGKIIDKIIKEDSYNNDDFLTDKKKALIYSVLIYENFNRGLVYRYFEKILFCTGRIKTSGIMQVTSAEYLSNEESIKKGGNILMEKYNEKYNESIDGNKTLYKSYYESRRESIKNYNPDAKYINEIESIYMMLGEIYPNAPDFMSPHFEGDLDSDFKCNTSVLVVGTDSRIKHLAFRSQVFFLVGGSTHLEPCVSPDH

SEQ ID NO: 31155 - protein, 215 aa, Neisseria meningitidis; identical to SEQ ID NO: 1509

SEQ ID NO: 31156 - protein, 309 aa, Neisseria meningitidis
MDSIIELRHLKTLLALEETGSVSLAAKRVFLTQSALSHQIRMLENHYGTPLFERKSTPLRFTPVGERLLRLAHELIPQVAVAERDLARITEGEAGELRIAVECHTCFDWLMPAMGEFRPMWPQVELDIVSGFQADPVGLLLQHRADLAIVSEAEKQNGISFQPLFAYEMVGICAPDHPLAAKNVWTAEDFIGETLITYPVPDEMLDLPKKILIPKNINPPRRHSELTIAIIQLVASRRGIAALPYWTVMPYLEKGYVVHQQITDDGLQSKLYAAIRTEDTDKSYLNNFCQIIRERGFADLPGLSELESV

SEQ ID NO: 31157 - protein, 296 aa, Neisseria meningitidis; identical to SEQ ID NO: 72

SEQ ID NO: 31158 - protein, 128 aa, Neisseria meningitidis
LAEGQKSAVTEYYLNHGEWPSNNTSAGVASASDIKGKYVEKVEVANGVITATMLSTGVNKEIQGRKLSLWAKRQNGSVKWFCGQPVTRNNAKANAANADDVAKTGTDSEKINTKHLPSTAPTRKSTPN

SEQ ID NO: 31159 - protein, 149 aa, Neisseria meningitidis
  misc_feature 143, 144: 'Xaa' is any amino acid
MSTFFQQTAQAMIAKHIDRFPLLKLDQVIDWQPIEQYLNRQKNRYLRDHRGRPAYPLLSMFKAVLLGQWHSLSDPELEHSLITRIDFNLFCRFDELSIPDYSTLCRYRNRLAQDNTLSELLELINRPLTEKGLKIEKASAAVXXTHLIN

SEQ ID NO: 31160 - protein, 180 aa, Neisseria meningitidis
MINHIEKYTGPISHGSKSDSGSQYKLNIAAIPSSPNRDLKTYITLGLSKHDLNYKSRFEILFVCSLKYDENQIFPFLRWLAETIIENKKILLRGQVVYLPRSIVDSTKMDALYVSAPFYFDDDFQVCYGEHYNIVFPLLVPLYKQEAELVEKKGWNAFEQFLLDNEVGNLSDMNRKPFTW

SEQ ID NO: 31161 - protein, 499 aa, Neisseria meningitidis
  misc_feature 495, 496, 497: 'Xaa' is any amino acid
MNNPLVNQAAMVLPVFLLSACLGGGGGSFDLDSVDTEAPRPAPKYQDVSSEKPQAQKDQGGYGFAMRFKRRFWLPRGKEDEVKLKESDWEETGLPDDPKNLPKRQKSVIDEVKTDDGSNNIHSSPYLMQSNHQNGSTNGGANQPKNEVTDYKDFKYVYSGWFYKHAKSEIKRENGSSSAKSGDDGYIFYHGEKPSRQLPASEKVIYKGVWHFVTDTKKGQKFNDILGTSKGQGDKYSGFSGDDDEQYSNKNESMLKDGQEGYGFTSNLEVDFNNKKLTGKLIRNNRVTNATPNDKYTTQYYSLDAQITGNRFNGKAIATDKPQANETKPHPFVSDSSSLSGGFFGPKGEELGFRFLSDDKKVAVVGSAKTKDKDANGNTAAASGGTGAAASGDAADMPSENSKLTTVLDAVELTLNDKKIKNLDNFSNAAQLVVDGIMIPLLPKDSESGNNQANQGTNGGTAFTRKFDHTPKSDEKDTQAGTAANGNQAASNTAXXXHT

SEQ ID NO: 31162 - protein, 408 aa, Neisseria meningitidis
MNTDNLHDILDEMVQVYSQKKQSRSETPAEIGAHFHPLLDRLCETAEAQNASDILISKGFPPSLKINSALTPQPQKALTGEETAAIAASTMNAEQSEIFRRDGEINYSVQSRSGTRYRANAYHSQGHAGLVLRRINHVIPQMQELGLPEKLKDLAVAPRGLLIIVGPTGSGKSTTMATMLEHRNKTLPGHIVTIEDPIEFIYKPRRCIFTQREIGVDTINWQTAVQNAMRQSPDVVCIGEVRSRENMEYAMQLAQTGHLCIFTLHANTAPQSLERILNFYPKEQHNQILIDIALNLTGIICQRLALKQDKTGRTAVVDLLINTPAIQDFILKGDLMNISKIMETAKTDGMQTMDQNLFELYRHGIISYEEALRQSVSANNLRLHIQLHKEGKTPELLYDRVNGLNLIS

SEQ ID NO: 31163 - protein, 225 aa, Neisseria meningitidis
MQADFNRPVLVIDTGTSYLSLALRADGETRLFHQEVGSRQSELILPEIRTLFHDAGITAADLGAIVYAKGPGAFTGLRIGIGVAQGLATPFDTPLIGIPTLDAAASLPPPQSCILATTDARMGEVFYAWFDTLNCRRLSDYQVGRAADIRLPEGCAFSDGIGSAFALEETPPFSGKPDMPTAADFLNLAAEGGFPAVAAAHAGLLYVRNKIALTAKEQAERRARP

SEQ ID NO: 31164 - protein, 380 aa, Neisseria meningitidis
MNTLYTLFATCPRGLETVLSQELESLGCTDVQAFDGGVSCRGGLEQVYAANLHSRTAGRILLRLTKGTYRTERDIYKLAKNINWFNWFTLQQTFKVKIEAKRANVKSLQFVGLTVKDAVCDAFRDIYDARPSVDKAAPDVRIHAFLNERNVEIFIDTSGEALFKRGYRLDTGEAPLRENLAAGLLLSAGYDGTQPFQDPFCGSGTIAIEAAWIATGRAPGMMRRFGFEKLQNFDKTLWADLRRRAEAQTRPVRAPIAGSDSDRRIVQTALDNARSAEVDDIVSFGVADAQSVRPNGENGIMVSNPPYGVRLEEVHALQALYPQLGTWLKKHYAGWRVGMFTGDREMPKFMRLSPKRKIPLYNGNLDCRLFLIDMVQGSNR

SEQ ID NO: 31165 - protein, 710 aa, Neisseria meningitidis
MSIVSAPLPALSALIILAHYHGIAANPADIQHEFCASAQSDLNETQWLLAAKSLGLKAKVVRQPVKRLAMATLPALVWCDDGNHFILAKTDGGGEHAQYLIQDLTTNKSAVLSFAEFSNRYSGKLILVASRASVLGSLAKFDFTWFIPAVIKYRRLFFEVLVVSVVLQLFALITPLFFQVVMDKVLVHRGFSTLDVVSVALLVVSLFEIVLGGLRTYLFAHTTSRIDVELGARLFRHLLSLPLSYFEHRRVGDTVARVRELEQIRNFLTGQALTSVLDLAFSFIFLAVMWYYSSTLTWVVLASLPAYAFWSAFISPILRTRLNDKFARNADNQSFLVESITAVGTVKAMAVEPQMTQRWDNQLAAYVASGFRVTKLAVVGQQGVQLIQKLVTVATLWIGARLVIEGKLTVGQLIAFNMLSGQVAAPVIRLAQLWQDFQQVGISVARLGDILNAPTENASSHLALPDIRGEITFEHVDFRYKADGRLILQDLNLRIRAGEVLGIVGRSGSGKSTLTKLVQRLYVPEQGRVLVDGNDLALAAPAWLRRQVGVVLQENVLLNRSIRDNIALTDTGMPLERIIEAAKLAGAHEFIMELPEGYGTVVGEQGAGLSGGQRQRIAIARALITNPRILIFDEATSALDYESERAIMQNMQAICANRTVLIIAHRLSTVKTAHRIIAMDKGRIVEAGTQQELLAKPNGYYRYLYDLQNG

SEQ ID NO: 31166 - protein, 331 aa, Neisseria meningitidis
LKAAYQNIATVWQGDFHNAKQVLSAMKKRVRKPAAVRSDADIAALFHAHRMKQAQQSRILNMLAVEIRPGFVLDNKRAPDIRAALLDVYGEADGKPFFLPLNLLLGFMGAHEWHKKGVAVPQLGGSIHVPFGVFSPLRGEYLDLLAHAPSTGFQTAFDIGTGSGVLAAILAKQGIPSVIGTDTNPKAVACARANIARLGFEKQVEIRETDLFPEGFADLIVCNPPWLPAKPTSAVESALYDPESAMLAAFLRDAPKHLNPDGEIRLIISDLAEHLHLRPSDFLDKAFAQAGLRVADVLKTKPVHKKAADPNNPLAFARNRETTFLYRLKKA

SEQ ID NO: 31167 - protein, 464 aa, Neisseria meningitidis
MNKQPLSLAVVGHTNTGKTSLLRTLLRDSGFGEVRNAPSTTRHVEEAAISDGADTLVFLYDTPGLEDAGGVLEWLENHTDNRSDGIERLQQFLGSHGAHHDFNQEAKVLRQVLQSDMAMYVIDAREPVLDKYRDELIILSWCAKPVMPVFNFTGGQPPESWTTMLARRNLHVFAGFDTVAFDFEGELRLWENLATMLPERSTLDRLTAMRRREWQRLDGEARREIADFLLDAAAFRQEVDENEDTATVLQTMQAEIRQLERQMQQRLFALYRFYHSEIDGGDWMPQAFRQDPFDSELLKQYGIRTGTGAATGALIGLGLDIATLGGSLGLGTAIGGFLGGILPNTRTISDKLSGRQTLHTDPETLTLLAARALDLLYVLQTRGHAAQSDIELHSRKAPWDAARLPPELNKARSHWKWSSLNTHRPETSRAERAGYVEKLQIRLSGKYSELNLNQDKAASRRQYK

SEQ ID NO: 31168 - protein, 159 aa, Neisseria meningitidis
MSTFFQQTAQAMIAKHINRFPLLKLDRVIDWQPIEQYLNRQKTRYLRDHRGRPAYPLLSMFKAVLLGQWHSLSDPELEHSLITRIDFNLFCRFDELSIPDYSTLCRYRNWLAQDDTLSELLKLINRQLTEKGLKIEKASAAVVDATIIQTAGSKQRQAR

SEQ ID NO: 31169 - protein, 366 aa, Neisseria meningitidis; identical to SEQ ID NO: 8931

SEQ ID NO: 31170 - protein, 65 aa, Neisseria meningitidis
MTAIPSEPPFRRHFTHQNRKTAPKIIITGRNGKPDTKPNTAAKMPSEAVGATILIWGITFLNHPF

SEQ ID NO: 31171 - protein, 305 aa, Neisseria meningitidis
MEKAEHLNSSRFVNLVKSGGGSYVEGSYRFDTLSNGISIHGGTVTARCDFCSSRLAEPYVSFVLLLEGSLDFGINRCRFQIDADGGKIVLIAVGEEVLFSRYLYRGGKTVKMTIKGMEQWLLRPEYARFAPLLYREPVRIWDLPPNLRGLAASCLKAVPKGHLGETLRREADVLRLLSDLWDTVSDGIGPAAGQTAEADAMPSEDFSRTLNAAFVGGAHQVNRLTDALNISERTLQRRMRDHFGITASEWLHHKQMQHALYLLQNGGKSVGETAYLCGYRHVSSFTQAFRQYFGSTPAETKKENR

SEQ ID NO: 31172 - protein, 148 aa, Neisseria meningitidis
MNFSFVPLFLVTLILLGVVSNNNSITISATILLLMQQTALIQFVPLVEKHGLNLGIILLTIGVLSPLVSGKAQVPPVAEFLNFKMISAVFIGIFVAWLAGRGVPLMGQQPVLITGLLIGTVIGVAFMGGIPVGPLIAAGILSFVVGKG

SEQ ID NO: 31173 - protein, 89 aa, Neisseria meningitidis
  misc_feature 2, 3, 4: 'Xaa' is any amino acid
VXXXHAQGIYTHELVNLLFEQPYTRIANLEAAGIAKRQTASKYLKELSDIGVLQEIVIGRDKLFIHPRLMELLRGEGNSFTSFQSLVKA

SEQ ID NO: 31174 - protein, 280 aa, Neisseria meningitidis
MCQLLGMNCNTPTDIMFSFEGFRRRGGITDHHADGFGIGFFEGKGVRLFHDDKPSANSPVADLVRAYQIKSENVVAHIRKASQGQTSLANTHPFMREMWGGYWLFAHNGHLIDFFPEQGEFFHPVGTTDSERAFCHILNRLRTRFAARPDDDTLFDAIAGLTHEIRKFGLFNFMLSDGIALFAHASTLLHYIVRQAPFGKARLLDDDVMVDFAEVTTPSDRVAVIATLPLTRDESWSQLAVDELVMFREGNIVRHDRPENPVYMSAEEGLEIARAAGVAV

SEQ ID NO: 31175 - protein, 256 aa, Neisseria meningitidis
MEPERLQKVLAASGVGSRREMEEWINNGWVTVNGKTAQLGDKVTPDDHVTVKGSIIKLKWADRLPRIILYYKQEGEIVSRDDPQGRVSIFDRLPQAASSRWVAIGRLDINTSGLLILTTSGELVQRFAHPSFEVEREYAVRVLGGLTGEQIRVLTEEGVMLEDGLAKVERIREQGGEGANKWYNVVIKEGRNREVRRIFESQGLTVSRLVRVGFGPIGLPNRLKRGQFYELNPAEVANIIKWADMLLPGERRRKKA

SEQ ID NO: 31176 - protein, 100 aa, Neisseria meningitidis; identical to SEQ ID NO: 5709

SEQ ID NO: 31177 - protein, 188 aa, Neisseria meningitidis; identical to SEQ ID NO: 6079

SEQ ID NO: 31178 - protein, 64 aa, Neisseria meningitidis
  misc_feature 60, 61, 62: 'Xaa' is any amino acid
MLPSKYEDNTLQIKEKSTERTAPFFVLEVTARSAADILGIHPNSAALFYRKIRMVINHHXXXHT

SEQ ID NO: 31179 - protein, 203 aa, Neisseria meningitidis; identical to SEQ ID NO: 3558

SEQ ID NO: 31180 - protein, 394 aa, Neisseria meningitidis
MTEPTSRRRFLKTCTAAAGAGLLQACGTSATSVPPLPSSHSVVKARTVPLQTPRRQSSDGNLLRVVASSGFAEDTNRVNTALTRLYNVGFTVTNQQAGSRRFQRFAGTDTQRAADFQEVASGRVATPKVLMGLRGGYGAARILPHIDFASLGARMREHGTLFFGFSDVCAVQLALLAKGNMMSFAGPMAYSDFGKPAPGAFTMDAFIKGATQNRLTVDVPYIQRADVETEGILWGGNLSVLASLAGTPYMPDIDGGILFLEDVGEQPYRIERMLNTLYLSGILGKQRAIVFGNFRMGNIRDVYDSSYDFSTVVNHISRTAKIPVLTGFPFGHIADKITFPLGAHARIRMNGNGSYSVAFEGYPTLDASALTLDTLLPPPDLPIFPESGVADISE

SEQ ID NO: 31181 - protein, 505 aa, Neisseria meningitidis
MVISNPRELEKLKDRIPNLINIIRVAIVFPLMIMHILGLETGSRANLHASWTAWAFYVWLAIACWLIFFSIIHPHWQWQALRIPSFSAVADITMIGVLTYLFGGIDSGFGILILPFVVCSCLLSYGRYPLLYSSYAAILLIFNAIADGDIGKYPLISDARTASATFILVAASYLSAIFTSLSVRYIDRAGKLAHENHAAYRRIRGLNQTVLNRVQEAVVVINVEHQTILFNKKAKDLLPMLEIGQHTALFDPITVLWDKASSRTFERNIDTPGLNAGIRAVPVNKGPDKLLILYIRPQSEIQAEALSVKLAALGQLTANLAHEIRNPMSAIRHANDLLRENMEAGAADPFNAKLCKIIDGNVCRIDKMLEDISSLNKRNKTEREAIGLIPFWEEFKQEFLLGHPDAAGCIRLDMQGNHLTAYFDPAHLRQIMWNLANNAWRHSRKQPGSISVTIRPAQKNTVCILFADRPKCRNTCSNPFTPRRKTAPASGCMSPANWRTPISAI

SEQ ID NO: 31182 - protein, 72 aa, Neisseria meningitidis; identical to SEQ ID NO: 1579

SEQ ID NO: 31183 - protein, 140 aa, Neisseria meningitidis; identical to SEQ ID NO: 662

SEQ ID NO: 31184 - protein, 220 aa, Neisseria meningitidis
MIHAVLFDLDGTLADTALDLGGALNTLLARHGLPPKSMDEIRTQASHGAAGLIKLGAGITPDHPDYARWRTEYLEEYDRRYAQDTELFDGVNELIAELDRRGIKWGIITNKPMRFTDKLAPKLGFIIPPAVVVSGDTCGEPKPSVKPMLYACGQIHADPQHTLYVGDAERDIQAGRNAGMKTVLAEWGYISDEDDTDSWQADFHIRTPLDLLECLDKIQP

SEQ ID NO: 31185 - protein, 622 aa, Neisseria meningitidis
MQAVRYRPEIDGLRAVAVLSVIIFHLNNRWLPGGFLGVDIFFVISGFLITGIILSEIQNGSFSFRDFYTRRIKRIYPAFIAAVSLASVIASQIFLYEDFNQMRKTVELSAVFLSNIYLGFQQGYFDLSADENPVLHIWSLAVEEQYYLLYPLLLIFCCKKTKSLRVLRNISIILFLILTATSFLPSGFYTDILNQPNTYYLSTLRFPELLAGSLLAVYGQTQNGRRQTANGKRQLLSSLCFGALLACLFVIDKHNPFIPGMTLLLPCLLTALLIRSMQYGTLPTRILSASPIVFVGKISYSLYLYHWIFIAFAHYITGDKQLGLPAVSAVAALTAGFSLLSYYLIEQPLRKRKMTFKKAFFCLYLAPSLILVGYNLYARGILKQEHLRPLPGAPLAAENHFPETVLTLGDSHAGHLRGFLDYVGSREGWKAKILSLDSECLVWVDEKLADNPLCRKYRDEVEKAEAVFIAQFYDLRMGGQPVPRFEAQSFLIPGFPARFRETVKRIAAVKPVYVFANNTSISRSPLREEKLKRFAANQYLRPIQAMGDIGKSNQAVFDLIKDIPNVHWVDAQKYLPKNTVEIYGRYLYGDQDHLTYFGSYYMGREFHKHERLLKSSRDGALQ

SEQ ID NO: 31186 - protein, 63 aa, Neisseria meningitidis; identical to SEQ ID NO: 25601

SEQ ID NO: 31187 - protein, 163 aa, Neisseria meningitidis; identical to SEQ ID NO: 2563

SEQ ID NO: 31188 - protein, 188 aa, Neisseria meningitidis
MLVHPEAMSVGALADKIRKIENWPKKGILFHDITPVLQSAEYFRLLVDLLVYRYMDQKIDIVAGLDARGFIIGAALAYHLNVGFVPIRKKGKLPFETVSQSYALEYGEAAVEIHTDAVKPGSRVLLVDDLVATGGTMLAGLELIRKLGGEIVEAAAILEFTDLQGGKNIRASGAPLFTLLQNEGCMKG

SEQ ID NO: 31189 - protein, 178 aa, Neisseria meningitidis
VDLREVKLGGETIYEGGFVSISRDKVRLPNGNEGQRIVIRHPGAACVLAVTDDEKVVLVRQWRYAANQATLELPAGKLDVAGEDMAACALRELAEETPYTADSVRLLYSFYTAVGFCNEKMYLFEAESVRLGSTLANDEDEITETVLMSKEEVRQALANDEIKDGKTLIGLQYWLMKD

SEQ ID NO: 31190 - protein, 465 aa, Neisseria meningitidis
MTVRIEHDLLGDREIPAEVYWGIHTLRAIENFKISTQKISDVPQFVRSMVMVKKATAQANGELGAVKPEIAAAIEKACDEVLLNNRCLDQFPSDVYQGGAGTSVNMNTNEVIANLALEVLGYEKGRYDIVNPMDHVNASQSTNDAYPTGFRLAVYYSIGELLDKLTVLKNAFAAKAEEFKDVLKMGRTQLQDAVPMTAGQEFQSFQVLLEEEILNLDRTRQLLLEVNLGATAIGTGVNTPKGYAELVVKKLSEVSGLPCKLTENLIEATSDCGAYVMVHGALKRTAVKLSKICNDLRLLSSGPRAGLKEINLPELQAGSSIMPAKVNPVIPEVVNQVCFKVIGNDTTITFAAEAGQLQLNVMEPVIAQCMFETISLLGNAAVNLSDKCVKGITVNREICERYVFNSIGLVTYLNPYIGHHNGDLVGKICAQTGKGVREVVLERGLLSEEELNRILSPENLMNPHL

SEQ ID NO: 31191 - protein, 463 aa, Neisseria meningitidis
MFPDFSQTLSKDRHFLQSAFKNPNKYGGLSKVEEKYRKSHEIFLKRLAALPKPEFDNTLPVHEKLDEIKKAIAENQVTIICGETGSGKTTQLPKICLELGRGAAGLIGHTQPRRLAARSVAERIAEELKSEIGSAVGYKVRFTDHTSRDACVKLMTDGILLAETQTDRYLAAYDTIIIDEAHERSLNIDFLLGYLKQLLPRRPDLKVIITSATIDAERFSRHFNGAPVLEVSGRTYPVEILYRPLTGKDEDDAEVELTDAIVDAADELARHGEGDILVFLPGEREIRETAEALRKSTLRRNDEILPLFARLSHAEQHKIFHPSGAKRRIVLATNVAETSLTVPGIKYVIDTGLARVKRYSARAKVEQLHVEKISQAAARQRSGRCGRVSAGVCIRLFSEEDFNSRPEFTDPEIVRSNLAAVILRMASLNLGDVAAFPFLEMPDSRYINDGFQVLLELGAVEAV

SEQ ID NO: 31192 - protein, 160 aa, Neisseria meningitidis; identical to SEQ ID NO: 1762

SEQ ID NO: 31193 - protein, 123 aa, Neisseria meningitidis; identical to SEQ ID NO: 4020

SEQ ID NO: 31194 - protein, 207 aa, Neisseria meningitidis; identical to SEQ ID NO: 243

SEQ ID NO: 31195 - protein, 227 aa, Neisseria meningitidis
MPSEKCSDGISYNLLFAAHNQSVFPIPFRNAYHAPVPNICEQGKKMARLTVHTLETAPEAAKARVEAVLQNNGFIPNLIGVLANAPEALSFYQEVGKLNAANSLTAGEVEVIQIIAARTNQCGFCVAGHTKLATLKKLLSEQSVKAARALAAGEFDDAKLGALAAFTQAVMAKKGAVSDEELKAFFDAGYNQQQAVEVVMGVALATLCNYVNNLGQTEINPELQAYA

SEQ ID NO: 31196 - protein, 248 aa, Neisseria meningitidis; identical to SEQ ID NO: 9621

SEQ ID NO: 31197 - protein, 468 aa, Neisseria meningitidis; identical to SEQ ID NO: 15715

SEQ ID NO: 31198 - protein, 183 aa, Neisseria meningitidis
MKAYLALISAAVIGLAACSQEPAAPAAEATPAAEAPASEAPAAEAAPADAAEAPAAGNCAATVESNDNMQFNTKDIQVSKACKEFTITLKHTGTQPKTSMGHNIVIGKTEDMDGIFKDGVGAADTDYVKPDDARVVAHTKLIGGGEESSLTLDPAKLADGEYKFACTFPGHGALMNGKVTLVD

SEQ ID NO: 31199 - protein, 57 aa, Neisseria meningitidis; identical to SEQ ID NO: 1249

SEQ ID NO: 31200 - protein, 414 aa, Neisseria meningitidis
MSNENRTCSFCGKSKSHVKHLIEGENAFICDECVSNCIEILHEDGNDGTPSESAGGEPEESGKLPTPAEIVANLNDHVIGQEQAKKALAVSVYNHYKRLRHPKAGANVELSKSNILLIGPTGSGKTLLAQSLARKLDVPFVMADATTLTEAGYVGEDVEQIITKLLGKCDFDVEKAQRGIVYIDEIDKISRKSDNPSITRDVSGEGVQQALLKLIEGTVASVPPQGGRKHPNQEFINVDTTNILFICGGAFAGLEKVIRQRTEKGGIGFGASVHSKDENADITKLFGIVEPEDLIKFGLIPELIGRLPVIATLEELDEDALINILTEPKNALVKQYQALFGMENVELEFEEGALRSIAWQAMERKTGARGLRSIVERCLLDTMYRLPDLQGLKKVVVGKAVIEEGKEPELVFES

SEQ ID NO: 31201 - protein, 528 aa, Neisseria meningitidis; identical to SEQ ID NO: 2150

SEQ ID NO: 31202 - protein, 383 aa, Neisseria meningitidis; identical to SEQ ID NO: 4852

SEQ ID NO: 31203 - protein, 87 aa, Neisseria meningitidis; identical to SEQ ID NO: 205

SEQ ID NO: 31204 - protein, 212 aa, Neisseria meningitidis; identical to SEQ ID NO: 3536

SEQ ID NO: 31205 - protein, 405 aa, Neisseria meningitidis; identical to SEQ ID NO: 7017

SEQ ID NO: 31206 - protein, 1023 aa, Neisseria meningitidis
MNERNQLEVKGNGQYSTIKDKDRERKFIYNKDRGGGGSVFFDNTDTLVSQQRGTAVFGTATYLPPYGKVSGFDADGLQKRNNAVDWIHTTQAGLAGYAYTDVICRSNQCPQLVYETKFSFDGIGLAKNAGSLDRHPDPSRENSPIYKLKDHPWLGVSFNLGSENTVKDGKSFNKLISSFSEGNNNQTIVSTTRGHSISLSDWKREHTAMAYYLNAKLHLLDKKGIEDIAQGKTVDLGTLRPRVEATVRRGELLNFWATWKIEDKGNITVRLGLPEVKAGRCTNKSNPNPKSKAPSPALTAPALWFGAGQDGKAEMYSASVSTYPDSSSSRIFLQNLKRKNDPSKPGRYSLADLNASDIQSKEPTFTSRQTVIRLDKGVHQIKLQGNEVANFNGNDGKNETFGIVKDLGVDPDASEWKKVLLPWTVRASNDDDQFNTFNKEENNGKPKYSQKYRSRDNGKHERNLGDIVNSPIVAVGEYLATSANDGMVHIFKKGNGGDERNYSLKLSYIPGTMPRKDIESKDSTLAKELRAFAEKGYVGDRYGVDGGFVLRKVNNLNGQDRVFMFGAMGFGGRGAYALDLTKADSSNPTGVSLFDVKNDNNNGKNGNNSVELGYTVGTPQIGKTHNGKYAAFLASGYATKEINNNDNKTALYVYDLENSNGNGTLIKKIEVPNGKGGLSSPTLVDKDLDGTVDIAYAGDRGGKMYRFDLSSQSPDQWTVRPIFEGTKPITSAPAISQLKDKRVVIFGTGSDLSEEDVDNMEEQYIYGIFDDDTATTGTVNFSGSGGGLLEQVLRRDNDNKTLFLTDYKRSDGSGNKGWVVKLKDGQRVTVKPTVVLRTAFVTIHKYTGTDKCGAETAILGINTADGGKLTKKSARPIVPEANTAVAQYSGHKKGTNGKSIPIGCMQKSNEIVCPNGYVYDKPVNVRYLDEKKTDGFSTTADGDAGGSGIDPDGKRSGKNNRCFSQKGVRTLLMNDLDSLDITGPTCGMKRISWREVFYWICTRKCRPKGFGRHFLRFSGGAGS

SEQ ID NO: 31207 - protein, 592 aa, Neisseria meningitidis
MTVLKLSHWRVLAELADGLPQHVSQLARMADMKPQQLNGFWQQMPAHIRGLLRQHDGYWRLVRPLAVFDAEGLRELGERSGFQTALKHECASSNDEILELARIAPDKAHKTICVTHLQSKGRGRQGRKWSHRLGECLMFSFGWVFDRPQYELGSLSPVAAVACRRALSRLGLKTQIKWPNDLVVGRDKLGGILIETVRTGGKTVAVVGIGINFVLPKEVENAASVQSLFQTASRRGNADAAVLLETLLAELDAVLLQYAQDGFAPFVAEYQAANRDHGKAVLLLRDGETVFEGTVKGVDEQGVLHLETAEGKQTVVSGEISLRPDNRPVSVPKRRDSERFLLLDGGNSRLKWAWVENGTFATVGSAPYRDLSPLGAEWAEKADGNVRIVGCAVCGEFKKAQVQEQLARKIEWLPSSAQALGIRNHYRHPEEHGSDRWFNALGSRRFSRNACVVVSCGTAVTVDALTDDGHYLGGTIMPGFHLMKESLAVRTANLNRHAGKRYPFPTTTGNAVASGMMDAVCGSVMMMHGRLKEKTGAGKPVDVIITGGGAAKVAEALPPAFLAENTVRVADNLVIHGLLNLIAAEGGESEHT

SEQ ID NO: 31208 - protein, 275 aa, Neisseria meningitidis
LWVAVSCLFAGWLYFELAGNPGYGAAVAKEKVLEFFTGYILEKSLAVDNIFVFLMIFGYFKVAPQFQHRVLLYGVLGALVLRTVMIFVGAALVQQFEWILYLFGAFLLYTGIHMMKPEGDEEGDLANSRLLNAVKKVVPVGTEFHGEKFFTVENGKKIATPLFLVLVMIELSDVVFAVDSIPAVFAVTTDPFIVLTSNIFAILGLRAMYFLLADVAERFIFLKYGLAFVLGFIGVKMLVMHWVHIPISVSLSVVFGALGASILTSLIYTKKQSDK

SEQ ID NO: 31209 - protein, 517 aa, Neisseria meningitidis; identical to SEQ ID NO: 26990

SEQ ID NO: 31210 - protein, 787 aa, Neisseria meningitidis
MQFSYSWLKTQADTELSSDKLEHLLTMSGLEVEEAETAAPAFAGVVIAEVKSVEKHPDADRLNVTRVDVGTGELVQIVCGAPNVKAGIKVPCSLPGAVLPGNFKIKPTKMRGVVSNGMLCSTDELGLPDDGVNGLHILPEDAPVGTNIREYLDLDDTLFTLKITPNRADCLSVKGIAREVSALTGCAFRQPEIRKMPSEGGKTRAVKIDAPADCGRFISRVIENVNAKAATPDWMKQRLERSGIRSISVLVDIGNYVMLEIGQPMHVFDADKLSGSLHIRRAREGETLECLNEKTVSLSENTLVVADEKGALSLAGLMGGAASAVSDGTQNIVLEAAWFAPEIIAGKSRQYGFGSDSSFRFERGVDYRLQADAIERATELVLQICGGAAGEMVEAQGELPEAKQVGLRLDRLKTVLGVDIPAEQVETILQHLGLQPEKTAEGFRVTAPSFRFDIEIEADLIEEIGRVYGYENIPDDYTSGRLKMLELPETRRPRFAVYNEMAARGYREVVSYAFVDEQWEQDFAANADPIRLQNPLAAQYAVMRSTLIGGLVEILQNNLNRKQNRVRVFEIARVFGKGSDGQFVQNERIGGLWYGAAMPEQWGGKTRNADFYDIKADVENLLKNKAVEFVKTGHPALHPGRAANIVSDGKVIGFVGELHPKWLQKYDLPQAPLVFEIDMAAVLECGKTRYRAVSKFQPVRRDLAFVMPEAMSHDDLLLVLEGAANKLVQEISVFDVYRGTGLPEGMKSVAVKVILQDMENTLTDEAVEPLIGKLIGAATAAGARLRS

SEQ ID NO: 31211 - protein, 91 aa, Neisseria meningitidis; identical to SEQ ID NO: 22710

SEQ ID NO: 31212 - protein, 1277 aa, Neisseria meningitidis
MTTTTAPQRIREIPYNYTSYTDREIVIRLLGNEAWQILQDLRGQRKTGRSARMLFEVLGDIWVVVRNPYLVDDLLEHPKRRAALIREMRHRLNEIRKRRDDNRQVDVLVAAAEKAVERFDSSFDETSQKRRQILERLSKITKPHNIMFDGLARVTHVTDATDWRVEYPFVVVNPDTEAEIAPLVRALIELDLVIIPRGGGTGYTGGAIPLDAMSAVINTEKLDKHNGVEFVELAGLDGKHPIIHCGAGVVTRRVEETAHQAGLVFAVDPTSADASCVGGNVAMNAGGKKAVLWGTALDNLAYWQMVNPQGEWLRIERVRHNFGKIHDEETAVFDVHTLDSDGLNIVKTERLEIPGHKFRKVGLGKDVTDKFLSGLPGVQKEGTDGIITGVAFVLHKMPKYTRTVCMEFFGTVATATPSIVEIRDFLLAHDSVRLAGLEHLDWRYVRAVGYATKAAGKGRPKMVLLADVVSDDEAAVEAAAEHICELARARDGEGFIAVSPEARKTFWLDRSRTAAIAKHTNAFKINEDVVIPLERLGEYSDGIERINIELSIQNKLKLCAALEQYLSGKLPIDKMGTDLPTAELLGERGKHALAHVSAVKTRWEWLLANLDTPLADYKARYGAAVHAAPEAKDDESCFIAFRDFRLRVSVKADVMKPLAEIFSGKTDTKIIQGLGKIHAKTVRSRVFVALHMHAGDGNVHTNIPVNSDDAEMLQTAYRSVERIMKIARSLGGVISGEHGIGITKLEFLTDEDLQPFWDYKNQVDPKHTFNRHKLMKGSDLRNAYTPSFELLGAESLIMEKSNLGTIADSVKDCLRCGKCKPVCSTHVPRANLLYSPRNKILGVGLLTEAFLYEEQTRRGVSVKHFEELADIGDHCTVCHRCVKPCPVNIDFGDVTVAVRNYLADSGHKRFAPAASMGMAFLNATGPKTIKVLRAAMIQTGFPAQNFAYKIGKLLPVGTKKQKAEPKATVGKAPIKEQVIHFINRPLPKNVPAKTPRSLLGIEDGKSIPIIRNPAAPEDAEAVFYFPGCGSERLFSQIGLAVQAMLWHVGVQTVLPPGYMCCGYPQDAGGNKAKAEEMSTNNRVAFHRMANTLNYLDIKTVVVSCGTCYDQLEKYRFEEIFPGCRIIDIHEYLLEKGVKLDGVQGQQYLYHDPCHTPIKTMNATQMASSLMGQKVVLSDRCCGESGMFAVKRPDIATQVKFRKQEEIEKNLKELPQGEPVKMLTSCPACLQGLSRYADDNNMPADYIVIEMAKHILGENWLDEFVKKANNGGVEKVLL

SEQ ID NO: 31213 - protein, 416 aa, Neisseria meningitidis
MTKLTRRQIIRRTAGTLFALSPIASAVAKTVRAPQFTAARIWPSHTYTRLTLESTAALKYQHFALDNPGRLVVDIQNANINTVLHGLSQKVAADDPFIRNIRAGQNTPDTVRLVIDLKQPSYAQVFSLPPVGGFKNRLVVDLYPQGMDPDDPMMALLNGSLNKTRRGSPEADLAQNTPAQTERGKNGRRPVIMIDPGHGGEDPGAVSPGGLQEKHVVLSIARETKKQLEALGYNVFMTRNEDVFIPLGVRVAKGRARRADVFVSIHADAFTSPSARGTGVYMLNTKGATSSAAKFLEQTQNNADAVGGVPTSGNRNVDTALLDMTQTATLRDSRKLGKLVLEELGRLNHLHKGRVDEANFAVLRAPDMPSILVETAFLSNPAEEKLLGSESFRRQCAQSIASGVQRYINTSVLKRG

SEQ ID NO: 31214 - protein, 248 aa, Neisseria meningitidis; identical to SEQ ID NO: 356

SEQ ID NO: 31215 - protein, 321 aa, Neisseria meningitidis; identical to SEQ ID NO: 6649

SEQ ID NO: 31216 - protein, 354 aa, Neisseria meningitidis
MEKEFRILNIVSAKIWGGGEQYVYDVSKALGLRGCTMFTAVNKNNELMHRRFSEVSSVFTTRLHTLNGLFSLCALTRFIRENRISHLMIHTGKIAALSILLKKLTGVRLIFVKHNVVANKTDFYHRLIQKNTDRFICVSRLVYDVQTADNPFKEKYRIVHNGIDTDRFPPSQEKPDSRFFTVAYAGRISPEKGLENLIEACVILHRKYPQIRLKLAGDGHPDYMCRLKRDVSASGAEPFVSFEGFTEKLASFYRQSDVVVLPSLVPEAFGLSLCEAMYCRTAVISNTLGAQKEIIEHHQSGILLDRLTPASLADEIERLVLNPEAKNALATAGHQCVANRFTINHTADKLLDAI

SEQ ID NO: 31217 - protein, 113 aa, Neisseria meningitidis; identical to SEQ ID NO: 6572

SEQ ID NO: 31218 - protein, 160 aa, Neisseria meningitidis; identical to SEQ ID NO: 2526

SEQ ID NO: 31219 - protein, 336 aa, Neisseria meningitidis
MSDTPATRDFGLIDGRAVTGYVLSNRRGTRVCVLDLGGIVQEFSVLADGVRENLVVSFDDAASYADNPFQINKQIGRVAGRIRGAAFDINGRTYRVEANEGRNALHGGSHGLAVTRFNAVAADGRSVVLRSRLQQSADGYPNDLDLDISYRLDEDDRLTVSYRATALGDTVFDPTLHIYWRLDAGLHDAVLHIPQGGHIPADAEKLPVSTVLDDLEVFDFSRPKPLDAAVAALRRETGRAGFDDAYRVPSDIGRPAAVLQAGRRRRISIYSDRNGLVIFTAAPQDFARHDAGVYDALATEAQTLPDSLNWPEFGNIRLNKGDTREATIAYGIESLS

SEQ ID NO: 31220 - protein, 286 aa, Neisseria meningitidis; identical to SEQ ID NO: 19802

SEQ ID NO: 31221 - protein, 96 aa, Neisseria meningitidis; identical to SEQ ID NO: 2317

SEQ ID NO: 31222 - protein, 430 aa, Neisseria meningitidis
MQFSAFGEKFTQHSGILQLMDDLGDALKSDKPVNMLGGGNPARIPEIDRAFADIFSKLAAEHAVENIGNYSNPQGDAALIDALTAFLNREYGWNLTADNIALTNGSQNAFFYLFNLFGGKFKLSDGTSAEKAILLPLAPEYIGYADVHIEGQHFVSVKPKIENVEHEGEAGFFKYRVDFDALENLPELKAGKIGAICCSRPTNPTGNVLTDGEMARLDALAREHGIPLIIDNAYGMPFPNIIYSDVTLNWHENIILCFSLSKVGLPGVRTGIIVAAPEVVKAVSSLNAIVNLAPTRFGAAIAAPLLESGEMKRLADQVIRPFYRNQAQTAVSLLKRELGAYPMKIHKPEGAIFLWLWFENLPVSSQTLYEMLKAEGTLIIPGEHFFVGIDTQDYPHAGECIRMSIAQDAQTLEKGIAAIGKTVRKLYDNV

SEQ ID NO: 31223 - protein, 703 aa, Neisseria meningitidis
MKISFHLALLPTLIIASFPVAAADTQDNGEHYTATLPTVSVVGQSDTSVLKGYINYDEAAVTRNGQLIKETPQTIDTLNIQKNKNYGTNDLSSILEGNAGIDAAYDMRGESIFLRGFQADASDIYRDGVRESGQVRRSTANIERVEILKGPSSVLYGRTNGGGVINMVSKYANFKQSRNIGAVYGSWANRSLNMDINEVLNKNVAIRLTGEVGRANSFRSGIDSKNVMVSPSITVKLDNGLKWTGQYTYDNVERTPDRSPTKSVYDRFGLPYRMGFAHRNDFVKDKLQVWRSDLEYAFNDKWRAQWQLAHRTAAQDFDHFYAGSENGNLIKRNYAWQQTDNKTLSSNFTLNGDYTIGRFENHLTVGMDYSREHRNPTLGYSRAFTASIDPYDRASWPASGRLQPILTQNRHKADSYGIFVQNIFSATPDLKFVLGGRYDKYTFNSENKLTGSSRQYSGHSFSPNIGAVWNINPVHTLYASYNKGFAPYGGRGGYLSIDTSSSAVFNADPEYTRQYETGVKSSWLDNRLDTTLSAYQIERFNIRYRPDAENNPYTWAVGGKHRSRGVELSAIGQIIPKKLYLRGSLGVMQAKVVEDKKNPDRVGIHLNNTSNVTGNLFFRYTPTENLYGEIGVTGTGKRYGYNSRNKEVTTLPGFARVDAMLGWNHKNVNVTFAAANLFNQKYWRSDSMPGNPRGYTARVNYRF

SEQ ID NO: 31224 - protein, 367 aa, Neisseria meningitidis
  misc_feature 361, 362: 'Xaa' is any amino acid
MVHELDLLPDAVAATLLADIGRYVPDWNLLVSERCNSTVAELVKGVDEVQKLTHFARVDSLATPEERAQQAETMRKMLLAMVTDIRVVLIKLAMRTRTLQFLSNAPDSPEKRAVAKETLDIFAPLANRLGVWQLKWQLEDLGFRHQEPEKYREIALLLDEKRTERLEYIENFLNILRGELKKYNVHFEVAGRPKHIYSIYKKMVKKKLSFDGLFDIRAVRILVDTVPECYTTLGIVHSLWQPIPGEFDDYIANPKGNGYKSLHTVIVGPEDKGVEVQIRTFDMHQFNEFGVAAHWRYKEGGKGDSAYEQKIAWLRQLLDWRENMAESGKEDLARLQNRAFQRHDLLSDPHGKSSPATGATXXTHLIN

SEQ ID NO: 31225 - protein, 164 aa, Neisseria meningitidis; identical to SEQ ID NO: 6738

SEQ ID NO: 31226 - protein, 94 aa, Neisseria meningitidis
MPDSIVYTDSLSSYDKLDVSGFIHYRINHSKEFADRQNHINGIENFWNQAKRVLRKYNGIDCKSFPLFLKECEFRFHFGTPSQQLKILRDWCGI

SEQ ID NO: 31227 - protein, 626 aa, Neisseria meningitidis
MNIFYEESGQFKVAAVVQKNDATYQVDTQHGKRTKVKANNVFAEFDGDMAAFLENAQAQAADIDTDLLWEVCGEEEFAAEAIAEEYYGHAPTKTELAATLIALYAAPVYFYKKAKGVFKAAPEETLKQALAAIERKKQQDAQIDAWAEALKRGEMPSEIAADLKTILHAPDKQSLTYKAFTKAADALKTSAYELAKKTGGITSIPQYLQDGFEIKYFPKGTGFPDLPLPEMPDLPKADVTAFSIDDESTTEVDDALSLTDLDNGTKRVGIHIAAPSLAIKQGDKMEKNIMERLSTVYFPGGKITMLPENWIAAFSLDAGAHRPAVSIYFDVDGEFNVGAPTCKIEAVNISENLRIQAIEPHFNAEAGLDEAGEMMFAHHQDLIWFYQFATALQKARGKYEPDRAPQYDYSIELDEEGKVSVVRRERGSPIDTLVSEMMILANSTWAQMLHDNDLPGLFRVQPAGKVRMSTKSEPHIGMGVQHYGWFTSPLRRAADYINQKQLISLIDDTAEPLYQNSDAELFAALRDFDAAYTAYADFQRQMEAYWSLVYLQQQGISELTATILKEDLVRIEGLPLVTRATGIPFDALPKSQALFKITELDAEKQFVSLNYIKAVAPAGTTAGNAV

SEQ ID NO: 31228 - protein, 83 aa, Neisseria meningitidis
LPANNGIIRALSPPFTGINIRLFAALGLLSLSGAAAQASVYHCNLNVKSVYTSAPAGSCADADLPKISSHQGGGYRLKIKKLS

SEQ ID NO: 31229 - protein, 658 aa, Neisseria meningitidis
MPRIAALPDHLVNQIAAGEVVERPANALKEIVENSIDAGATAIDVELDGGGIRLIRVSDNGSGIHPDDIELALHRHATSKIKTLNDLEHVASMGFRGEGLASIASVSRLTLTSRQEDSSHATQVKAEDGKLSSPTAAAHPVGTTIEAAELFFNTPARRKFLKSEATEYAHCATMLERLALAHPHIAFSLKRDGKQVFKLPAQSLHERIAAIVGDDFQTASLEIDSGNGALRLYGAIAKPTFAKGKTDKQYCFVNHRFVRDKVMLHAVKQAYRDVLHNALTPAFVLFLDLPPEAVDVNVHPTKTEIRFRDSRQVHQLVFHTLNKALADTRADLTESVGNAGEVLHDITGVTPAPMPSENDSENLFNRASDYPTGNKPDTRNAFGASGKTAPMPYQSAYAPQQRSLSLRESRAAMNTYAELYKKTDDIDLELSRFEQARFGNMPSETPAPQTDTPLSDGIPSPSELPPLGFAIAQLLGIYILAQAEDSLLLIDMHAAAERVNYEKMKRQRQENGKLQSQRLLIPVTFAASHEECAALADYAETLAGFGLELSDMGGNTLAVRAVPAMLGKADVVSLAKDVLNELAQVGSSQTIEEHENRILATMSCHGSIRAGRRLTLPEMNALLRDMENTPRSNQCNHGRPTWVKLTLKELDALFLRGQ

SEQ ID NO: 31230 - protein, 147 aa, Neisseria meningitidis
MKKQITAAVMMLSMIAPAMANGLDNQTFENQVFHTQADAPMQLAELSQKEMKETEGAAAPLVAIGILHAGRFLAQRWVTQRVAAQALSRGANVYARTSQQARAVANQAWGRQNVIRHGQKEIHSNYSHFQNSSQKIRGHAFYGNKHR

SEQ ID NO: 31231 - protein, 98 aa, Neisseria meningitidis; identical to SEQ ID NO: 7463

SEQ ID NO: 31232 - protein, 214 aa, Neisseria meningitidis
  misc_feature 3, 4: 'Xaa' is any amino acid
VCXXYRYLRQDKSNGSTLWQHLRICSKPYRKRYGSTWTRGKVPNRVGIENRPAIVDQKSRIGDWEADTIVGKGQKSALLTLVERVTRYTIICKLDSLKAEDTARAAVRALKAHKDRVHTITMDNGKEFYQHTKITKALKAETYFCRPYHSWEKGLNENTNGLIRQYFPKQTDFRNISDREIRRVQDELNHRPRKTLGYETPSVLFLNLFQPLIH

SEQ ID NO: 31233 - protein, 75 aa, Neisseria meningitidis
MAKIKIIPTRSFFDGEQTFATGKKYSVDESAVAVYIREGWAAEAPAKEAESPVADGGEAEDSGNASGEGGEDGSV

SEQ ID NO: 31234 - protein, 99 aa, Neisseria meningitidis
LQRSQPIFCSSYRNIYKTSDFRVSRFRQFKIGKTRQPASQGRFLKLYQAFGHIGSTGPHFRQSTLPTVAAFLFDIQSHFQKTYAGNKIILPRLANIPAN

SEQ ID NO: 31235 - protein, 158 aa, Neisseria meningitidis
MPVEIERRFLIGNDNWRQYADEPLLLRQGYLSVEKERTVRVRIAGQRAWLTLKGYISELSRSEFEYEIPLADAEKMMETMCPFKMEKWRYPVRWGGSLFEIDVFLGDNAPLVVAEIELPDENADFDRPDWLGREITADGMFTNAYLSRHPFSSWKNAV

SEQ ID NO: 31236 - protein, 338 aa, Neisseria meningitidis; identical to SEQ ID NO: 8361

SEQ ID NO: 31237 - protein, 415 aa, Neisseria meningitidis; identical to SEQ ID NO: 846

SEQ ID NO: 31238 - protein, 142 aa, Neisseria meningitidis
MINHIEKYTGTISHGSKSDSGSQYKLNIAAIPSSPNRDLKTYITLGLSKHDLNYKSRFEILFVCSLKYDENQIFPFLRWLAETIIENKKILLRGQVVYLPRSIVDSTKMDALYVSAPFYFDDDFQVCYGDTTISFSLCLSLV

SEQ ID NO: 31239 - protein, 659 aa, Neisseria meningitidis
MSQLANAIRFLSADAVQKANSGHPGAPMGMAEMAETLWTKFLNHNPANPKFYNRDRFVLSNGHASMLLYSLLHLTGYNLSIEDLKNFRQLHSKTPGHPEYGYTDGVETTTGPLGQGIANAVGMALAEKILAAEFNKDGLNIVDHYTYVFMGDGCLMEGVSHEACSLAGTLGLGKLIVLYDDNNISIDGKVDGWFTENIPQRFESYGWHVVPNVNGHDTAAIQAAIEAARAETGKPSIICCKTLIGKGSANKEGSHKTHGAPLGADEIEATRKHLGWTYPAFEIPQEIYDAWNAKEKGAKLEAEWNELFAQYQAKYPAEAAEFVRRMDKKLPDNFDEYVQAALKEVCAKAETIATRKASQNSIEILAKELPELVGGSADLTPSNLTDWSNSVSVTRDKGGNYIHYGVREFGMGAIMNGLVLHGGVKPFGATFLMFSEYERNALRMAALMKINPVFVFTHDSIGLGEDGPTHQPIEQTATLRLIPNMDVWRPCDTAESLVAWAEAVKAADHPSCLIFSRQNLKFQARSEQQLDDIKRGGYIISEAQGNAQAVIIATGSEVELALEAQKALAAQNIAVRVVSMPSTNVFDRQDAAYQAAVLPESLPRIAVEAGHADGWYKYVGLNGAVVGINRFGESAPADLLFKAFGFTVDNVVDTVKSVL

SEQ ID NO: 31240 - protein, 272 aa, Neisseria meningitidis
MKKDHLNTTGFDLWHTIREETAAAVSAEPMLASFLHQTVLRHESLGSVLAYHLSSKLGSPIMDVRALFEIYQQALGSDTQIGKCVEADLKAIYERDPACDEYSLPLLYFKGFHAIQAHRINHRLYLDGRKTLAYFLQNRMSEVFGVDIHPAARFGYGLMLDHATGFVAGETAVLGNNISILHGVTLGGSGKECGDRHPKIGDGVMIGANASILGNIRIGSNAKIGAGSVVVSDVPPSITVVGVPAKPVARSLKTPSADMDQNIQFTEIDFMI

SEQ ID NO: 31241 - protein, 245 aa, Neisseria meningitidis
MLLIPAIDLKEGRCVRLRQGLMEEATVFSDSPAETALHWFEQGARRLHLVDLNGAFAGVPQNLPAIKDILAAVAKDIPIQLGGGIRDLKTIGQYLDLGLNDVIIGTAAVKNPDFVREACKAFPGRIIVGLDAKDGMAAIDGWATVTGHHVIDLAKRFEDDGVNSIIYTDIGRDGMMSGVNIDATVKLAQAVRIPVIASGGLTGLDDIRALCAAEKHGVAGAITGRAIYEGSIDFAQAQQLADSLD

SEQ ID NO: 31242 - protein, 306 aa, Neisseria meningitidis; identical to SEQ ID NO: 4339

SEQ ID NO: 31243 - protein, 390 aa, Neisseria meningitidis; identical to SEQ ID NO: 1090

SEQ ID NO: 31244 - protein, 153 aa, Neisseria meningitidis; identical to SEQ ID NO: 750

SEQ ID NO: 31245 - protein, 841 aa, Neisseria meningitidis
MNPNSKHNTDLTNLLKPSDSDIKQFAAQHIRHLTDLLNRYAYEYYTLDAPSVPDAEYDKLFRELEALELNHPELKLPDSPTQRVGGEPLAGFAEIRHEVPMLSLTNAFSPQDENGVFDHAEMYAFDQRVRDGLDGGKPEYVIEPKFDGLAISLLYRDGVLIQAATRGDGTTGEDVTQNVKTVANIPLRLHGENTPELIEVRGEVLMQKADFAALNKRQAENGQKPFANPRNAAAGSLRQLDSRITAQRKLHFFPYSVARQQDGFVAEEHIQELAYFQALGFSLPNGNFGCFKNIDEVLAFYEHMQQKRPELPYEIDGMVVKVNSLAQQHELGFISRAPRWAVAHKFPAEEALTIVEAIDVQIGRTGAVTPVARLQPVFVGGVTVTNATLHNQDEVSRKDVRVGDTVVVRRAGDVIPEVVRVIFERRPMRETAVAVSDGIGHRQDDLFAETPSANQTQSVPLHKPYRLPTHCPICRSEIEREEGEAVARCSGGMLCQAQRAQGLIHFASRKAMDIDGLGEKQIEQLVAQDLVRHFADLYRLDIPTLQKMKETADKTVAESDQMPSEGSSVGASGKHKKQPVKWAENILAGIEASKTPELARFLFALGIRHVGERTAKTLAQAFGTLERVRRAPEPVLACLPDIGTVVARSIAHFFAQAEQQAMIDELLAAGVAPQTQAVTIPPARHAEPQRWIARLPGFKISENKAQALWELAGKNIEGLQTDKALPTDWQAWRSEPQNAALLENLKTFFAQMPSEDEAAQGSDGINKAVAGKTFVLTGTLPTLKRDQAQSLIEAAGGKVSGSVSKKTDYVVAGEAAGSKLEKANALGVSVLSEAELLTLLG

SEQ ID NO: 31246 - protein, 187 aa, Neisseria meningitidis; identical to SEQ ID NO: 25357

SEQ ID NO: 31247 - protein, 451 aa, Neisseria meningitidis
MSIQSGEILETVKMVADQNFDVRTITIGIDLHDCISSDINVLNQNIYNKITTVGKDLVATAKHLSAKYGVPIVNQRISVTPIAQIAAATKADSYVSVAQTLDKAAKAIGVSFIGGFSALVQKGMSPSDEVLIRSIPEAMKTTDIVCSSINVGSTRAGINMDAVKLAGETIKRTAEITPEGFGCAKIVVFCNAVEDNPFMAGAFHGSGEADAVINVGVSGPGVVKAALENSDATTLTEVAEVVKKTAFKITRVGELIGREASKMLNIPFGILDLSLAPTPAVGDSVARILEEMGLSVCGTHGTTAALALLNDAVKKGGMMASSAVGGLSGAFIPVSEDEGMIAAAEAGVLTLDKLEAMTAVCSVGLDMIAVPGDTPAHTISGIIADEAAIGMINSKTTAVRIIPVTGKTVGDSVEFGGLLGYAPVMPVKEGSCEVFVNRGGRIPAPVQSMKN

SEQ ID NO: 31248 - protein, 76 aa, Neisseria meningitidis; identical to SEQ ID NO: 374

SEQ ID NO: 31249 - protein, 608 aa, Neisseria meningitidis
LGISRKISLILSILAVCLPMHAHASDLANDSFIRQVLDRQHFEPDGKYHLFGSRGELAERSGHIGLGKIQSHQLGNLMIQQAAIKGNIGYIVRFSDHGHEVHSPFDNHASHSDSDEAGSPVDGFSLYRIHWDGYEHHPADGYDGPQGGGYPAPKGARDIYSYDIKGVAQNIRLNLTDNRSTGQRLADRFHNAGSMLTQGVGDGFKRATRYSPELDRSGNAAEAFNGTADIVKNIIGAAGEIVGAGDAVQGISEGSNIAVMHGLGLLSTENKMARINDLADMAQLKDYAAAAIRDWAVQNPNAAQGIEAVSNIFTAVIPVKGIGAVRGKYGLGGITAHPVKRSQMGAIALPKGKSAVSDNFADAAYAKYPSPYHSRNIRSNLEQRYGKENITSSTVPPSNGKNVKLADQRHPKTGVPFDGKGFPNFEKHVKYDTKLDIQELSGGGIPKAKPVSDAKPRWEVDRKLNKLTTREQVEKNVQEIRNGNKNSNFSQHAQLEREINKLKSADEINFADGMGKFTDSMNDKAFSRLVKSVKENGFTNPVVEYVEINGKAYIVRGNNRVFAAEYLGRIHELKFKKVDFPVPNTSWKNPTDVLNESGNVKRPRYRSK

SEQ ID NO: 31250 - protein, 351 aa, Neisseria meningitidis; identical to SEQ ID NO: 1414

SEQ ID NO: 31251 - protein, 99 aa, Neisseria meningitidis; identical to SEQ ID NO: 15935

SEQ ID NO: 31252 - protein, 350 aa, Neisseria meningitidis; identical to SEQ ID NO: 5151

SEQ ID NO: 31253 - protein, 284 aa, Neisseria meningitidis
MPPIPAPSAPSEHTVAWVFGQPVTDLPQDLFIPPDALKVVLGSFQGPLDLLLYLIRKQNIDVLDIPMVKITEQYLHYIAQIEAYQFDLAAEYLLMAAMLIEIKSRLLLPRTETVEDEEADPRAELVRRLLAYEQMKLAAQGLDALPRAGRDFAWAYLPLEIAVEAKLPEVYITDLTQAWLGILSRAKHTRSHEVIKETISVRAQMTAILRRLNKHGICRFHDLFNPEQGAAYVVVNFIALLELAKEGLVGIVQEVGFGEIRISLNHEGAHSDGISGTRGGRDVF

SEQ ID NO: 31254 - protein, 348 aa, Neisseria meningitidis; identical to SEQ ID NO: 7414

SEQ ID NO: 31255 - protein, 191 aa, Neisseria meningitidis
  misc_feature 3, 4: 'Xaa' is any amino acid
VCXXPSAAVYRARKNNLATAAGRDPSGNTYYRAANQAKTHGWEIEVGGRITPEWQIQAGYSQSKTRDQDGSRLNPDSVPERSFKLFTAYHFAPEAPSGWTIGAGVRWQGETHTDPATLRIPNPAAKARAADNSRQKAYAVADIMARYRFNPRAELSLNVDNLFNKHYRTQPDRHSYGALRTVNAAFTYRFK

SEQ ID NO: 31256 - protein, 449 aa, Neisseria meningitidis
MANQTNSKAKALLGWMDARFPLSKMWNEHLAQYYAPKNFNFWYYFGSLALLVLVIQIVSGIFLTMNYKPDGNLNAYHLPAAFTAVEYIMRDVSGGWIIRYMHSTGASFFFIVVYLHMFRGLIYGSYKKPRELVWIFGSLIFLALMAEAFMGYLLPWGQMSFWGAQVIINLFSAIPVIGPDLSTWIRGDFNVSDVTLNRFFALHVIAVPLVLLGLVVAHIIALHEVGSNNPDGVEIKKNKDENGIPRDGIPFHPYYTVKDILGVVVFLIVFCSVLFFAPEGGGYFLEAPNFDAANALKTPPHIAPVWYFTPFYAILRAIPSFLGTQVWGVIGMGAAVVLIALLPWLDRGEVKSVRYRGPIFKTALVLFIISFIGLGILGAMVATDTRTLVARILSFVYFAFFLGMPFYTKLDKNKPVPERVTMSTAKQKIMFFVYVGITAVGAYLFATNI

SEQ ID NO: 31257 - protein, 324 aa, Neisseria meningitidis; identical to SEQ ID NO: 24794

SEQ ID NO: 31258 - protein, 468 aa, Neisseria meningitidis
MTAAPDILYRQAAALLEQSNTAQALPLLQQAAEQGYTEAAFVLGNHLLKNGHPEQALPWLEAAAAQRHPKALFTLLQQREHNGTPTGQLLNEYAWLSEQGHLEAQLILMRYHTQRNDPQSLYWAELAAAQYAAPAYYHLARHHQRQGDVATAIEQYEKAAALGITAACWQLGQIYFYGTGVSPNHAQAEHYLEQAAQAGHIAAQTLLADLLAAQRKPEALEWYRRAANKEQAEAQAKLAQYALTGELSERDPFQAARYAKAAAEKDHPEALKIMGDLYRYGLGIKADNHIAHDYYHRAAALGSAAAAQKLISDAALYHPQQYEQIKTAALQQQQTETIYRLAEAQACAIGRPADYNAARKNYMEAAGFHHKNAAAALGRIYHYGLGTAQDPRAAAHWYAIAAEQNHPSAQYHLACFYYHGQGVGCHVPTACYWLQAAIGNGHTSAESLISLLEQWRREAHHAIGQKAV

SEQ ID NO: 31259 - protein, 291 aa, Neisseria meningitidis; identical to SEQ ID NO: 122

SEQ ID NO: 31260 - protein, 291 aa, Neisseria meningitidis; identical to SEQ ID NO: 9462

SEQ ID NO: 31261 - protein, 441 aa, Neisseria meningitidis
MPAPDLGFALSLPPKKAIEWLESKKVTAESYRNLTASEIAKVYTIARMTDLDMLNDIKTSMVESAKSGQSFDDWRKGILNLLSNKGWLHPNGHNGKDIIDPATGEVFGSPRRLETIYRTNMQTAYNAGQYQGYMANIDARPYWMYDAVGDSRTRPAHSAIDGLVYRYDDPFWATFYPPNGYNCRCSVIALSERDVERQGRIVGQSTADNLVETHKIYNKKGDSYPTTAYKAPDGSLYTADKGFGYNAGRMNYRPDLDKYDRALAHQFAKAEMGGADFKTSFKQLEKEFYEVKQRLNIDGKPDKEQKIKIRNALSRQLKFAAGVLSKEMQELAGMTRATVWLSDDTLVKQVDSREGQSFGTDLYAMLPDLIHEPEYIFYDKSRGKESFVLLGKPLEGNEKYRLMAVLKYLPQYDSIFLDSFRRADEKEIVKSKKRYEMKKGY

SEQ ID NO: 31262 - protein, 103 aa, Neisseria meningitidis
MHFKGFKAADVHFIRSGSDLVLSASEQDNVRISGFFYGENHRVDTFVFDDAAISNPDFAKYINAGNNLVQSMSVFGSNTAATGGNVDANIQSVQQPLLVTPSA

SEQ ID NO: 31263 - protein, 469 aa, Neisseria meningitidis
MTSTFPRRLARKIRQTRRLSRKSIAFLFLLAGSALVALTALFFAHLADFALELNAKLVQQYPWFAWVALPLGLPLIAWLTRKFAPFTAGSGIPQVIASLSLPYGAQKTRLIRLGQTLLKIPLTFLGMLFGASIGREGPSVQVGAAVMGAWGAWCKKHGLAFKGMQENDLMAAGAAGGLAAAFNAPLAGVIFAIEELGRGIMLRWERQILLGVLASGFIQVAIQGNNPYFSGFNGGVLEHIFLWVALSGLVCGAAGGLFGRLLYRGAAAFAPRKIRGFIRNRPLLLAALMGLLLALLGTFYQGKTYGTGYHEAAQALHGIYEAPFGLAAAKWLATVFSYWAGIPGGIFTPSLTIGAVLGEHIAAIADISQGANIIVLICMAAFLAGATQSPITSAVVVMEMTGGQSLLFWMLIACIFASQVSRQFSPRPFYHASGMRFRQRVLQETTAQTGNAPARPQTANSKTGMPSEN

SEQ ID NO: 31264 - protein, 60 aa, Neisseria meningitidis; identical to SEQ ID NO: 2489

SEQ ID NO: 31265 - protein, 459 aa, Neisseria meningitidis
MLLDLNRFSFSVFLKEVRLLTALALPMLLAQVAQVGIGFIDTVMAGGAGKEDLAAVALGSSAFATVYITFMGIMAALNPMIAQLYGAGKTDEVGETGRQGIWFGLFLGVFGMVLMWAAITPFRNWLTLSDYVEGTMAQYMLFTSLAMPAAMVHRALHAYASSLNRPRLIMLVSFAAFVLNVPLNYIFVYGKFGMPALGGAGCGLATMAVFWFSALALWIYIAKENFFRPFGLTAKFGKPDWAVFKQIWKIGAPIGLSYFLEASAFSFIVFLIAPFGEDYVAAQQVGISLSGILYMIPQSVGSAGTVRIGFSLGRREFSRARYISGVSLVLGWMLAVITVLSLVLFRSPLVSMYNNDPAVLSIAATVLLFAGLFQPADFTQCIASYALRGYKVTKVPMFIHAAAFWGCGLLPGYLLAYRFDMGIYGFWTALIASLTIAAIALVWCLELCSREMVRSHKAV

SEQ ID NO: 31266 - protein, 330 aa, Neisseria meningitidis
MKTHEISKDSVSLIGVAEHEAGQRLDNYLIKILKGVPKSHIHRIIRAGEVRLNKKRCKPDSRIAEGDTVRIPPVRVAEKEMPSERRAAVPARAFEAVYEDDALLVIDKPSGVAVHGGSGVSFGVIEQLRRARPEARYLELVHRLDKDTSGLLMVAKKRSALVKLHEAIRNDHPKKIYLALGVGKLPDDNFHVKLPLFKYTGAQGEKMVRVSADGQSAHTVFRVLSRFSDGILHGVGLSHLTLVRATLKTGRTHQIRVHLQSQGCPIAGDERYGDYQANRRLQKLGLKRMFLHASELHLNHPLTGEPLVLKAELPLDLAQFAVMLENGTKM

SEQ ID NO: 31267 - protein, 233 aa, Neisseria meningitidis; identical to SEQ ID NO: 8818

SEQ ID NO: 31268 - protein, 397 aa, Neisseria meningitidis
MYRHIEYYPGDPILSLVETFKNDPRPEKVNLSIGIYFDDEGKMPVLESVSRAETARAAAPAPSPYLPMEGLDTYRSAVQHLLFGKDNPALAQGRIVTVQTLGGSGALKVGADFLHRWFPEARAYVSDPTWDNHRGIFEGAGFEVGTYPYYDPATVGVKFDEMTAFFNTLPENSVLILHPCCHNPTGVDMSEQQWDEVLHIIKTRKLIPFMDIAYQGFGGDLDSDAYAVRKAVEMELPLFVSNSFSKNLSLYGERVGGLSVVCPNKEEADLVFGQLKFTVRRIYSSPPAHGAYIAADVMNSPELYALWQNEVYMMRDRIRAMRQKLYDVLTAQIPDRDFTYFIKQRGMFGYTGLSVEQVRRLRDEFAVYLLDSGRMCVAGLNTSNTDYVARAFAEVLK

SEQ ID NO: 31269 - protein, 322 aa, Neisseria meningitidis; identical to SEQ ID NO: 1760

SEQ ID NO: 31270 - protein, 572 aa, Neisseria meningitidis
MNLHQTVEREAAAAFTAAGISGSPVVLQPTKNAEHGNFQINGVMGTAKKAKQNPRELAQKVAEALAGNAVIESAEVAGPGFINLRLRPEFLAQNIQTALNDARFGIAKTDKPQTVVIDYSSPNLAKEMHVGHLRSSIIGDSISRVSEFMGNTVIRQNHVGDWGTQFGMLVAYLVEQQKDNAAFELADLEQFYRAAKVRFDEDPAFADTAREYVVKLQGGDETVLALWKQFVDISLSHAQAVYDTLGLKLRPEDVAGESKYNDDLQPVVDDLVQKGLAVEDDGAKVVFLDEFKNKEGEPAAFIVQKQGGGFLYASTDLACLRYRVGTLHADRLLYVVDHRQALHFEQLFTTSRKAGYLPESVGAAFVGFGTMMGKDGKPFKTRSGDTVKLVDLLTEAVERATALVKEKNPELGADEAAKIGKTVGIGSIKYADLSKNRTSDYVFDWDAMLSFEGNTAPYLQYAYTRVQSVFRKAGEWDANAPTVLTEPLEKQLAAELLKFEDVLQSVADTAYPHYLAAYLYQIATLFSRFYEACPILKAEGASRNSRLQLAKLTGDTLKQGLDLLGIDVLDVM

SEQ ID NO: 31271 - protein, 95 aa, Neisseria meningitidis; identical to SEQ ID NO: 738

SEQ ID NO: 31272 - protein, 258 aa, Neisseria meningitidis; identical to SEQ ID NO: 9174

SEQ ID NO: 31273 - protein, 336 aa, Neisseria meningitidis; identical to SEQ ID NO: 6647

SEQ ID NO: 31274 - protein, 512 aa, Neisseria meningitidis
MNMLGALAKVGSLTMVSRVLGFVRDTVIARAFGAGMATDAFFVAFKLPNLLRRVFAEGAFAQAFVPILAEYKETRSKEATEAFIRHVAGMLSFVLVIVTALGILAAPWVIYVSAPGFAKDADKFQLSIDLLRITFPYILLISLSSFVGSVLNSYHKFSIPAFTPTFLNVSFIVFALFFVPYFDPPVTALAWAVFVGGILQLGFQLPWLAKLGFLKLPKLNFKDAAVNRVMKQMVPAILGVSVAQISLVINTIFASYLQSGSVSWMYYADRMMELPSGVLGAALGTILLPTLSKHSANQDTEQFSALLDWGLRLCMLLTLPAAVGLAVLSFPLVATLFMYREFTLFDAQMTQHALIAYSFGLIGLIMIKVLAPGFYARQNIKTPVKIAIFTLICTQLMNLAFIGPLKHVGLSLAIGLGACINAGLLFFLLRKHGIYRPGKGWTAFLAKMLLSLAVMGGGLYAAQIWLPFDWTHTGGMQKAARLFILIVIGGCLYFASLAALGFRPRHFKRVES

SEQ ID NO: 31275 - protein, 160 aa, Neisseria meningitidis; identical to SEQ ID NO: 236

SEQ ID NO: 31276 - protein, 391 aa, Neisseria meningitidis
MLNTSLSPWPCFTQEEADAVSKVLLSNKVNYWTGSECREFEKEFAAFTGTRYAVALANGTLALDTALKAIGIGAGDDVIVTSRTFLASASCIVNAGANPVFADVDLNSQNISAETVKAVLTPNTKAIIVVHLAGMPAEMDGIMALAKEHDLWVIEDCAQAHGAKYKGKSVGSIGHVGAWSFCQDKIMTTGGEGGMVTTNDKTLWEKMWSYKDHGKSYDAVYHREHAPGFRWLHESFGTNWRMMEMQAVIGRIQLKRLPEWTARRQENAAKLAESLGKFASIRLVEVADYIEHAQYKFYTFVKPEHLKDGWMRDRIVNELNARKVPCYQGSCSEVYLEKAFDNTPWRPKERLKNAVELGDTSLMFLVHPTLTDGEIAFCKEHIEAVLTEATR

SEQ ID NO: 31277 - protein, 621 aa, Neisseria meningitidis
MIEKLTFGLFKKEDARSFMRLMAYVRPYKIRIVAALIAIFGVAATESYLAAFIAPLINHGFSAPAAPPELSAAAGIISTLQNWREQFTYMVWGTENKIWTVPLFLIILVVIRGICRFTSTYLMTWVSVMTISKIRKDMFAKMLTLSSRYHQETPSGTVLMNMLNLTEQSVSNASDIFTVLTRDTMIVTGLTIVLLYLNWQLSIIVVLMFPLLSLLSRYYRDRLKHVISDSQKSIGTMNNVIAETHQGHRVVKLFNGQAQAANRFDAINRTIVRLSKKITQATAAHSPFSELIASISLAVVIFIALWQSQNGYTTIGEFMAFIVAMLQMYAPIKSLANISIPMQTMFLAADGVCAFLDTPPEQDKGTLAPQRVEGRISFRNVDVEYRSDGIKALDNFNLDIRQGERVALVGRSGSGKSTVVNLLPRFVEPSAGNICIDGIDIADIKLDCLRAQFALVSQDVFLFDDTLFENVRYSRPDAGEAEVLSALQAANLQSLIDSSPLGLHQPIGSNGSNLSGGQRQRVAIARAILKDAPILLLDEATSALDNESERLVQQALERLMENRTGIIVAHRLTTIEGADRIIVMDDGKIIEQGTHEQLMSQNGYYTMLHNISNKDAAVRTA

SEQ ID NO: 31278 - protein, 304 aa, Neisseria meningitidis
MKHPKLTLIAALLTTAATAAPLPVVTSFSILGDVAKQIGGERVSIQSLVGANQDTHAYHMTSGDIKKIRSAKLILLNGLGLEAADIQRAVKQSKVSYAEATKGIQPLKAEEEGGHHHDHDHDHEGHHHDHGEFDPHVWNDPVLMSTYAQNVAEALIKADPEGKVYYQQRLGNYQMQLKKLHSDAQAAFNAVPAAKRKVLTGHDAFSYMGKRYHIEFIAPQGVSSEAEPSAKQVAAIIRQIKREGIKAVFTENIKDTRMVDRIAKETGVNVSGKLYSDALGNAPADTYIGMYRHNIKALTNAMKQ

SEQ ID NO: 31279 - protein, 71 aa, Neisseria meningitidis; identical to SEQ ID NO: 3375

SEQ ID NO: 31280 - protein, 206 aa, Neisseria meningitidis; identical to SEQ ID NO: 320

SEQ ID NO: 31281 - protein, 157 aa, Neisseria meningitidis
MLSAESLKQIDTELAKYPADQRRSAIMGALRIAQTEKGWLAPETIAFVAEYIGISPAQAYEVATFYNMYDLEPVGKYKLTVCTNLPCALRGGMDTGEYLKKKLGIGYGETTPDGKFTLVEGECMGACGDAPVMLVNNHSMCGFMTEEAIEKKLAELE

SEQ ID NO: 31282 - protein, 101 aa, Neisseria meningitidis
  misc_feature 3, 4: 'Xaa' is any amino acid
VCXXIGRHSVNPTEGYGTGGLLQGKKHMLSLTWNAPIEAFTREGDFFEGKGVDVLYMHFHKANEFLGMTRLPTFLCNDVVKNPQVEKYLADYQAHLEKVFG

SEQ ID NO: 31283 - protein, 321 aa, Neisseria meningitidis
VKPRFYWAACAVLLTACSPEPAAEKTVSAASASAATLTVPTARGDAVVPKNPERVAVYDWAALDTLTELGVNVGATTAPVRVDYLQPAFDKAATVGTLFEPDYEALHRYNPQLVITGGPGAEAYEQLAKNATTIDLTVDNGNIRTSGEKQMETLARIFGKEARAAELKAQIDALFAQTREAAKGKGRGLVLSVTGNKVSAFGTQSRLASWIHGDIGLPPVDESLRNEGHGQPVSFEYIKEKNPDWIFIIDRTAAIGQEGPAAVEVLDNALVRGTNAWKRKQIIVMPAANYIVAGGARQLIQAAEQLKAAFEKAEPVAAGKE

SEQ ID NO: 31284 - protein, 318 aa, Neisseria meningitidis; identical to SEQ ID NO: 1208

SEQ ID NO: 31285 - protein, 306 aa, Neisseria meningitidis; identical to SEQ ID NO: 1708

SEQ ID NO: 31286 - protein, 346 aa, Neisseria meningitidis
MDISDFDFTLPEKLIAQHPPEVRGSSRLLVALPDMPLQDRVFGDLPDYVEAGDVLVFNNTKVMKARLFGQKDSGGRIEALIERVLDSHTALAHIRSSKSPKPGMGLVFEGGIRAVMVGREGELFCLRFEGGETVYELLEQNGHLPLPPYIERAADADDDSRYQTVYAKYQGAVAAPTAGLHFTEELLRRLKDKGAVTAEVTLHVGAGTFQPMRVDKIEEHKMHSEWFEVPSETVAAVEAAKARGNKVWAVGTTSMRALESAARATGRLKAGQGDTDIFITPGYRFNVADRLVTNFHLPKSTLLMLVSAFSGMGHIRAAYRHAVEREYRFFSYGDAMILGRNEGVVR

SEQ ID NO: 31287 - protein, 404 aa, Neisseria meningitidis
MDKFPKSAKLDHVCYDIRGPVHKKALQLEEEGNKILKLNIGNPAPFGFEAPDEILVDVIRNLPTSQGYCDSKGLYSARKAIVHYYQTKGLRDITVNDVYIGNGVSELITMSMQALLNDGDEILIPAPDYPLWTAAATLAGGTVRHYLCDEENGWFPNLADMEAKITPKTKAIVVINPNNPTGAVYSREILLEIAELARKHGLIIFADEIYDKILYDGAVHHHIAALAPDLLTVTFNGLSKSYRVAGFRQGWMVLNGPKHHAKGYIEGLDMLSSMRLCANTPMQHAIQTALGGYQSINEFILPGGRLLEQRNRAWELVSQIPGVSCVKPMGAMYMFPKIDTEMYRIRDDMKFVYDLLVREKVLLVQGTGFNWIKPDHFRIVTLPYVYQIEEAMGRLARFLQTYRQ

SEQ ID NO: 31288 - protein, 239 aa, Neisseria meningitidis
  misc_feature 3, 4: 'Xaa' is any amino acid
VCXXQRTASLPWLRPDAKAQLTVVYDSESGKVKRIDTVVLSTQHDPEIGYEELKNAVIEQIIKPVLPSELLTDEIKYLINPTGRFVIGGPQGDCGLTGRKIIVDTYGGAAPHGGGAFSGKDPSKVDRSAAYACRYVAKNIVAAGLATQCQIQVSYAIGVAEPTSISIDTFGTGKISEEKLITLVREHFDLRPKGIVQMLDLLRPIYSKSAAYGHFGREEPEFTWERTDKAAALRAAAGL

SEQ ID NO: 31289 - protein, 279 aa, Neisseria meningitidis
MTATAAAIDRLLPQTQCRECGYDGCLPYAQAVATGEAYNLCAPGGETVIRDISALLGKPFVAPAKTQAKALARIDETACIGCTACIRACPADAIMGAGKLMHTVIADECTGCGLCVAPCPVDCIHMQPVADTVLPRARRFSLSADSRFAAAEHARTRYLKRNERKQREADERKAMLAEREAAVRNARPQTPDTPKKPAFNPADLIAKAMAKAQTQQDRLAAADNRKDYQAKQIAEARERAELRRAQRDMKYGSDSEKAAALEYLKQYKAKQEAAQNTAS

SEQ ID NO: 31290 - protein, 159 aa, Neisseria meningitidis
MPESIFKQISLDILKLHRDSVYSLLATSGCNCQVHEAAYVNIDGKYYIALSCEPEVGEVKTGILLIEDESRSLRLSWVGSARELDRKDSAYKRALSALSRKMGRCKDRLHTAVQPFLLELVPEKGRFSVGDEEVWISRNDLVRALYPVGYSMRQAVLQI

SEQ ID NO: 31291 - protein, 937 aa, Neisseria meningitidis
MSNRPTLLLVDGSSYLYRAYHAMAQLTAPDGAPTGAMYGVLNMLRRLRADYVHDYCAVVFDAKGKNFRHEMFSDYKATRPPMPDDLRPQAEALPDLVRLTGWPVLVIGQVEADDVIGTLAKQGAEHGLRVIVSTGDKDMAQLVDERVTLVNTMSGETLDIEGVKAKFGVRPDQIRDYLALMGDKVDNVPGVEKCGPKTAVKWLEAYGSLQGVIEHAAEIKGKVGENLQAALPQLPLSYDLVTIKTDVDLHAELSDGIESLRRTTPKWAQLVVDFKRWGFRTWLKEAESNMNTGSTDDLFGSDSIGEQAALNAEMPFEKQAEKATAPEKLDYQAVTTEAQFAALLDKLSRADTIGIDTETTSLDAMNASLVGISIAFQAGEAVYIPVGHSLTAAPEQLDLQDVLGRLKPHLENPALKKIGQNLKYDQHVFANYGIALNGIAGDAMLASYIIESHLGHGLDELSERWLGLETITYESLCGKGAKQIGFADVAIEQATEYAAQDADFALRLEAHLRAQMDAKQLEMYEKMELPVAQVLFEMERNGVQIDRAELARQSAELGAELMKLEQEAYAAAGQPFNLNSPKQLQEILFDKMGIPTKGLKKTAKGGISTNEAVLEQLAPDYPLPKIILQNRSLAKLKSTYTDKLPEMISPKDGRVHTTYAQAVAITGRLASNNPNLQNIPIRTAEGRRVRRAFTAPQGSVIVSADYSQIELRIMAHLSGDKTLIAAFQNGEDVHRRTAAEVFGIAPENVSPEQRRYAKTINFGLIYGMGQYGLAKSLGIDNISAKNFIDRYFARYPGVAEYMQRTKEQAAAQGFVETLFGRRLYLPDIHNKNANARAGAERAAINAPMQGTASDLIKRAMIDVSRWLSECEASPWDELLQSKLIMQVHDELVLEVVETELDFVKEKLPQIMAKVGGGLLDVPLVAEVGVGENWEEAH

SEQ ID NO: 31292 - protein, 376 aa, Neisseria meningitidis
MTKHLPLIVLTALALAGCGGSDKTSADKAAQTDNQKVLSIYNWSEYVDPETVAAFEKKHGIAVTYDVYDSDETLESKVLTGKSGYDIVAPSNAFVGRQIKAGAYQKIDKSLIPNYKHLNPEMMRLMDGVDPGHEYAVPFYWGTNTFAINTERVKKALGTDKLPDNQWDLVFDPEYTSKLKQCGISYLDSAAEIYPMVLNYLGKNPNSSNTEDIREATALLKKNRPNIKRFTSSGFIDDLARGDTCVTIGFGGDLNIAKRRAEEAGGKEKIRVMMPKEGVGIWVDSFVIPKDAKNVANAHKYINDFLDPEVSAKNGNFVTYAPSSKPARELMEDEFKNDNTIFPTEEDLKNSFIMVPIQPAALKFMVRQWQDVKAGK

SEQ ID NO: 31293 - protein, 617 aa, Neisseria meningitidis
MNRYPLWKYLLIVFTIAVAAVYSLPNLFGETPAVQVSTNRQAIIINEQTQFKVDAALKNAGIQTDGMFVVDNSLKVRFKDTETQLKARDVIENTLGEGYITALNLLADSPEWMAKIKANPMFLGLDLRGGVHFTMQVDMKAAMQKTFERYSGDIRRELRREKIRSGTVCQAGNSLTVPLQDAGDVQKALPQLRKLFPEATLNSDGSNIVLTLSEEAVNKVRSDAVKQNITTLHNRVNELGVAEPVIQQSGADRIVVQLPGVQDTAKAKDIIGRTATLELRMVEDDPAKLREALEGNVPSGYELLSSGGDRPEILLISKQVELTGDNINDAQPSFDQMGAPAVSLSLDSAGGSIFGELTAANVGKRMAMVLIDQGKSEVVTAPVIRTAITGGRVEISGSMTTAEANDTSLLLRAGSLAAPMQIVEERTIGPSLGKENIEKGFHSTLWGFAIVAAFMVVYYRLMGFFSTIALSANILFLIGILSAMQATLTLPGMAALALTLGMAIDSNVLINERIREELRAGVPPQQAINLGFQHAWATIVDSNLTSLIAGIALLVFGSGPVRGFAVVHCLGILTSMYSSVVVFRALVNLWYGRRRKLQNISIGAVWKPEAETAAGKE

SEQ ID NO: 31294 - protein, 344 aa, Neisseria meningitidis; identical to SEQ ID NO: 10896

SEQ ID NO: 31295 - protein, 217 aa, Neisseria meningitidis; identical to SEQ ID NO: 5286

SEQ ID NO: 31296 - protein, 276 aa, Neisseria meningitidis
MPEFFTDSESSHFYSYLTGWLNVDFIDNDDEDLIATDRTSLDWKHSKTSKLRVFLGEIVRAIGQDWRKRRKKEKDDEVKGESGVDIEDWKNKLPEKEREPVEVILNRLEDSELTNKEQAEVISALHSIIPEYPYYHWRHLHQDLHTACNDFYNEKKDYLSAAIEAVKVFEDKVQKQTGLHSIDGRELIEQAFGSKNSILLLTNNKTKAEQNLEDGLEQLACGTWTGFRNPVQHELRANLSPSIFNDKDALDLISLVSYLLRKVEQTKKRSKVVSSK

SEQ ID NO: 31297 - protein, 204 aa, Neisseria meningitidis
  misc_feature 200, 201, 202: 'Xaa' is any amino acid
MKAAIPDYMKFGAEREMHGSNAAGTAIEINVEDDGRTFFVAHIVDPVAVTKVKTGVYKGFSIGGSVTAHDELNKSQITGLKLTEISLVDRPANPDAVFTCFKADKGAEAVNNDTEHNATYFSHFPSKQKSTDGGRCPFLYRFPYFLSAGSTGLAGPFGAGAPTEAWSFSFASTAGPMPFTLVKSSTDLNAPFCARYSAMXXXHT

SEQ ID NO: 31298 - protein, 236 aa, Neisseria meningitidis; identical to SEQ ID NO: 3170

SEQ ID NO: 31299 - protein, 377 aa, Neisseria meningitidis; identical to SEQ ID NO: 997

SEQ ID NO: 31300 - protein, 241 aa, Neisseria meningitidis
MSEGMVSPVLYLIPTPLGTPDTPCLLPHEQQAIVGLTDFVVEAEKTARAHLKHLGVTMPIRELNLQTLNEHTDLKTLPELLKPLQEGRSMGIVSEAGCPAVADPGANLVALAHKHGFEVRPLVGPSSLLLALMASGANGQSFAFKGYLPSEKNERIQSLKALEQRSRQQNETQLFIETPYRNDVLLADAVENLHPETRLCTATDLTLPTQSVVSKTVADWRRMKEMPNLKKRPTIFVMYAG

SEQ ID NO: 31301 - protein, 389 aa, Neisseria meningitidis; identical to SEQ ID NO: 8081

SEQ ID NO: 31302 - protein, 56 aa, Neisseria meningitidis; identical to SEQ ID NO: 2179

SEQ ID NO: 31303 - protein, 513 aa, Neisseria meningitidis
MDGRRWAVWGAFALLPSAFLAVMVVAPLWAVAAYDGLAWRAVLSDAYMLKRLAWTVFQAAVTCVLVLPLGVPVAWVLARLAFPGRALVLRLLMLPFVMPTLVAGVGVLALFGADGLLWRGRQDTPYLLLYGNVFFNLPVLVRAAYQGFVQVTAARLQTARTLGAGAWRRFWDIEMPVLRPWLAGGVCLVFLYCFSGFGLALLLGGSRYATVEVEIYQLVMFELDMAGASALVWLVLGVTAAAGLLYAWFGRRAVSDKAVSPVMPSPPQSVGEYVLLAFAAAVLSVCCLFPLLAIVVKAWSAGESWRVLMESETWQAVWNTLRFSAVAVFAAAVLGVVYAAAARRSAWMRGLMFLPFMVSPVCVSAGVLLLYPQWTASLPLLLAMYALLAYPFVAKDVLSAWDALPPDYGRAAAGLGANGFQTACRITFPLLKPALRRGLTLAAATCVGEFAATLFLSRPEWQTLTTLIYAYLGRAGADNYARAMVLTLLLSAFALGIFLLLDGGEGGKQTETL

SEQ ID NO: 31304 - protein, 232 aa, Neisseria meningitidis
LVKTADGYKAIAHIQAGDRVFAKDETSGKTGYKPVTARYGNPYQETVYIEISDGIGNNQTLISNRIHPFYSDSKWIKAEDLKAGSRLLSESGKTQTVRNIVVKPTPLKAYNLTVADWHTYFVKGSQAETEGVWVHNSCPPYKRPNNATTKAQRESVQGKPCVECGKLAEKMIADHKKPLVVEYYETGTIDKSKMRAIESVQPQCPTCSAKQGGRLSQYSKEQKRKLSNGNKK

SEQ ID NO: 31305 - protein, 806 aa, Neisseria meningitidis
MNGQKLPEVKWGQSYNSLPQKSNPRQVNFTTSFGGYKKNTTFSFNNTDEVVAQKNGVTVFGAATYLPPYGKVSGFDEKRLKERGDVLGWIGTTRPGLVGYSYEGNTCSSGDCPDVSYKTQFTFGNQGLKSKVNGKLDIYEDKSRDNSPIYKLPDQPWLGVSFNLSSESVVESKKLKKVESSFSEDVTQSNGAQSLYKYKNLVYTTGDVRNKGNQVHQDKHHAVAFYLNAKLHLLDKKNIQNIAQGITVNFGTLKTRIEPTDAWKNKRHLTHNVGNWEFKDTGSVSVKLKLPEVKAGRCTNKSNPNPKSKAPSPALTAPALWFGAGQDGKAEMYSASVSTYPDSSSSRIFLQNLKRKNDPSKPGRYSLADLNASDIQSKEPTFTSRQTVIRLDKGVHQIKLQGNEVANFNGNDGKNETFGIVKDLGVDPDASEWKKVLLPWTVRASNDDDQFNTFNKEENNGKPKYSQKYRSRDNGKHERNLGDIVNSPIVAVGEYLATSANDGMVHIFKKGNGGDERNYSLKLSYIPGTMPRKDIESKDSTLAKELRAFAEKGYVGDRYGVDGGFVLRKVNNLNGQDRVFMFGAMGFGGRGAYALDLTKADSSNPTGVSLFDVKNDNNNGKNGNNSVELGYTVGTPQIGKTHNGKYAAFLASGYATKEINNNDNKTALYVYDLENSNGNGTLIKKIEVPNGKGGLSSPTLVDKDLDGTVDIAYAGDRGGKMYRFDLSSQSPDQWTVRPIFEGTKPITSAPAISQLKDKRVVIFGTGSDLSEEDVDNMEEQYIYGIFDDDTATTGTVNFRRFGRRAA

SEQ ID NO: 31306 - protein, 841 aa, Neisseria meningitidis
LKNNRQIKLIAASVAVAASFQAHAGLGGLNIQSNLDEPFSGSITVTGEEAKALLGGGSVTVSEKGLTAKVHKLGDKAVIAVSSAQAVRDPVLVFRIGAGAQVREYTAILDPVGYSPKTKSALSDGKTHRKTAPTAESQENQNAKALRKTDKKDSANAAVKPAYNGKTHTVRKGETVKQIAAAIRPKHLTLEQVADALLKANPNVSAHGRLRAGSVLHIPNLNRIKAEQPKPQTAKPKAETASMPSEPSKQATVEKPVEKPEAKVAAPEAKAEKPAVRPEPVPAANTAASETAAESAPQEAAASAIDTPTDETGNAVSEPVEQVSAEEETESGLFDGLFGGSYTLLLAGGGAALIALLLLLRLAQSKRARRTEESVPEEEPDLDDAADDGIEITFAEVETPATPEPAPKNDVNDTLALDGESEEELSAKQTFDVETDTPSNRIDLDFDSLAAAQNGILSGALTQDEETQKRADADWNAIESTDSVYEPETFNPYNPVEIVIDTPEPESVAQTAENKPETVDTDFSDNLPSNNHIGTEETASAKPALPSGLAGFLKASSPETILEKTVAEVQTPEELHDFLKVYETDAVAETAPETPDFNAAADDLSALLQPAEAPSVEENITETVAETPDFNATADDLSALLQPSEVPAVEENAAETVADDLSALLQPAEAPAVEENVTETVAETPDFNATADDLSALLQPSEVPAVEENAAETVADDLSALLQPAEAPAVEENATEITLETPDSNTSEADALPDFLKDGEEETVDWSIYLSEENIPNNADTGFPSESVGSDAPSEAKYDLAEMYLEIGDRDAAAETVQKLLEEAEGDVLKRAQALAQELGI

SEQ ID NO: 31307 - protein, 135 aa, Neisseria meningitidis
LSNTYLDWAKRNFELNGIDTERHKIVRADVFQYLQTAYGEGRQFDLIVMDPPSFSNSKKMSDILDIQRDHKKLIDGAVKLLASDGILYFSNNLRSFVLDDLVSEQYAVKDISKQSVPEDFRNKKIHRCWEIRHKS

SEQ ID NO: 31308 - protein, 526 aa, Neisseria meningitidis
MSVIKRALISLSDKAGAVEFAQTLTKLGVEILSTGGTAKLLADAGVPVIEVADYTGFPEMLDGRVKTLHPKIHGGILGRRDLGEHVAKMEEHGIGNIDLVCVNLYPFAATIAKPNCTLEDAIENIDIGGPTMVRSAAKNWKHVAIVTDTADFPAIAAELEANNGALSDKTRFNLSRKAFSHTAQYDGMISNYLTSLSDEVLSGTPEIGEFPSQFNQSWIKVQDMRYGENPHQRAAFYRDIDPAAGSLSAYKQLQGKELSYNNIADADAAWEAVKSFDAPACVIVKHANPCGVAVAADTLTAYKLAYVTDTTSAFGGIIAFNREVDGETVKQITDNQFMEVLMAPKFTAEALEIAAAKKNVRVLEVPLEAGANRFELKRVGGGLLVQTPDIHRLNRADLKVVSKRQPTEQEWNDLMFVWNVAKYVKSNAIVFGKGGQTYGIGAGQMSRVDSTRIAARKAQDAGLDLNGACAASDAFFPFRDGVDVIAEQGIKAIIHPAGSMRDQEVFDAADEHGIAMVVTDVRHFRH

SEQ ID NO: 31309 - protein, 461 aa, Neisseria meningitidis
MISIFDIFKIGIGPSSSHTVGPMKAAAAFAAGLDAQAVRIVIDIYGSLALTGYGHGTFDALMLGLEGSLPHDIPLAGIPERLERIRTQHILRLNGQEIRFIPDRDLNIRGNQVLPKHPNGLRFTAYASDGIVLKEQVYYSTGGGFVVTGEDFERQSETEKTVPYPYNSCAELLDRCRLNRLDISEVVLANEAALAGCSANEIRRRVAGVADVMEGCIKHGLAADGELPGGLNVRRRAPHLATKLKVLRETEIVNTQLWPMVYAMAVNEENAAGGRVVTAPTNGAAGIIPAVLHSFRKFNPHATQERVENFLLTAGAIGILYKTNASISGADVGCQGEVGVACSMAAGAYAEVIGGTPKQVENAAEMAMEHHLGLTCDPVGGLVQIPCIERNGIAAEKALKLGTLALLEDGTDKKVSLDEVIRTMLQTGRDMKATYKETSLAGLAATLRKKAVPVSVRVVEC

SEQ ID NO: 31310 - protein, 297 aa, Neisseria meningitidis; identical to SEQ ID NO: 26950

SEQ ID NO: 31311 - protein, 262 aa, Neisseria meningitidis; identical to SEQ ID NO: 256

SEQ ID NO: 31312 - protein, 497 aa, Neisseria meningitidis; identical to SEQ ID NO: 1619

SEQ ID NO: 31313 - protein, 498 aa, Neisseria meningitidis; identical to SEQ ID NO: 26427

SEQ ID NO: 31314 - protein, 468 aa, Neisseria meningitidis; identical to SEQ ID NO: 23202

SEQ ID NO: 31315 - protein, 140 aa, Neisseria meningitidis; identical to SEQ ID NO: 2732

SEQ ID NO: 31316 - protein, 425 aa, Neisseria meningitidis
MRSSDILIVDDEIGIRDLLSEILQDEGYSVALAENAEEARKLRHQVRPAMVLLDIWMPDCDGITLLKEWAKNGQLNMPVVMMSGHASIDTAVEATKIGALDFLEKPISLQKLLSTVENALKYGAAQTETGPVFDKLGNSAAIQEMNREVGAAVKRASPVLLTGEAGSPFETVARYFHKNGTPWVSPARVEYLIDMPMELLQKAEGGVLYVGDIAQYSRNIQTGIAFIIGKAERCRVRVVASGSRAAGSDGIACEEKLAELLSESVVRIPPLRMQHEDIPFLIQGIACNVAESQKIAPASFSEEALAALTRYDWPGNFDQLQSVVATLLLEADGQEIGAAAVSSLLGQNVPAEGAEDMVGGFNFNLPLRELREEVERRYFEYHIAQEGQNMSKVAQKVGLERTHLYRKLKQLGIGVSRRAGEKTEE

SEQ ID NO: 31317 - protein, 213 aa, Neisseria meningitidis
MLKPETIHISGPAGILETIHIPSEQVPARGVAVINHPNPLQGGTNTNKVIQTAAKALSKLGFHCYLPNLRGVGGSEGTHDYGRGETQDCLAVIDYARAQHPEAPEFALSGFSFGGYVATFAAQAHTPDLLLLIGAAVCHYTDRPEPSAVPDVAKTLMIHGAEDEVVEIEKALKWAEPQDLPVITIAGSTHFFHGKLIVLRDTILRFAPVCLNG

SEQ ID NO: 31318 - protein, 143 aa, Neisseria meningitidis
MTGFNDAAGVASSSDIKGKYVEKVEVAKGVITATMLSTGVNNEIKGKKLSLWAKRQDGSVKWFCGQPVTRADKADDVNKATGNEIDTKHLPSTCRDASSAVCTKHPSIARITANGRKTSSFPRRRESRFVGAETYRVKRFLRS

SEQ ID NO: 31319 - protein, 243 aa, Neisseria meningitidis
VSREINAGRHHFLYGGISGGGVHYWDNKDFSEQSLRLSFGYKNRSVTRSFGIVPFVEQNLLGGSRYNFVGGFNADFSQRLSERWRLTLNAGNMWKHYQEDRTAARYDSHMPLAGATLMYSAPKDWLLYGGADWSHNITKEAEQASIRKGLRVGAVKTFDGGLGLRANLRYTRRTFDAPGTIVYRFPRKDHEYQANLSLWHDKISWKGFTPQLNFRYLKIDSNMKSFYTRKNTQIFMSVEKDFK

SEQ ID NO: 31320 - protein, 252 aa, Neisseria meningitidis
  misc_feature 2, 3: 'Xaa' is any amino acid
VXXLFSSLLFSSAAQAASEDSSRSPYYVQADLAYAAERITHDYPKPTGTDKDKISTVSDYFRNIRAHSIHPRVSVGYDFGGWRIAADYASYRKWNNNKYSVNTKELENKNNNKRDLKTENQENGTFHAVSSLGLSAIYDFKLNDKFKPYIGARVAYGHVRHSIDSTKKTTEVLTSTHAPSTAPTIYNQGSTQNAYHESHSIRRLGLGVIAGVGFDITPKLTLDTGYRYHNWGRLENTRFKTHEVSLGMRYHF

SEQ ID NO: 31321 - protein, 389 aa, Neisseria meningitidis; identical to SEQ ID NO: 19971

SEQ ID NO: 31322 - protein, 364 aa, Neisseria meningitidis
MKTNLLNYDLQGLTRHFADMGEKPFRAKQVMRWMHQSGAQNFNEMTDLAKSLRHKLNEQAGIEIPKLMMSQESSDGTRKWLLDVGTGNGVETVFIPESDRGTLCISSQVGCALECTFCSTGRQGFNRNLTAAEIIGQLWWANKAMGVTPKNERVISNVVMMGMGEPMANFDNVVTALSIMLDDHGYGLSRRRVTVSTSGMVPQMDRLRDVMPVALAVSLHASNDEVRNQIVPLNKKYPLKELMAACQRYLVKAPRDFITFEYVMLDGINDKAQHARELIELVTDVPCKFNLIPFNPFPNSGYERSSNENIRVFRDILQQAGFVVTVRKTRGDDIDAACGQLAGQVQDKTRRQQKWQQILIGQQG

SEQ ID NO: 31323 - protein, 92 aa, Neisseria meningitidis; identical to SEQ ID NO: 1287

SEQ ID NO: 31324 - protein, 499 aa, Neisseria meningitidis
VFKKYQYLALAALCAASLAGCDKAGSFFGANKKEASFVERIEHTKDDGSVSMLLPDFVQLVQSEGPAVVNIQAAPAPRTQNGSGNAETDSDPLADSDPFYEFFKRLVPNMPEIPQEEADDGGLNFGSGFIISKDGYILTNTHVVTGMGSIKVLLNDKREYTAKLIGSDVQSDVALLKIDATEELPVVKIGNPKDLKPGEWVAAIGAPFGFDNSVTAGIVSAKGRSLPNESYTPFIQTDVAINPGNSGGPLFNLKGQVVGINSQIYSRSGGFMGISFAIPIDVAMNVAEQLKNTGKVQRGQLGVIIQEVSYGLAQSFGLDKAGGALIAKILPGSPAERAGLQAGDIVLSLDGGEIRSSGDLPVMVGAITPGKEVSLGVWRKGEEITIKVKLGNAAEHIGASSKTDEAPYTEQQSGTFSVESAGITLQTHTDSSGGHLVVVRVSDAAERAGLRRGDEILAVGQVPVNDEAGFRKAMDKAGKNVPLLVMRRGNTLFIALNLQ

SEQ ID NO: 31325 - protein, 411 aa, Neisseria meningitidis
MTISTMAQTHDTRLQKTLLFPSQQGWKSKTFLKPDSHIRLATVFSGIGAVEQAFHRLNLNHTIVFSGDIDPYVKKSYLGNYKLNEDFWHNDITQFDARKFRNQVDILVGGSPCQAFSMVGKRAGLEDTRGTLFYEFARVVDEVQPKIFIYENVKGLLNHDNGKTWKVVKSVFYSLGYDLYFQIMNSKDYGIPQHRERIFVVGFHTPPINGFQFPEKIELEHTMQDFLEDYTDSKYFLREKGVKFVTSSKNRQKRYTQINGEIALCQKANQQFNWHGDFIFQAARESEFDDFIFDVNNVEEKYYLSEKIKNYVLAGGTKNFKTSTETDLPVARPLLQTMHKMHRAGVDNYVTHNRGRIRKLTPRECLRLMGFRDDFKILVSDTQMYRQAGNSIVVDVLIAILKQMDITLYGE

SEQ ID NO: 31326 - protein, 525 aa, Neisseria meningitidis
MSKFFKRLFDIVASASGLIFLSPVFLILIYLIRKNLGSPVFFFQERPGKDGKPFKMVKFRSMRNALDSDGIPLPDSERLTPFGKKLRAASLDELPELWNVLKGEMSLVGPRPLLMQYLPLYDNFQNRRHEMKPGITGWAQVNGRNALSWDEKFACDVWYIDHYSFWLDMKILFLTVRKVFIKEGISAEGEATMPYFTGNQTNEKNNILILSAGRRVELVQDFQTEAARFSDGISVFATDLNPRMSSACHVSDGSFEVPPISADSYIDSIFNLAVRENIGLIIPTIDTELQKLADERERFEAASVHIVVSDSDFIAQCRDKRKTATLFARYGIRSPEIYDRKKLVFPCFAKPYDGSRAIGAKRIDTPADLTPEVLADTKLMFCQFIDIENKFSEFTVDMYYDRQCRLKCAIPRKRLEVRSGEISKGVTCKNSLYQTLLEKMSVLQGARGCITAQFFYNEETGEFYGVEINPRFGGGFPLTYAAGGNYPSRLMREYLGDEEIPFSDDWENNLIMLRYDAKVLVHEND

SEQ ID NO: 31327 - protein, 133 aa, Neisseria meningitidis; identical to SEQ ID NO: 8

SEQ ID NO: 31328 - protein, 675 aa, Neisseria meningitidis
LTGIRSEKQIQREIMLTQAAFNRLARSGKASQNDLARAAVATRNRIRELNAELKQGTGFADKMGKIGRFGAAAVAGGAAAYTVLKPAMDNRKQLDENINRVSRQAFIEDNSKSAAWIATEGAQQIKDLALELVEKNGGTHDKALDLISGMMTTSLNFAQTKNEAQAAYAFALASEGSGEDTAKLIKTLKDGGMSGKDLQLGLEHVLQSGLDGTFEVRDMVRELPSLLPAAQQAGMNGVGGLDYLLSLLQSAANKSGSPAEAATNVQNLLSKTLSPDTIGRLKKMANPNDPKKGVDWIGSVVQGKQNGENAVQVLSRLADAMLVKDKQYQDYKKRAAAGDKTAAEQANMLKGALLAQLLPDLQAKQGLLAATDMTQIREYMASLAGVTLDNGKIAKNNEARMLSAAAQQEQQESLAMLRESLTGTLVDMETSFKKLAAEYPNATLALQALTTAATAASAAMLLTAGGGKGAGFLKDVGSKALGWGKASAGGVAAGATAAGGKLLSWGKSAGSGLMNNPALVKRAGLLGMLLYSESLGDGTLPKGLRGTKTTPEMINRLKNNGIRFEPAPKREQARGGVPQYLAAPSAQPTDKMLSPLFSTQTAAYQAAIQQQTAAYQAALAQDTAAVTTGLAQVQSAMASASQTINTNVSLNIDGRVIANEVSRYQVAMFGRGAGQ

SEQ ID NO: 31329 - protein, 436 aa, Neisseria meningitidis
MDTSKQTLLDGIFKLKANGTTVRTELMAGLTTFLTMCYIVIVNPLILGETGMDMGAVFVATCIASAIGCFVMGFVGNYPIALAPGMGLNAYFTFAVVKGIGVPWQVALGAVFISGLIFILFSFFKVREMLVNALPMGLKMSIAAGIGLFLALISLKGAGIIVANPATLVGLGDIHQPSALLALFGFAMVVVLGHFRVQGAIIITILTITVIASLMGLNEFHGIIGEVPSIAPTFMQMDFEGLFTVSMVSVIFVFFLVDLFDSTGTLVGISHRAGLLVDGKLPRLKRALLADSTAIVAGAALGTSSTTPYVESAAGVSAGGRTGLTAVTVGVLMLACLMFSPLAKSVPAFATAPALLYVGTQMLRSARDIDWDDMTEAAPAFLTIVFMPFTYSIADGIAFGFISYAVVKLLCRRTKDVPPMVWIVAVLWALKFWYLG

SEQ ID NO: 31330 - protein, 259 aa, Neisseria meningitidis
MLKIISANVNGIRSAYKKGFYEYIAASGADIVCVQELKAQEADLSADMKNPHGMHGHWHCAEKRGYSGVAVYSKRKPDNVQIGMGIEEFDREGRFVRCDFGRLSVISLYLPSGSSAEERQQVKYRFLDAFYPMLEAMKNEGRDIVVCGDWNIAHQNIDLKNWKGNQKNSGFLPEEREWIGKVIHTLGWTDMWRTLYPDNPGYTWWSNRGQAYAKDVGWRIDYQMVTPELAVKALSAHVYKDEKFSDHAPLVVEYDYAAE

SEQ ID NO: 31331 - protein, 357 aa, Neisseria meningitidis
MSLPAMDAGIYLEETAPRALIEHNNILDNSVGVYLHGSADAMVRENKIVGDATLRVNERGNGVTVWNAPGAQVVGNDISKGRDGIFSNTSTHNTYKNNRFSDLRFAVHYMYTNDSEISGNISVGNNMGYVLMFSERLKVFDNIAVGSRDQGIMLNYVNYSDIHDNIINKAGKCVFAYNANYDKLSANHFENCQIGIHFTAAIEGTSLHDNSFINNESQVKYVSTRFLDWSEGGHGNYWSDNSAFDLNGDGFGDSAYRPNGIIDQIIWRAPVLRLLMNSLAISIVKWAQAQFPAVLPGGVVDSKPLMKPYAPQNSNPLSGDEGRVAQRSRNAAVGMGQGGKRFFELVCFRRHPDSNAV

SEQ ID NO: 31332 - protein, 103 aa, Neisseria meningitidis; identical to SEQ ID NO: 3787

SEQ ID NO: 31333 - protein, 77 aa, Neisseria meningitidis
MNRRKIYLLSVALFTLAFMLLVLLGAYLLTVGSKAFAVASFLFAFGALFGQIGALALYLRHKSLRAAQSAAKENRHV

SEQ ID NO: 31334 - protein, 231 aa, Neisseria meningitidis; identical to SEQ ID NO: 1993

SEQ ID NO: 31335 - protein, 278 aa, Neisseria meningitidis
MQIIHTIQELRAWRKNAGKVAFVPTMGNLHEGHLALVREAKKRADNVVVSIFVNRLQFGQGEDFDKYPRTLQQDADKLAAEGVAVVFAPDEKELYPNVEQRYNVEPPNLQNELCGKFRPGHFRGVATVVSKLFNIVAPDVACFGKKDYQQLAVIKGLTEDLNFDVEIVPVDTGRAEDGLALSSRNQYLSAAERDEAPRLSRELKAVAESLAQGSLDYAGLERQAADHLTAAGWVVDYVEIRRADTLEVARAGDKKLVVLAAARLGTTRLIDNLEIKLP

SEQ ID NO: 31336 - protein, 320 aa, Neisseria meningitidis
MLRLTALAVCTALALGACSPKDSASNQAQTASASAAQTEGASLTVKTTRGDVQIPQNPERIAVYDLGMLDTLNKLGVKTGLSVDKNRLPYLEEYFKTTKPAGTLFEPDYETLNAYKPQLIIIGSRAAKAFDKLNEIAPTIEMTADTANLKESAKERIDALAQIFGKKAEADKLKAEIDASFEAAKTAAQGKGKGLVILVNGGKMSAFGPSSRLGGWLHKDIGLPAVDEAIKEGSHGQPISFEYLKEKNPDWLFVLDRSAAIGEEGQAAKDVLDNPLVAETTAWKKGQVVYLVPETYLAAGGAQELLNASKQVADAFNAAK

SEQ ID NO: 31337 - protein, 258 aa, Neisseria meningitidis; identical to SEQ ID NO: 2774

SEQ ID NO: 31338 - protein, 222 aa, Neisseria meningitidis
LLSDERLDCKLFSYEYIYLISFVKSADQNSYEKLVQDILVLRTCAEVKIKHQLTAENSRSHAYVNAAHEWESYFSKTLTDAGVLQKTDGKIICRLKHGKTETYRKVTSSEFSIPKQLQEFVKKLQSAYSFSEMPLNLNDSDRLKIDVIKEIYSFYPKELLEEIGELKDEAAYELLHLPRLIEQYADNNNGTEAYLFEDVLEMGFNMFYNVEAKKLVDQVIRI

SEQ ID NO: 31339 - protein, 288 aa, Neisseria meningitidis; identical to SEQ ID NO: 464

SEQ ID NO: 31340 - protein, 929 aa, Neisseria meningitidis
MTDYSKTVNLLESPFPMRGNLAKREPAWLKSWYEQKRYQKLREIAKGRPKFILHDGPPYANGDIHIGHAVNKILKDIIIRSKTQAGFDAPYVPGWDCHGLPIEVMVEKLHGKDMPKARFRELCREYAAEQIARQKKDFIRLGVLGDWDRPYLTMDFKTEADTVRMLGEIYKSGYLYRGAKPVQFCLDCGSSLAEAEVEYKDKVSPAIDVAYPFKDTAALAAAFGLAGLEGKAFAVIWTTTPWTLPASQAVSAGADVVYRLIDTPKGKLVLAKDLAEDALKRYGFSDGIAILAETTGDKLENLHMNHPFLERDIPMLNGDHVTTDAGTGLVHTAPAHGLEDYAVCNKYGIELYNPVNAEGKYISETPRVAGMRVWEANPVILQWLEETGNLLASSKIEHSYAHCWRHKTPLIYRATGQWFVGMDKAGADGKTLRDKAIKAVDDTEFFPSWGRARLEAMIEGRPDWVVSRQRYWGTPMTFFVHKETGELHPNSAELLEKVALKIEEKGIEAWFSLDKSELLSAEDCEHYDKLPDTMDVWFDSGSTHYSVVKQREELEWPADLYLEGSDQHRGWFQSSMLTGCASSMGRAPYKQLLTHGFVVDGEGKKMSKSIGNVVAPQEVYNEFGADILRLWAASTDYSGELAISKEILKRVTESYRRIRNTLSFLFANLSDFNPIEDAVQQADMVEIDRYAVVLARQLQERLAGDYYSRYAFHFAVKDIVSFCSEDLGAFYLDILKDRLYTTKADSHARRSAQTALYHITRSLVLLIAPILCFTGEEAWDIIGGGEEDSVLFHTWHEFPTINEKTEAELVKKWTAIREAREAVTAAIEPLRADKTVGSSLQAEAEITAPEEMAGYLNALGEELRFALLVSKAEVKVGSELAVAAKASDGEKCERCWHYTRDVGAVAGYETVCKRCAENVGGEGETRHYA

SEQ ID NO: 31341 - protein, 185 aa, Neisseria meningitidis
MNIIDTAIPDVKLLEPQVFGDARGFFMETFRDEWFKTQVCERTFVQENHSKSGKGVLRGLHYQTENTQGKLVRVVVGEVFDVAVDMRKDSPTFGKWVGEILSAENKRQLWVPEGFAHGFYVLSDEAEFVYKCTDYYKPEAEQVLIWNDPAIGIDWPLQTEPNLSPKDLAGKAWAQAEKLRLTLSR

SEQ ID NO: 31342 - protein, 95 aa, Neisseria meningitidis; identical to SEQ ID NO: 371

SEQ ID NO: 31343 - protein, 216 aa, Neisseria meningitidis
MPSENTKGKTMTTHHVELRKVTKRFGAQKAVNQVDLVLKAGESVGLAGHNGAGKSTIMKLILGLITPTEGEVMLLGERTGSKAGARLRSQIGYLPETVALHPSLTGIETLDFYAKLKKQPLTQNRGLLERVGISQAAHRRVGTYSKGMRQRLALAQALLGEPKVLLFDEPTTGLDPASRQMFYEVVRELNGRGATVLLSTHALAELDGHADRIIVD

SEQ ID NO: 31344 - protein, 244 aa, Neisseria meningitidis; identical to SEQ ID NO: 26867

SEQ ID NO: 31345 - protein, 642 aa, Neisseria meningitidis; identical to SEQ ID NO: 269

SEQ ID NO: 31346 - protein, 225 aa, Neisseria meningitidis; identical to SEQ ID NO: 1002

SEQ ID NO: 31347 - protein, 343 aa, Neisseria meningitidis
MPDFQRITIENIEYFIVDSIQNLRAEDSFIHRNNKLSVFGGNGEARKYVGSYIDDSGRKLSTFFEYENWGITETKNGRRVEYPFIQKNCFFNKKNLQRYLVDAKVEYHKQEQKYHHDISRFYDDYVLSINNLPTENIFFSIHDVSDHLENSKGYRRGYIRSEDDIWSIWRKIVLPKISYLSILKLLPVKDIEDSEPLFYFRIFLDYQFRSIVHPQLLSREKLEIPASEFNQFVEQEIIKQKSRKGQQKYRKDVINHMSQCPFTLITDEILLRASHIKPYMVCITEKNEKEALDYLNGLALTPTYDWLFDQGYITFLDDGRLICGTRLSRYTWEKLNINPNAKN

SEQ ID NO: 31348 - protein, 250 aa, Neisseria meningitidis
MTDILIDNTATETVRTLIRAFPLVPVSQPPEQGSYLLAEHDTVSLRLVGEKSSVIVDFASGAAQYRRTKGGGELIAKAVNHTAHPTVWDATAGLGRDSFVLASLGLAVTAFEQHPAVACLLSDGIRRALLNPETQDTAARITLHFGNAAVQMPALVQTQGKPDIVYLDPMYPERRKSAAVKKEMTYFHRLVGEAQDEAALLHTARQTAKKRVVVKRPRLGEHLAGQAPAYQYTGKSTRFDVYLPYGTDKG

SEQ ID NO: 31349 - protein, 437 aa, Neisseria meningitidis; identical to SEQ ID NO: 1149

SEQ ID NO: 31350 - protein, 297 aa, Neisseria meningitidis
MLSYCGVLSEEKFSRYYRYGVQNNKILQYIANRERNALNFIQAFSEKLLKDSGIYPKFADFFAQPNKNTFESMKTAFTDLVIQNTPKNTEVEVRRIFTKIINPLAYKHNTFGTRKGSISNTPITLDELYYNRLNWRDKGKEKSLTRKEAQTLFADSANAANLNYLVNKATKFVKTLHKTSEVQRFDPTEANQAHHIFMASEFPDLASLPENLICLTPNQHFNLAHPSNKTTVIDKHYQRICLMAKLDSIEQDNRANTGNYDYHEFIHVLNTGFNTDQFDVSMSYETLKHRILMFDFK

SEQ ID NO: 31351 - protein, 197 aa, Neisseria meningitidis; identical to SEQ ID NO: 2603

SEQ ID NO: 31352 - protein, 332 aa, Neisseria meningitidis
VAAHIGRIDTDTPLKPLYVIHGEEELLRIEALDALRAAAKKQGYLNREVYTADNAFDWNELLQTAGSAGLFADLKLLELHIPNGKPGKTGGEALQDFAARLPEDTVTLVLLPKLEKTQLQSKWFAALAAKGEVWEAKPVGAAALPQWIRGRLDKIGLGIEADALALFAERVEGNLLAARQEIDKLALLYPKGHTVNIDEAQTAVANVARFDVFQLAGAWMKGDVPRVCRLLDGLQEEGEEPVLLLWAVAEDVRTLIRLAAVLKQGQGVQSVRNSLRLWGDKQTLAPLAVKRISVVRLLDALKTCAQIDRIIKGAEDGDAWTVFKRLVVSLAE

SEQ ID NO: 31353 - protein, 147 aa, Neisseria meningitidis; identical to SEQ ID NO: 6122

SEQ ID NO: 31354 - protein, 389 aa, Neisseria meningitidis
MPQIKIPAVYYRGGTSKGVFFKRSDLPEAAREAGSARDKILLRVLGSPDPYGKQIDGLGNASSSTSKAVILDKSERADHDVDYLFGQVSIDKPFVDWSGNCGNLTAAVGAFAIEQGLVDKGKIPSDGICTVKIWQKNIGKTIIAHVPMQNGAVLETGDFELDGVTFPAAEVQIEFLDPADGEGSMFPTGNLVDEIDVPNIGRLKATLINAGIPTVFLNAADLGYTGKELQDDINNDAAALEKFEKIRAYGALKMGLINDVSEASARAHTPKVAFVAPAADYTASSGKTVNAADIDLLVRALSMGKLHHAMMGTASVAIATAAAVPGTLVNLASGGGTRKEVRFGHPSGTLRVGAAAECQDGQWTATKAVMSRSARVMMEGWVRVPEDCF

SEQ ID NO: 31355 - protein, 328 aa, Neisseria meningitidis; identical to SEQ ID NO: 7362

SEQ ID NO: 31356 - protein, 127 aa, Neisseria meningitidis
MSTFFQQTAQAMIAKHIDRFPLLKLDQVIDWQPIEQYLNRQRTRYLRDHRGRPAYPLLSMFKAVLLGQWDSLSDPELEHSLITRTDFNLFCRFDELSIPDYSTLCRYRNWLAQDNTLSELLELINRN

SEQ ID NO: 31357 - protein, 270 aa, Neisseria meningitidis
MDKIRVAAVQMVSGVSPETNVAAMKRLVARAAEQGVDWVLLPEYWVLMGANDTDKLALAEPLGGGRFQTALSETAKECGVVLFGGTVPLQSPEAGKVMNTLLVYGRDGKRTGLYHKMHLFGFSGLGERYAEADTIRAGGDVPHLSAEGVSVAAGICYDVRFPEFFRRQLPFDVLMLPAAFTHTTGKAHWELLLRARAVENQCYVVAAAQGGLHENGRRTFGHSMIVDPWGDVLDVLPEGEGIVTADIDANRLNSVRNRLPALKYRVLDAV

SEQ ID NO: 31358 - protein, 321 aa, Neisseria meningitidis
MSYTQLTQGERYHIQYLSRHCTVTEIAKQLNRHKSTISREIRRHRTQGQQYSAEKAQRQSQTIKQRKRQPYKLDSQLIQHIDTLIRRKLSPEQVCAYLCKHHQITLHHSTIYRYLRQDKSNGSTLWQHLRICSKPYRKRYGSTWTRGKVPNRVGIENRPAIVDQKSRIGDWEADTIVGKGQKSALLTLVERVTRYTIICKLDSLKAEDTAWAAVRALKAHKDRVHTITMDNGKEFYQHTKITKALKAETYFCRPYHSWEKGLNENTNGLIRQYFPKQTDFRNISDREIRRVQDELNHRPRKTLGYETPSVLFLNLFQPLIH

SEQ ID NO: 31359 - protein, 207 aa, Neisseria meningitidis; identical to SEQ ID NO: 1335

SEQ ID NO: 31360 - protein, 413 aa, Neisseria meningitidis
MPTKTPSLFGGAMIIAGTVIGAGMLANPTATSGVWFTGSLAVLLYTWFSMLSSGLMILEVNTHYPHGASFDTMVKDLLGRGWNIINGIAVAFVLYLLTYAYIFVGGDLTAKGLGSAAGGDVSLTVGQLVFFGILAFCVWASARLVDRFTSVLIGGMVLTFIWATGGLIADAKMPVLFDTQAPVGTNYWIYAATALPVCLASFGFHGNVSSLLKYFKGDAPKVAKSIWTGTLIALVIYVLWQTAIQGNLPRNEFAPVIAAEGQVSVLIETLSKFAQTGNMDKILSLFSYMAIATSFLGVTLGLFDYIADIFKWNDSVSGRTKTAALTFLPPLISCLLFPTGFVTAIGYVGLAATVWTGIIPAMLLYRSRQKFGAGKTYKVYGGLWLMVWVFLFGIINIAAQVLSQMELVPVFKG

SEQ ID NO: 31361 - protein, 962 aa, Neisseria meningitidis
MSNTTVEQFAAELKRPVEDLLKQLKEAGVSKTGGGDSLTLDDKQLLNAYLTKKNGSNGGTISIRRTKTEVSTVDGVKVETRKRGRTVNIPSAEELAAQVKAAQTQAAPVRPEQTAEDAAKARAEAAARAEARAKAEAEAAKLKAAKAGGKAKAAAQKPTEAKAETAPVAAETKPAEESKAEKAQADKIPSKKPAEPKEKAAKPKHERNGKGKDAKKPAKPAAPAAPQPVVSAEEQAQRDEEARRAAALRAHQEALLKEKQERQARREAMKQQAEQQAKAAQEAKTGRQRPAKPAEKPQAAAPAVENKPVNPAKAKKEDRRNRDDEGQGRNAKGKGGKGGRDRNNARNGDDERVRGGKKGKKLKLEPNQHAFQAPTEPVVHEVLVPETITVADLAHKMAVKGVEVVKALMKMGMMVTINQSIDQDTALIVVEELGHIGKPAAADDPEAFLDEGAEAVEAEALPRPPVVTVMGHVDHGKTSLLDYIRRTKVVQGEAGGITQHIGAYHVETPRGVITFLDTPGHEAFTAMRARGAKATDIVILVVAADDGVMPQTIEAIAHAKAAGVPMVVAVNKIDKEAANPERIRQELTAHEVVPDEWGGDVQFIDVSAKKGLNIDALLEAVLLEAEVLELTAPVDAPAKGIIVEARLDKGRGAVATLLVQSGTLKKGDMLLAGTAFGKIRAMVDENGKSITEAGPSIPVEILGLSDVPNAGEDAMVLADEKKAREIALFRQGKYRDVRLAKQQAAKLENMFNNMGETQAQSLSVIIKADVQGSYEALAGSLKKLSTDEVKVNVLHSGVSGITESDVNLAIASGAFIIGFNVRADASSRKLAENENVEIRYYNIIYDAIDDVKAAMSGMLSPEEKEQVTGTVEIRQVISVSKVGNIAGCMVTDGVVKRDSHVRLIRNNVVIHTGELASLKRYKDDVKEVRMGFECGLMIKGYNEIMEGDQLECFDIVEVARTL

SEQ ID NO: 31362 - protein, 151 aa, Neisseria meningitidis
MDLRKLKKLIDLVEESGIAEIEVTEGEEKVRITRTIAAAPVYAAPVPAAAQAVTPAAAPVAASAPAAAPAARDLSDAQKSPMVGTFYRAPGPNAAPFVEVGQQVKAGDTLCIIEAMKLMNEIEAEKSGTVKEILVENGTPVEFGEPLFIIG

SEQ ID NO: 31363 - protein, 252 aa, Neisseria meningitidis
MKITPVKALTDNYIWMIQEGNHAVCVDPSDPTPVLEFLVRNRLMLAQTWVTHPHPDHEGGAAALWRGYMESPVYGESDIEAATHTVTAGTQFTFGEGLITVWATPGHTDRHISYLMETSDGIHVFCGDTLFSAGCGRVFTGTIEQLYDSFQRFNRLPENTLFYPAHEYTAANLRFAAHIEPDNADIQTALKAAAHTPTLPVTLAHERRVNPFLRVDLPHVRDRAEALSGKTLNSSLDTFVALRELKNQYRTK

SEQ ID NO: 31364 - protein, 214 aa, Neisseria meningitidis; identical to SEQ ID NO: 27060

SEQ ID NO: 31365 - protein, 868 aa, Neisseria meningitidis
MAANQRYRKPLPGTDLEYYDARAACEGIKPGSYDKLPYTSRILAENLVNRADKVDLPTLQSWLGQLIEGKQEIDFPWYPARVVCHDILGQTALVDLAGLRDAIAEKGGDPAKVNPVVQTQLIVDHSLAVECSGYDPDAFRKNREIEDRRNEDRFHFINWTKTAFENVDVIPAGNGIMHQINLEKMSPVVQVKNGVAFPDTCVGTDSHTPHVDALGVISVGVGGLEAETVMLGRASMMRLPDIVGVELNGKRKAGITATDIVLALTEFLRKERVVGAFVEFFGEGARSLSIGDRATISNMTPEFGATAAMFAIDEQTIDYLKLTGRDDAQVKLVETYAKTAGLWADALKTAVYPRVLKFDLSSVTRNMAGPSNPHARFATADLAAKGLAKPYEEPSDGQMPDGSVIIAAITSCTNTSNPRNVVAAALLARNANRLGLKRKPWVKSSFAPGSKVAEIYLKEAGLLPEMEKLGFGIVAFACTTCNGMSGALDPKIQKEIIDRDLYATAVLSGNRNFDGRIHPYAKQAFLASPPLVVAYALAGSIRFDIENDVLGVADGKEIRLKDIWPADEEIDAVVAEYVKPQQFRDVYVPMFDTGTAQKAPSPLYDWRPMSTYIRRPPYWEGALAGERTLRGMRPLAILPDNITTDHLSPSNAILAVSAAGEYLAKMGLPEEDFNSYATHRGDHLTAQRATFANPKLFNEMVKNEDGSVRQGSFARVEPEGETMRMWEAIETYMNRKQPLIIIAGADYGQGSSRDWAAKGVRLAGVEAIVAEGFERIHRTNLIGMGVLPLQFKPDTNRHTLQLDGTETYDVVGERTPRCDLTLVIHRKNGETVEVPVTCRLDTAEEVLVYEAGGVLQRFAQDFLEGNAA

SEQ ID NO: 31366 - protein, 200 aa, Neisseria meningitidis; identical to SEQ ID NO: 3212

SEQ ID NO: 31367 - protein, 456 aa, Neisseria meningitidis
MINPIASLSPLDGRYAQSVEALRPIFSEYGLMKARVKVELNWLKALAAEPKIAEVPPFSAETLAEIDTVIENFSLEDAAAVKAIEATTNHDVKAIEYWLKKRFAEVPEVAAVSEFIHFACTSEDINNLSHALMLQEAREAVLLPKLAEIIEKLTAMAHDLAAVPMMSRTHGQPATPTTLGKETANVVYRLQRQFKNLQAQEFLGKINGAVGNYNAHMVAYPDVDWETHCRNFVEISLGLTFNPYTIQIEPHDYMAEFFQTLSRINTILIDFNRDVWGYISLGYFKQKVKAGEVGSSTMPHKVNPIDFENSEGNLGMANAVLGFLSEKLPISRWQRDLTDSTVLRNMGVGVGYAVLGFAAHLRGLNKLEPNPAALAADLDATWELLAEPIQTVMRRYGVANPYEKLKDLTRGKGGITPEVLKGFIGSLEIPVEAKAKLLELTPALYVGKAEALAKRI

SEQ ID NO: 31368 - protein, 185 aa, Neisseria meningitidis; identical to SEQ ID NO: 5793

SEQ ID NO: 31369 - protein, 272 aa, Neisseria meningitidis
MKGMDKLRYQQDFLNIRPIFTAGEQEYLTGLSDRLPLSVLTGSVRNIEEIGIDFVYSSAKLEGNTYNQYDTQALLKLGQTAGGKLYSDAVMLINLRESYRHLLSGLDSPEPFDWLDFLKTTHSLISENLLEKGSGGVVRRDSVTISGTDYTPLSNPQSLDTELKWLLQEAPKIENPFDRAVYLHNNLAYLQYFKDCNKRTARNCMTLSLMRSGFFPCVFAPDSYPAYAEAVVAHYETGDYGLFKKYFISAYENTVNKYGPQPDMDIFRNFSL

SEQ ID NO: 31370 - protein, 68 aa, Neisseria meningitidis; identical to SEQ ID NO: 1421

SEQ ID NO: 31371 - protein, 301 aa, Neisseria meningitidis; identical to SEQ ID NO: 24448

SEQ ID NO: 31372 - protein, 391 aa, Neisseria meningitidis; identical to SEQ ID NO: 7218

SEQ ID NO: 31373 - protein, 65 aa, Neisseria meningitidis; identical to SEQ ID NO: 127

SEQ ID NO: 31374 - protein, 178 aa, Neisseria meningitidis
MAASVRILGIDPGSRVTGFGVIDVRGRDHFYVASGCIKTPADAPLADRIAVIVRHIGEVITVYKPQQAAVEQVFVNVNPASTLMLGQARGAALAALVSHKLPVSEYTALQVKQAVVGKGKAAKEQVQHMVVQMLGLSGTPQPDAADGLAVALTHALRNHGLAAKLNPSGMQVKRGRFQ

SEQ ID NO: 31375 - protein, 218 aa, Neisseria meningitidis; identical to SEQ ID NO: 3206

SEQ ID NO: 31376 - protein, 240 aa, Neisseria meningitidis; identical to SEQ ID NO: 9167

SEQ ID NO: 31377 - protein, 148 aa, Neisseria meningitidis
MDQAKRTAYVKIINALFDGAVKVQPSQITETVVDMVDKMFDEIATCHERIRPMAVLADGIAGSIVKLAPNEIPLIFGNSSFGSYLKSKTRDEVFKVLKQSKVNNAGKVLEAFYESWLKYTAKDRRLKVCIVTAQSRWRSRFEIELLGI

SEQ ID NO: 31378 - protein, 377 aa, Neisseria meningitidis
MFKKFKPVLLSFFALVFAFWLGTGIAYEINPRWFLSDTATEVPENPNAFVAKLARLFRNADRAVVIVKESMRTEESLAGTADDGPLQSEKDYLALAIRLSRLKEKAKWFHVTEQEHGEEVWLNYHIGEGGLVAVSLSQRSPEAFVNAEYLYRNDRPFSVNVYGGTAHGENYETTGEYRVVWQPDGSVFDASGYGKIGEDVYEHCLGCYQMAQVYLAKYRDVANDEQKVWDFREESNRIASDSRDSVFYQNMRELMPRGMKANSLVVGYDADGLPQKVYWSFDNGKKRQSFEYYLKNGNLFIAQSSTVALKADGVTADMQTYHAQQTWYLDGGRIVREEKQGDRLPDFPLNLEDLEKEVSRYAEAAARRSGGRRDLSH

SEQ ID NO: 31379 - protein, 307 aa, Neisseria meningitidis
MDIETFLAGERAADGYRCGFVAIVGRPNVGKSTLMNHLIGQKISITSKKAQTTRNRVTGIYTDDTAQFVFVDTPGFQTDHRNALNDRLNQNVTEALGGVDAVVFVVEAMRFTDADRVVLKQLPKHTPVILVVNKIDKDKAKDRYALETFVAQVRAEFEFAAAEAVSAKHGLRIANLLELIKPYLPESVPMYPEDMVTDKSARFLAMEIVREKLFRYLGEELPYAMNVEVEQFEEEDGLNRIYIAVLVDKESQKAILIGKGGERLKKISTEARLDMEKLFDTKVFLKVWVKVKSGWADDIRFLRELGL

SEQ ID NO: 31380 - protein, 217 aa, Neisseria meningitidis; identical to SEQ ID NO: 19279

SEQ ID NO: 31381 - protein, 63 aa, Neisseria meningitidis; identical to SEQ ID NO: 1437

SEQ ID NO: 31382 - protein, 170 aa, Neisseria meningitidis; identical to SEQ ID NO: 1571

SEQ ID NO: 31383 - protein, 231 aa, Neisseria meningitidis; identical to SEQ ID NO: 2473

SEQ ID NO: 31384 - protein, 207 aa, Neisseria meningitidis; identical to SEQ ID NO: 4832

SEQ ID NO: 31385 - protein, 477 aa, Neisseria meningitidis; identical to SEQ ID NO: 8039

SEQ ID NO: 31386 - protein, 481 aa, Neisseria meningitidis
MTQYTLKQASVLLQSKQISAVELASAYLAAIAEKNPALNGYITIDQDKTLAEARAADKRIAQGNASALTGVPVAYKDIFCQTGWRSACASKMLDNFISPYTATVVQNLLDEGMVTLGRTNMDEFAMGSTNENSFYGAAKNPWNLEHVPGGSSGGSAAVVAARLAPAALGSDTGGSIRQPASHCGITGIKPTYGTVSRFGMVAYASSFDQTGPMAQTAEDCAILLNAMAGFDPKDSTSLEREKEDYTRDLNQPLKGLKIGLPKEYFGEGNSADVLTALQNTIDLLKAQGAELIEVSLPQTKLSIPAYYVLASAEASTNLSRYDGVRYGHRAAQFADLEEMYGKTRAEGFGSEVKRRIMIGTYVLSHGYYDAYYLKAQKLRRLVADDFQTAFARCDLILAPTAPTAAPKIGADASPVETYLSDIYTIAVNLAGLPALTLPAGFSGGGLPVGVQLVGNYFAEAKILGAAHQIQLNSDWHGKRPE

SEQ ID NO: 31387 - protein, 253 aa, Neisseria meningitidis; identical to SEQ ID NO: 5498

SEQ ID NO: 31388 - protein, 107 aa, Neisseria meningitidis; identical to SEQ ID NO: 1348

SEQ ID NO: 31389 - protein, 467 aa, Neisseria meningitidis
MNNPDLPYRQALERLSQKQYNFTEVRRLLTEAASAGHPAAAFELAKHLLDTNSPYQDYKQGIEMLRIAAEQGHPYARYNLAYIQELEGARPETLIPLYRPLAEEGLPEAQVRLMYLLYASRHFEEALKWAKTSAKNNNPHGQYLLAQYCRYGTPPDFETAHLLYRKAAAQGLPEAHWQLGLQYRFGQGTKADTAQAVNHLRAAAQQGYIPAYTPLAELILPTAPDEAVHWFQQAAQENDPDAHAALADIYLQGKHPERNYKLALHHAEAAAAERHPEGLRILGDICRYSLGIAPDTEKARHYYRQAAEAGSLSAYQKLISDSALNHPNQYGGIKDSAIRRQRTERLYQKAQALHYGLQCAPEYAAALKLYTEAAELGHSKAQTNLGSMYYFGQGMTADYNEARKWFEKAAAKKDSMAFYNLACIHYSGHGVGPDKEKACRYLQEAINNGYGQKSVLQELLQQWQNAV

SEQ ID NO: 31390 - protein, 392 aa, Neisseria meningitidis
MTGKTGRNGSTQAQPERVMLVGVMLDKDGTGSSAARLNGFQTALAEAVELVKAAGGDSVRVETAKRDRPHTALFVGTGKAAELSEAVAADGIDLVVFNHELTPTQERNLEKILQCRVLDRVGLILAIFARRARTQEGRLQVELAQLSHLAGRLIRGYGHLQSQRGGIGMKGPGETKLETDRRLIAHRINALKKQLANLKKQRALRRKSRESGTIKTFALVGYTNVGKSSLFNRLTKSGIYAKDQLFATLDTTARRLYISPECSIILTDTVGFVSDLPHKLISAFSATLEETAQADVLLHVVDAAAPNSGQQIEDVENVLQEIHAGDIPCIKVYNKTDLLPSEEQNTGIWRDAAGKIAAVRISVAENTGIDALREAIAESCAAAPNTDETEMP

SEQ ID NO: 31391 - protein, 153 aa, Neisseria meningitidis
MLLVLEFWVGVSAVGILALFLWLLPRFAAISENLYFRLNNSLECDNHFIRKGDRRQLYRHYGLVARLRVLISNREAFGYLCVGAAMGILFGFAFVMMTLKGYSSAGHVYSVGTYLWMFAMSLDDVPRLVEQYSNLKDIGQRIGGLERNIKAGT

SEQ ID NO: 31392 - protein, 109 aa, Neisseria meningitidis; identical to SEQ ID NO: 4604

SEQ ID NO: 31393 - protein, 252 aa, Neisseria meningitidis; identical to SEQ ID NO: 2885

SEQ ID NO: 31394 - protein, 619 aa, Neisseria meningitidis
MPEYRSKTSTHGRNMAGARALWRATGVMETDFGKPIIAVANSFTQFVPGHVHLHNMGQLVAREIEKAGAIAKEFNTIAIDDGIAMGHSGMLYSLPSRDLIADSIEYMVNAHCADALVCISNCDKITPGMLIAAMRLNIPTIFVSGGPMEAGKVIGVANIQPERRLDLIDAMIESADDNVSNRQVEEVEQNACPTCGSCSGMFTANSMNCLTEALGLSLPGNGSYLATHAGRKELFLEAGRMIVEITKRYYEQNDETVLPRSIATKKAFENAMTMDIAMGGSTNTILHLLAVANEAGVDFKMADIDRLSRVVPCICKTAPNNHDYYMEDVHRAGGIFAILKELDKAGKLHTDVYTIHAPTLKDAIEKWDVTNPENTRAIERFKAAPGGVRTTQAFSQNRMWKTLDLDREKGCIRDVAHAYSQDGGLAVLFGNIAERGCVVKTAGVDESILKFIGRARVFESQEDAVEGILGNQIVAGDIVIIRYEGPKGGPGMQEMLYPTSYLKSKGLGKACALLTDGRFSGGTSGLSIGHASPEAAEGGAIGLVHEGDTVEIDIPNRSIHLAISDEELAARRAEMEARGSKAWKPKNRDRYVSAALRAYGAMATSADKGAVRDVAQIER

SEQ ID NO: 31395 - protein, 318 aa, Neisseria meningitidis
MKEFDFIKRYLQTGTDNDVVLGIGDDAAIVRPREGFDLCFSADMLLKDRHFFADVKPEDLAWKVLAVNISDMAAMGAIPRWVLLSAALPELDEVWLKRFCGSFFGLAKKFGVTLIGGDTTKGDMAFNVTIIGELPKGRALRRDAAVAGDDIWVSGRVGMAAAALNCRLKRCVLPDDVFAECEQKLLRPESRVGLGLALLPFARAAQDVSDGLAQDLGHILTASGVGAEIWADSLPSLSVLKDILPRAQWLSYTLAGGDDYELVFTAPESCRSRVLDAAERCGVPVTRIGKINGGCRLKVLDADGRELELHSLGFDHFG

SEQ ID NO: 31396 - protein, 488 aa, Neisseria meningitidis; identical to SEQ ID NO: 870

SEQ ID NO: 31397 - protein, 43 aa, Neisseria meningitidis; identical to SEQ ID NO: 12437

SEQ ID NO: 31398 - protein, 593 aa, Neisseria meningitidis
MPYFALFDDAVSGRAKRYQNHVESRFFRPEELDALDGALQSGWQKGLHAVLFADYGFGLPLTGVESERGGNLALHWFADCADTDAASWLARHSDGLPAGISTPQSSVSEADYLDHIRQIHEAIRRGDTYQINYTTRLHLQAYGNPVKLYRRLRQPVPYAVLSHLPDAEGQSAWTLCFSPELFLNIASDGTISTEPMKGTAPILGDGQDERRAAELQADPKNRAENVMIVDLLRNDLGKIAQIGKVCVPEPFKVSRFGSVWQMTSTIQAQALPDTSFADILRAAFPCGSITGAPKKMSMQIIESLEAEPRGLYTGSIGYLNPSSGGLGFEGAFNVVIRTLSLTPLSDGIYQGVYGVGSGIVIDSDPAAEYRECGWKARFLNELRPDFSIFETLRVENRQCALLNRHLCRLKAAAQALNLPLPDGCENQIKQYIAHLPDGSFRVKALLASDGISLSRAVLNHLADKQRVIISPTVLSAQNYLRRFKTTHRTLFDQAWQTAETQGAFDSLFFNSDGILLEGGRSNVFVKHRGQWLTPSLDLDILNGIMRQAVLDEPQKYLQTNQVIETHITQKTLQEAEEIRLSNALRGVFAAALA

SEQ ID NO: 31399 - protein, 169 aa, Neisseria meningitidis
MNPFETQSVTFAEPIEMLYACHGKVRRFCGQVAMLSDYIAENGCNQLVLQTIRQITRYFNVAAPLHHEDEEENFFPLLLQYAPQAQESVDELLRQHVSLHGNWDAVAAEFAKLEADNAYIPDAEAFKRFVAGYDVHLAIEEPLFDMGKMFIPKEKLTEIGEIMAARRRR

SEQ ID NO: 31400 - protein, 65 aa, Neisseria meningitidis; identical to SEQ ID NO: 6901

SEQ ID NO: 31401 - protein, 98 aa, Neisseria meningitidis
MDAKHRLKKYVYHLLVAIDQLFNALTGGAADETLSSRTYRGARLAQKPKTRWKVLYTLINGLFFDRQHCRQAYISELKGRQHDARFNQSRAAGEKGTR

SEQ ID NO: 31402 - protein, 209 aa, Neisseria meningitidis; identical to SEQ ID NO: 10428

SEQ ID NO: 31403 - protein, 140 aa, Neisseria meningitidis
MAGCLTDLENCLEKYLEQFGPVSESIEACTVKLQEQPSFFNRLMKTNDKLNRQIDVLQKQSAAIHNEAYIEMNTLLYRHREVVSVHNRKADYAEKGKERIALFPRGLNGITKLPAAVLLPERPYHFDMKEVLHIFSRIPR

SEQ ID NO: 31404 - protein, 97 aa, Neisseria meningitidis
  misc_feature 2, 3, 4: 'Xaa' is any amino acid
VXXXLSTTPYSGLNLNQDKATKPQTVQIVRQGEATPYWFKFNPLYVVEQSFGTLHRKFRYARAAYFGLIKVSAQSHLKAMCLNLLKAANKLSAPAAA

SEQ ID NO: 31405 - protein, 74 aa, Neisseria meningitidis; identical to SEQ ID NO: 28305

SEQ ID NO: 31406 - protein, 287 aa, Neisseria meningitidis
MKTLLPFFGVVRVSGEDRQTFLHGQLSNDINNLQTGQACYATYNTPKGRVIANMIVVNRGGDLLLIMAQDLLEATVKRLRMFVLRAKAVFEILEDYAVGAELEASAEPLAAQEPNLAFAAQQDSDGICSIALPHGGILRIAPKNTLPPYDAAAENAWRLHEIRSGYPWICAATKETAVAQMLNQHIIGGVHFKKGCYPGQEIIARAQYRGQVKRGLAVLSGNSAVEAGTLLTADGEETGIVLDSVQDSENFTALAVIKFSAAQKELTAPNGSIFKAVHPFFKTENAE

SEQ ID NO: 31407 - protein, 400 aa, Neisseria meningitidis
MKNYHAPDEKGFFGEHGGLFVSETLIPALQELADAYKAAKNDPEFWAEFRHDLKHYVGRPSPVYHAARLSEHLGGAQIWLKREDLNHTGAHKVNNTIGQALLAKRMGKKRVIAETGAGQHGVASATVAARFGMTCDVYMGADDIQRQMPNVFRMKLLGANVVGVDSGSRTLKDAMNEAMREWVARVDDTFYIIGTAAGPAPYPEMVRDFQCVIGNEAKEQMLEAIGRQPDVAVACVGGGSNAIGLFHPYIGEENVRLVGVEAGGLGVNTPDHAAPITSGAPIGVLHGFRSYLMQDENGQVLGTHSVSAGLDYPGIGPEHSHLHDIKRVEYTVAKDDEALEAFDLLCRFEGIIPALESSHAVAWAVKNAPKMGKDQVILVNLSGRGDKDINTVAKLKGIKL

SEQ ID NO: 31408 - protein, 384 aa, Neisseria meningitidis; identical to SEQ ID NO: 16265

SEQ ID NO: 31409 - protein, 502 aa, Neisseria meningitidis
MQTDCDVLIAGNGLAALTLALSLPESFRIVILCKNRLDDTASRHAQGGIAAAWSGEDDIEKHVADTLEAGAGLCDEAAVRTILSQGKPAIEWLLAQGVAFDRNPDDLHLTREGGHTCRRIAHVADYTGEAVMQSLIAQIRCRPNIRVCERQMALDIQTESGAACGLTVLDRRTQETYRIRARHTVLAGGGLGQIYAATTTPPECTGDAIAMAIRAGCAVENLEFIQFHPTGLARSSENGRTFLISEAVRGEGGILTNQAGERFMPHYDRRAELAPRDIVARAIAAEIAKQTPDFVSLDISRQPEAFVRRHFPSIHRHCLSQCGLDITRQAIPVRPVQHYTCGGIQTDPCGRTSLPQLYALGETACTGLHGANRLASNSLLECVVTARLAAQTIADGQAFQAKTSPRPSENPSAEAGIFADDLQNTFSRPVLQTFNQRHLGILRNDTGLRRAIAQLRLWKQNQAEPHTASEYENRNLLECSLAVAQAAYRRRQNIGAHFNSDC

SEQ ID NO: 31410 - protein, 109 aa, Neisseria meningitidis; identical to SEQ ID NO: 899

SEQ ID NO: 31411 - protein, 247 aa, Neisseria meningitidis
MLIIRNLIYWLILCSTLIFLFPFMLLASPFRDGAHKMARVWVGILNLSLKHIVGLKYRIIGAEHIPDRPAVICAKHQSGWETLALQDIFPPQVYVAKRELFKIPFFGWGLKLVKTIGIDRNNRREANEQLIKQGLARKNEGYWITIFPEGTRLAPGKRGKYKLGGARMAKMFEMDIVPVALNSGEFWPKNSFLKYPGEITVVICPTIPHASGSEAELMGKCEHLIETQQPLISGAGPFAAKMPSETA

SEQ ID NO: 31412 - protein, 417 aa, Neisseria meningitidis; identical to SEQ ID NO: 4662

SEQ ID NO: 31413 - protein, 307 aa, Neisseria meningitidis
MKKRNNPLPLLNGVKPSYLVLPHEKQFYGLPLLHFLCIRFPFVGADDWRRRLNSGFVVGSDGAALDEHTLFEPGKVMFYYRETSSEDEPRIPFEEKILHIDEHLIVVDKPHFLPVIPSGRFLKETLLTRLRLRPELQHLNVEDITPLHRLDKDTAGVMLLSHNPDTRGAYQTMFQNKTVWKTYEALAPTRTDLPYPLDVVSRLVRGEKFFTTQEAEGEPNAHTTVELIENRGEFSLYRLTPHTGKKHQLRVHMMGLGMPLLNDALYPVPSEAGSEDYRKPLKLLAKKIAFADPLSGLERVFCSRFCL

SEQ ID NO: 31414 - protein, 269 aa, Neisseria meningitidis; identical to SEQ ID NO: 1709

SEQ ID NO: 31415 - protein, 201 aa, Neisseria meningitidis; identical to SEQ ID NO: 26261

SEQ ID NO: 31416 - protein, 113 aa, Neisseria meningitidis
LLEGLPKGTTVYADKGYDSAENRQHLKEHHLPDGIMRKACRNRPLTEAQTKRNRYLSKTRYVVEQSFGTLHRKFRYARAAYFGLIKVSAQSHLKAMCLNLLKAANRLSAPAAA

SEQ ID NO: 31417 - protein, 190 aa, Neisseria meningitidis
MDNPATAPWQDGWLQSVRHIPSPNFGPRESKEEVSLVVLHNISLPPFEYGTDAVEKLFANRLDPDGHPFFSLIHTLRVSSHFLIKRDGETVQFVSCDNMAYHAGVSSFRGREKCNAFSIGIELEGCDFEPFTEAQYRSLEALLDAICRRYPITAVTGHQDIAPGRKTDPGHFFDWRRIRGKGFPVDRNAV

SEQ ID NO: 31418 - protein, 104 aa, Neisseria meningitidis; identical to SEQ ID NO: 18463

SEQ ID NO: 31419 - protein, 245 aa, Neisseria meningitidis; identical to SEQ ID NO: 14476

SEQ ID NO: 31420 - protein, 355 aa, Neisseria meningitidis
MGGKTFMLMAGGTGGHIFPALAVADSLRARGHHVIWLGSKDSMEERIVPQYGIRLETLAIKGVRGNGIKRKLMLPFTLYQTVREAQRIIRKHRVECVIGFGGFVTFPGGLAAKLLGVPIVIHEQNAVAGLSNRHLSRWAKRVLYAFPKAFSHEGGLVGNPVRADIAKLPAPAERFQGREGRLKILVVGGSLGADVLNKTVPQALALLPDNARPQMYHQSGRGKLGSLQADYDALGVKAECVEFITDMVSAYRDADLVICRAGALTIAELTAAGLGALLVPYPHAVDDHQTANARFMVQAEAGLLLPQTQLTAEKLAEILGGLNREKCLKWAENARTLALPHSADDVAEAAIACAA

SEQ ID NO: 31421 - protein, 218 aa, Neisseria meningitidis; identical to SEQ ID NO: 1265

SEQ ID NO: 31422 - protein, 741 aa, Neisseria meningitidis
MTQKSTIVYTHTDEAPALATQSLLPIVQAFARHADIDVKTADISLSGRILAAFPEYLTEAQRVPDALAELGELVKQPDANVIKLPNISASVPQLTAAIKELQSKGFAVPDYPADPQTDEEKAVRERYDRIKGSAVNPVLREGNSDRRAPKAVKNFAKKNPHSMGAWAKDSKTHVATMQSGDFFHNEQSVTVPEATSVSIVFTDKQGNKKELRAPVALKAGEIIDATVMSKKALLAFLAEQVQDAKAKGVLFSLHMKATMMKVSDPIIFGHAVKVFFAPVFEKFGGKLAAAGVNVNNGFGNLLANLDKLDADTRTAVEAEIAAVYAANPDLAMVDSDKGITNLHVPSDVIVDASMPAMIRNSGRMWDKNGKAQDTKAVIPDSSYAGVYQATIDFCREHGAFDPTTMGTVPNVGLMAQAAEEYGSHNKTFEIEADSQVQVVDATGKVLMQHDVEAGDIWRMCQTKDAPVKDWVQLAVNRARLSNTPAVFWLDESRPHDKSLLAKVKAYLAELDTNGLDIRVLAPEEAAKFSLDRLKNGEDTISVTGNVLRDYLTDLFPILELGTSAKMLSIVPLMNGGGMFETGAGGSAPKHVQQFLEENHLRWDSLGEFLALAVSFEHLAQKTGNAKAQVLADTLDAATEKLLLNDKSPKRKAGELDNRGSHFYLTLYWAQELAAQDKDAELKAAFTPLAAALTADEAKIVAELSAVQGKAADIGGYYAANPEKAAQAMRPSVTFNQALNAL

SEQ ID NO: 31423 - protein, 271 aa, Neisseria meningitidis; identical to SEQ ID NO: 3345

SEQ ID NO: 31424 - protein, 94 aa, Neisseria meningitidis
MFVGRLKNAPSITAKHFLKENIMKFINTCRKYGAKLAVVTAAPLALAAHANATLPDTAKNALEAAKADGMEVGWIVVGVFAALFVFSIVKRVMK

SEQ ID NO: 31425 - protein, 119 aa, Neisseria meningitidis; identical to SEQ ID NO: 121

SEQ ID NO: 31426 - protein, 486 aa, Neisseria meningitidis
VNYFPIFANLAGRPVLVVGGGAVAARKISLLLKAGAEVRVAAKHLNAELSALAAENKILWLAEEFRAEHIRTVFLIIAASSDQALNRRVFHLAESCQKPVNVVDDRDHCSFIFPSVIDRNPVQIAVSSSGSAPVLARLLRERLEALLPPSLGDMAEISGRWRDAVKGKLKSVTERRRFWEKQFNGRFAALVKNRQNTLAERELAGQLEQSRQNDQGGSVSLVGAGPGDAGLLTLKGLQEIQQADVVLYDALVSDGILSLVRRDAERIFVGKRARGERTPQEDTNALMVRLAREGRRVVRLKGGDPFVFGRGGEELETLARHQIPFSVVPGITAAVGATAYAGIPLTHRDYAQSAVFVTGHRKADAPDIEWQTLARSRQTLVIYMGALKAALIAERLQQHGRSPDTPAAVISHGTQSTQSTAIGTLANLARLAENAPKPALIVVGEVVELHEKLAWFGENAKKESNPAEHAYFALDGLGIGQEQQAA

SEQ ID NO: 31427 - protein, 648 aa, Neisseria meningitidis
VLLFLYSKRENRSIFYDYAKKTAKTSGNEARELADLSEDIGIRFKYPNSERVYLQGSRDDIRVPLREIRQDDTYTAQGTEANPPIPVYDTSGVYGDPAAHIDLKHGLPHIRTAWLDERGDTEILPKLSSEYGTERAHDPKTAHLRFNQITRPRRAKSGNNVTQLHYARQGIITPEMEFVAIRERLKLDELSQKSEYAKLLKQHAGQSFGANIPTRPDQITPEFVRQEIAAGRAIIPANINHPELEPMIIGRNFRVKINGNLGNSAVTSSLTEEVEKMVWSLRWGADTIMDLSTGAHIHETREWIIRNAPVPIGTVPIYQALEKTGGIAEDLTWDLFRDTLIEQAEQGVDYFTIHAGVLLRYVPMTANRLTGIVSRGGSIMAKWCLAHHRENFLYTHFDEICEIMKAYDVSFSLGDGLRPGCIADANDESQFAELHTLGELTDKAWKHDVQVMIEGPGHVPLQRVKENMTEELQHCFEAPFYTLGPLVTDIAPGYDHITSGIGAANIGWYGTAMLCYVTPKEHLGLPDKEDVRTGIITYKLAAHAADLAKGWPGAQLRDNALSKARFEFRWRDQFRLSLDPERAESFHDETLPAEGAKIAHFCSMCGPKFCSMKITQEVRDYADKQKAQRQGMEEKAVEFVKKGAKIYS

SEQ ID NO: 31428 - protein, 89 aa, Neisseria meningitidis
MPSETFPFQTAWFYSNLNRADRSQKHTFAIPAQALPLYAPNPNPPHSRRHYLSDSRTKPRIRLHGSGYISNTGIVFRKTVKSASASQYI

SEQ ID NO: 31429 - protein, 263 aa, Neisseria meningitidis
MNVYFLGGGNMAAAIAGGLVKQGGYRIHIANRGAEKRERLEKELGVETSETLPELHSDDVLILAVKPQDMEAACKNIRTNGALVLSVAAGLSVGTLSRYLGGTRRIVRVMPNTPGKIGLGVSGMYAEAEVSETDRRIADRIMKSVGLTVWLEDEAQMHSITGISGSGPAYVFYLLDALQNAAIRQGFDMAEARALSLATFKGAVALAEQTGEDFEKLQKNVTSKGGTTHEAVEAFRRHRVAEAISEGVCACVRRSQEMERQYQ

SEQ ID NO: 31430 - protein, 432 aa, Neisseria meningitidis
MAKNVVVIGAQWGDEGKGKIVDWLAEEAGGVVRFQGGHNAGHTLVVGGKKTILRLIPSGILHESLDCFIGSGVVVSPEALLGEIDELNAAGVKNVEGRLKIAPTCPLILPYHIALDQAREASRGKGKIGTTGRGIGPAYEDKVARRAIRAADLLHPEKLREKLDAVLAYYNVQLQHLHNAESVKAEDVMAVIEKVAPRITPMITDVSRVLNEKNKNGEKLLFEGAQGALLDIDYGTYPFVTSSNCLAGAASAGAGVGPQMLDYVLGIVKAYTTRVGSGPFPTELFDEVGAGLAERGHEFGSVTGRARRCGWFDAAALKRSIQINGISGMCITKLDVMDGVETINICVGYELPDGGKTDILPCGSDAVETCKPIYETMPGWRESTFGVKDYGALPENAKAYLKRIEEVCGAPVAIVSTGPDREETIVLHHPFA

SEQ ID NO: 31431 - protein, 89 aa, Neisseria meningitidis; identical to SEQ ID NO: 1367

SEQ ID NO: 31432 - protein, 302 aa, Neisseria meningitidis; identical to SEQ ID NO: 1790

SEQ ID NO: 31433 - protein, 169 aa, Neisseria meningitidis
MKKKLLSGIKFAVQTALVFLLVSLFLDWIRKPEEPAGAAGRPLTLLSGQRLTLGQFSRDKAVLVYFWGSWCGVCRYQSPIIDDLAADGVPVVGVAVRSGSVSEVAAYMAKRGLGFPTVNDEDGGLARSWRIVATPAVVLVKNGKMVHYTTGISSYWGLRARIFQADVFG

SEQ ID NO: 31434 - protein, 208 aa, Neisseria meningitidis
MYTGERFNTYSHLSGLILAAAGLALMLLKTIGHGDGYRIFSVSVYGISLLLLYLSSSLYHGIAAGKLKSILKKTDHCMIYVLIAGSYTPFALVSLRNGPGWTVFSLSWLLAAAGIAQELTIGRKSEKRLLSIVIYVVMGWMVLAVMKSLTASLPSAGLAWLAAGGMLYSVGIYWFVNDEKIRHGHGIWHLFVLGGSITQFVSVYGYVI

SEQ ID NO: 31435 - protein, 477 aa, Neisseria meningitidis; identical to SEQ ID NO: 3214

SEQ ID NO: 31436 - protein, 127 aa, Neisseria meningitidis; identical to SEQ ID NO: 1134

SEQ ID NO: 31437 - protein, 129 aa, Neisseria meningitidis; identical to SEQ ID NO: 3613

SEQ ID NO: 31438 - protein, 376 aa, Neisseria meningitidis
MKQTDSTIKSRAAVAFAPNQPLQIVEIDVEMPRKGEVLIRNTHTGVCHTDAFTLSGSDPEGVFPVVLGHEGAGVVVAVGEGVSSVKPGDHVIPLYTAECGECEFCCSGKTNLCVSVRDTQGKGLMPDGTTRFSYQGQPIYHYMGCSTFSEYSVVAEVSLAKINPEANHEQVCLLGCGVTTGIGAVHNTAKVQEGDSVAVFGLGAIGLAVVQGARQAKAGRIIAIDTNPSKFELAKQFGATDCLNPNDYDKPIKDVLLDINKWGIDHTFECIGNVNVMRQALESAHRGWGQSIIIGVAGAGQEISTRPFQLVTGRVWKGSAFGGVKGRSELPKMVEDSMKGDIELEPFVTHTMTLDQINEAFELMHEGKSIRAVIHY

SEQ ID NO: 31439 - protein, 209 aa, Neisseria meningitidis
  misc_feature 3, 4: 'Xaa' is any amino acid
VCXXALGYTGYGSEAVRTAVAVLDVLGAAGDAGPDAPARRRASAKSGHRYTGTVSKVYDGDTLHVIDGDGAKHKIRMAYIDAPEMKQAYGTRSRDNLRAAAEGRKVSVRVFDTDRYQREVAQVSVGKTDLNLMQVQDGAAWHYKSYAKEQQDKADFADYADAQIQAERERKGLWKAKNPQAPWAYRRAGRSGGGNKDWMDAVGEWLGIW

SEQ ID NO: 31440 - protein, 199 aa, Neisseria meningitidis
MSEKPEKIVLASGNVGKLEEFGNLFKPYGITVLPQSEFGIPECPEPYPTFVENALAKARHAAEYSGLPALADDSGICAAALNGAPGIHSARYADDNPKSDTANNLKLATELAGKADKSCCYVCVLVFVRHQDDPRPIIAEGVWHGQWHGTPLGQNGFGYDPYFYLPEHGKTAAELDSEVKNRESHRAQALADLIRKLAL

SEQ ID NO: 31441 - protein, 310 aa, Neisseria meningitidis; identical to SEQ ID NO: 5578

SEQ ID NO: 31442 - protein, 182 aa, Neisseria meningitidis; identical to SEQ ID NO: 2877

SEQ ID NO: 31443 - protein, 278 aa, Neisseria meningitidis; identical to SEQ ID NO: 789

SEQ ID NO: 31444 - protein, 308 aa, Neisseria meningitidis
  misc_feature 3, 4: 'Xaa' is any amino acid
VCXXDVHCTVTEIAKQLNRHKSTISREIRRHRTQGQQYSAEKAQRQSQTIKQRKRQPYKLDSQLIQHIDTLIRRKLSPEQVCAYLCKHHQFTLHHSTIYRYLRQDKSNGSTLWQHLRICSKPYRKRYGSTWTRGKVPNRVGIENRPAIVDQKSRIGDWEADTIVGKGQKSALLTLVERVTRYTIICKLDSLKAEDTARAAVRALKAHKDRVHTITMDNGKEFYQHTKITKALKAETYFCRPYHSWEKGLNENTNGLIRQYFPKQTDFRNISDREIRRVQDELNHRPRKTLGYETPSVLFLNLFQPLIH

SEQ ID NO: 31445 - protein, 195 aa, Neisseria meningitidis; identical to SEQ ID NO: 1987

SEQ ID NO: 31446 - protein, 65 aa, Neisseria meningitidis
  misc_feature 61, 62, 63: 'Xaa' is any amino acid
MFDGEVEADESYFGGQRKGKRGGGAAGKVAVFGLLKRNGKVYTVTVPNTQTATLFPIIREXXXHT

SEQ ID NO: 31447 - protein, 262 aa, Neisseria meningitidis
MNPKIVFFDIDDTLYRKYTDTLRPSVKTAVAALRGKGILTALATGRSLATIPEKVRDMMAETGMDAVVTINGQFALLHGKIVHEVPMDAGLMGRVCAHLDGLGMDYAFVGGEGIAVSALSECVCRALKHIASDFFADKDYFSSKPVYQMLVFAEEDEMPPWSDIVKREGLKTVRWHEEAVDLLPAGASKTDGIRSVVEALGLEMADVMAFGDGLNDVEMLSEVGFGVAMGNGEQAAKEAAKYVCPGVDEDGVLRGLQDLGVI

SEQ ID NO: 31448 - protein, 137 aa, Neisseria meningitidis
MRKAISRNCTTSPANAHECKHLSPLLEGLPEGTTVYADKGYDSAENRQHLEEHQLLDGIMRKTCRNRPLSEAQTKRNRYLSKTRYVVEQSFGTLHRKFRYARAAYFGLIKVSAQSHLKAMCLNLLKAANRLSAPAAA

SEQ ID NO: 31449 - protein, 328 aa, Neisseria meningitidis
MKNFLSLFASILMSALIAVWFSQNPINAYWQQTYHRNSPLEPLAAYGWWRSGAALQENAYTLSDGIKAFLSGETPPTPQDGGSADMPPEAAASEAAPQTGEIQEWKQDTDTAAVRSGDKVFFVGDSLMQGVAPFVQKSLKQQYGIESVNLSKQSTGLSYPSFFDWPKTIEETLQKHPEISVLAVFLGPNDPWDFPVGKRYLKFASDEWAQEYLKRVDRILEAAHTHRVQVVWLGIPYMKKAKLDGQMRYLDKLLSEHLEGKIILIPTAHTLSGGEDRHTDSVNVNGKPVRYRSKDGIHFTAEGQKLLAAKIMEKIVFEPSTQPSSTQP

SEQ ID NO: 31450 - protein, 334 aa, Neisseria meningitidis; identical to SEQ ID NO: 309

SEQ ID NO: 31451 - protein, 46 aa, Neisseria meningitidis
  misc_feature 41, 42: 'Xaa' is any amino acid
MSYTQLTQGERYHIQYLSRHCTVTEIAKQLNRHKSTISREXXHTLN

SEQ ID NO: 31452 - protein, 227 aa, Neisseria meningitidis
MELVFIRHGQSEWNAKNLFTGWRDVKLSEQGLAEAAAAGKKLKENGYEFDIAFTSVLTRAIKTCNIVLEESDQLFVPQIKTWRLNERHYGQLQGLDKKQTAEQYGDEQVRIWRRSYDTLPPLLDKDDEFSAHKDRRYAHLPADVVPDGENLKVTLERVLPFWEDQIAPAILSGKRVLVAAHGNSLRALAKHIEGISDKDIMGLEIPTGQPLVYKLDDNLKVIEKFYL

SEQ ID NO: 31453 - protein, 176 aa, Neisseria meningitidis
  misc_feature 171, 172: 'Xaa' is any amino acid
MSTFFQQTAQAMIAKHIDRFPLLKLDQVIDWQPIEQYLNRQKNRYLRDHRGRPAYPLLSMFKAVLPGQWHSLSDPELEHSLITRIDFNLFCRFDELIIPDYSTLCRYRNWLAQDDTLSELLKLINCQLTEKGLKIEKASAAVVDATIIQTAGSKQRQAIEVDEEGQIRTSXXHTLN

SEQ ID NO: 31454 - protein, 256 aa, Neisseria meningitidis
  misc_feature 250, 251: 'Xaa' is any amino acid
LNPTNDLKAWQLRAQAQTELLLERFLPSENEIPHTLHEAMRYAALDGGKRLRPMLVLAASELGEAVHEAVEQAMAAIEMIHAYSLVHDDMPAMDNDSLRRGKPTCHIKYGEANALLTGDALQTQAFDVLSRPTELPAARQLAMLSVLAKAGGSAGMAGGQAIDLANVGKQMVQADLEQMHSLKTGALIRAAVLLGAMSCPNLSEDSLAVLDAYAAKLGLAFQVIDDVLDCDADTATLGFTAGKDADNDKXXTHLIN

SEQ ID NO: 31455 - protein, 637 aa, Neisseria meningitidis
MLNITLPDGSVRQYESPVTVAQIAASIGAGLAKAAVAGRVNGKLVDACDPIVEDSAVQIITPKDQEGIEIIRHSCAHLVGHAVKQLYPNAKMVIGPVIEEGFYYDIATEKPFTPEDVAAIEARMKELIAQDYDVVKIMTPRAEAIKIFQERGEEYKLRLIDDMSEVEAMGMYHHQEYVDMCRGPHVPNTRFLKNFKLTKLAGAYWRGDSNNEMLQRIYGTAWATKDELKAYIQRIEEAEKRDHRKLGKQLDLFHLQDEAPGMVFWHPKGWALWQVIEQHMRKELNAAGYKEVKTPQIMDKTFWEKSGHWDNYKDNMFVTSSEKREYAVKPMNCPGHVQIFNNGLRSYRDLPMRLAEFGSCHRNEPSGALHGLMRVRGFVQDDAHIFCTEDQIVSEARAFNELLVRIYKQFGFHDVSVKLSLRPEKRAGSDDVWDKAEQGLREALTACGVEWGELPGEGAFYGPKIEYHVKDALGRSWQCGTLQLDFVLPERLNAEYVTENNDRARPVMLHRAILGSLERFIGILIENHAGSFPLWLAPVQLVIMNITENQADYCREVAAKLQAAGFRAELDLRNEKIGYKIRDNSQYRFPYQIVVGDKEKQENKVAVRRKAEDLGSLDLDDFIAQLQQEITDALVNH

SEQ ID NO: 31456 - protein, 442 aa, Neisseria meningitidis
MKKVFIRTFGCQMNEYDSDKMLAVLAEEHGGIEQVTQPDDADIILFNTCSVREKAQEKVFSDLGRVRPLKEKNPGLIIGVAGCVASQEGENIVKRAPYVDVVFGPQTLHRLPKMIVDKETSGLSQVDISFPEIEKFDHLPPARVEGGAAFVSIMEGCSKYCSFCVVPYTRGEEFSRPLNDVLTEIANLAQQGVKEINLLGQNVNAYRGEMDDGEICDFATLLRIVHEIPGIERLRFTTSHPREFTDAIIECYRDLPKLVSHLHLPIQSGSDRVLSAMKRGYTALEYKSIIRKLRAIRPDLCLSSDFIVGFPGETEREFEQTLKLVKDIAFDLSFVFIYSPRPGTPAANLHDDTPHEEKVRRLEALNEVIEAETAHINQTMVGTVQRCLVEGISKKDPDQLQARTANNRVVNFTGTPDMINQMIDLEITEAYTFSLRGKTVSI

SEQ ID NO: 31457 - protein, 202 aa, Neisseria meningitidis
MTIAGFSRIWNEGGLPKSETLKKIKQLKGCSIDWLLTGEGNPFPDEAPKKSLAYDTLGNEVDTDEFVFVPRYDIRAAAGYGQFVDHEEPVFTMAFRRHWIENYVTRDTKNLSVISVKGDSMEGVLNDGDSILVNHGENTPRDGLYVLRINENLLVKRLQIVPGGIINVISANEAYPAFEINLNDLTDDVEIIGRVEWFGRTI

SEQ ID NO: 31458 - protein, 823 aa, Neisseria meningitidis
MKKTCFHCGLDVPEHLHLTVRYENEDRETCCAGCQAVAQSIIDAGLGSYYKQRTADAQKTELPPQEILDQIRLYDLPEVQSDFVETHGGTREAVLMLGGITCAACVWLIEQQLLRTDGIVRIDLNYSTHRCRVVWDDGKIRLSDILLKIRQIGYTAAPYDAQKIEAANQKERKQYIVRLAVAGLGMMQTMMFALPTYLYGGDIEPDFLQILHWGGFLMVLPVVFYCAVPFYQGALRDLKNRRVGMDTPITVAIIMTFIAGVYSLATNAGQGMYFESIAMLLFFLLGGRFMEHIARRKAGDAAERLVKLIPAFCHHMPDYPDTQETCEAAVVKLKAGDIVLVKPGETIPVDGTVLEGSSAVNESMLTGESLPVAKMPSEKVTAGTLNTQSPLIIRTDRTGGGTRLSHIVRLLDRALAQKPRTAELAEQYASSFIFGELLLAVPVFIGWTLYADAHTALWITVALLVITCPCALSLATPTALAASTGTLAREGILIGGKQAIETLAQTTDIIFDKTGTLTQGKPAVRRISLLRGTDEAFVLAVAQALEQQSEHPLARAILKHRVSDGSVPDIAIKQRLNRIGEGVGAQLTVNGETQVWALGRASYVAEISGKEPQTEGGGSAVYLGSQSGFQAVFYLTDPLKDSAAEAVRQLAGKNLTLHILSGDRETAVAETARALGVAHYCAQAMPEDKLEYVKALQKEGKKVLMIGDGINDAPVLAQADVSAAAAGGTDIARDGADIVLLNEDLRTVAHLLDQARRTRHIIRQNLIWAGAYNIIAVPLAVLGYVQPWIAALGMSFSSLAVLGNALRLHKRGKMQSEKMPSEQ

SEQ ID NO: 31459 - protein, 481 aa, Neisseria meningitidis
MNWSDLNLMPALPEVALLSLLVLLLLADLWVSDDKRRWTHYGALATVAVTAVVQLAVWEQGSTSSFNGMYIADGMSRLAKMVLYALTFALFVYAKPYNQVRGIFKGEFYTLSLFALLGMSVMVSAGHFLTAYIGLELLSLALYALIALRRDSGFAAEAALKYFVLGALASGLLLYGISMVYGATGSLEFAGVLASSFNEEANEWLLKLGLVFIVVAVAFKLGAVPFHMWVPDVYHGAPTSVTALVGTAPKVAAVVFAFRILVTGLGTVHHDWSLMFALLAAASLLVGNLAAIMQTNIKRMLAYSTVSHMGFILLAFMAGAVGFAAGLYYAITYALMAAAGFGVLMVLSDGDNECENISDLAGLNQHRVWLAFLMLLVMFSMAGIPPLMGFYAKFGVIMALLKQGYVWLSVFAVVMSLIGAFYYLRVVKVMYFDESGRARLAAGGNNAAKFLLSVNALLLVLWGIMPQTVIDWCAKALENTL

SEQ ID NO: 31460 - protein, 269 aa, Neisseria meningitidis; identical to SEQ ID NO: 6662

SEQ ID NO: 31461 - protein, 242 aa, Neisseria meningitidis; identical to SEQ ID NO: 3540

SEQ ID NO: 31462 - protein, 199 aa, Neisseria meningitidis; identical to SEQ ID NO: 3649

SEQ ID NO: 31463 - protein, 380 aa, Neisseria meningitidis; identical to SEQ ID NO: 314

SEQ ID NO: 31464 - protein, 384 aa, Neisseria meningitidis
MKFIDEAKIEVAAGKGGNGATSFRREKFVPRGGPDGGDGGKGGSVWAEADENTNTLVEYRFVKRYQAKNGEKGHGSDRYGAGADDIVLKMPVGTLIRDLDTDEIVADLTYHGQRVCLAKGGKGGLGNIHFKSSVNRAPKQSTPGEEGEARSLQLELKVLADVGLLGMPNAGKSTLITAVSAARPKIANYPFTTLHPNLGVVRIDENHSFVMADIPGLIEGAAEGAGLGHRFLKHLSRTGLLLHVVDLAPFDETVNPAEEALAIINELRKYDEELYDKPRWLVLNKLDMLDEEEAQARTAAFLEAVGWDYPKPDDRFQFDMETPRLFQISALTHQGTQELVHQINQYLTEKKRIEAEKAEAEKAAANVEIIEQQPKTDTGVFKPE

SEQ ID NO: 31465 - protein, 616 aa, Neisseria meningitidis
MYPPSLKHSLPLLVALVLAACSSTNTLSADKTPADNIETADLSASVPTRPAEPEGKTLADYGGYPSALDAVKQKNDAAVAAYLENAGDSAMAENVRNEWLKSLGARRQWTLFAQEYAKLEPAGRAQEVECYADSSRNDYTRAAELVKNTGKLPSGCTKLLEQAAASGLLDGNDAWRRVRGLLAGRQTTDARNLAAALGSPFDGGTQGSREYALLNVIGKEARKSPNAAALLSEMESGLSLEQRSFAWGVLGHYQSQNLNVPAALDYYGKVADRRQLTDDQIEWYARAALRARRWDELASVISHMPEKLQKSPTWLYWLARSRAATGNTQEAEKLYKQAAATGRNFYAVLAGEELGRKIDTRNNVPDAGKNSVLRMAEDGAIKRALVLFRNSRTAGDAKMRRQAQAEWRFATRGFDEDKLLTAAQTAFDHGFYDMAVNSAERTDRKLNYTLRYISPFKDTVIRHAQNVNVDPAWVYGLIRQESRFVIGAQSRVGAQGLMQVMPATAREIAGKIGMDAAQLYTADGNIRMGTWYMADTKRRLQNNEVLATAGYNAGPGRARRWQADTPLEGAVYAETIPFSETRDYVKKVMTNAAYYAALFGAPHIPLKQRMGIVPAR

SEQ ID NO: 31466 - protein, 451 aa, Neisseria meningitidis
MKAPELLLPAGGLERMRTAYDYGADAVYAGSPRYSLRARNNEFAKLDVLEQGIKEAHERNKKFFLTVNTLPHNSKLKTFVSDMEPLIAMKPDALIMADPGLIMTVREKWPEMPIHLSVQANTTNYWGVKFWQNIGVERIILSRELSMEEIAEIRQQCPDIELEVFIHGALCIAYSGRCLLSGYFNHRDPNQGTCTNSCRWDYKVHNATESDAGDAQLLQGFNFEKAQEEANQNFEGINGQKRHPYADKVFLIEESNRPGEMMPIMEDEHGTYIMNSKDLRGIEVVEKLAKIGVDSLKVEGRTKSLYYVARVAQSYRKAIDDAVAGRPFDYSLLSELEGLANRGYTSGFLERHQTQDYQNYLTGHSTAKQSQYVGHVTEIDENGWATVEVKNRFAVGDSLEIIHPNGNQTIKLEQMTRKGQPVDVAPGNGIQVKIPNMQGKEKALIARVLNP

SEQ ID NO: 31467 - protein, 210 aa, Neisseria meningitidis; identical to SEQ ID NO: 5238

SEQ ID NO: 31468 - protein, 597 aa, Neisseria meningitidis
MKNIRNFSIIAHIDHGKSTLADRFIQYCGGLDLREMSTQVLDSMDIEKERGITIKAQTAALNYKARDGQVYQLNLIDTPGHVDFSYEVSRSLSACEGALLVVDASQGVEAQTVANCYTAIDLGVEVVPVLNKIDLPAAEPDRVEQEIEDIIGIDAVGAVQCSAKSGIGVEDVLEEIVAKIPAPTGDENAPLQAVIVDSWFDNYVGVVMLIRVKNGTIKLKDKVRFMSTKAETQVEQLGVFTPKSVQKQELKAGEVGFLITGVKELGQAKVGDTVTLVANPASEPLPGFQEVQSQVFAGLYPVESHDYEALRDALEKLQLNDASLKFEPEVSQALGFGFRCGFLGLLHLEIVQERLEREFDMDLITTAPTVVYEVVLKSGEKIEVENPSKLPDIGSIETILEPIITATILVPQEYVGNVMTLCNQKRGVQVNMQYMGRQVMLTYDLPMNEVVMDFFDKLKSTSRGYASLDYHFKEFQPSDLIKLDIMVNGEKVDALSLIVHRQSAVHRGRELASKMRELIPRQMFDIAVQAAIGSQIIARENVKALRKNVLAKCYGGDITRKKKLLEKQKAGKRRMKQVGNVEIPQSAFLAILQVSDK

SEQ ID NO: 31469 - protein, 209 aa, Neisseria meningitidis; identical to SEQ ID NO: 1305

SEQ ID NO: 31470 - protein, 944 aa, Neisseria meningitidis
MNKKHGFQLTLTALAIATAFPAYAAQAGAAAPDAAQTQSLKEVTVRAAKVGRRSKEATGLGKIVKTSETLNKEQVLGIRDLTRYDPGVAVVEQGNGASGGYSIRGVDKNRVAVSVDGVAQIQAFTVQGSLSGYGGRGGSGAINEIEYENISTVEIDKGAGSSDHGSGALGGAVAFRTKEAADLISDGKSWGIQAKTAYGSKNRQFMKSLGAGFSKDGWEGLLIRTERQGRETRPHGDIADGVEYGIDRLDAFRQTHDIQSKDKTGQFFSVEGESESKPVAKLAGYGKYLNNQLNRWVEERRSKGQALNSEEEAMVREAQARHENLSAQSYTGGGRILPDPMDYRSGSWLAKLGYRFGGRHYVGGVFEDTKQRYDIRDMTEKQYYGTDEAEKFRDKSGVYDGDDFRDGLYFRPNIEEWKGDTNLVKGIGLKYSRTKFIDEHHRRRRMGLLYRYENEKYSDNWADKAVLSFDKQGVATDNNTLKLNCAVYPAVDKSCRASADKPYSYDSSDRFHYREQHNVLNASFEKSLKNKWTKHHLTLGFGYDASNAISRPEQLSHNAARISESTGFDDKNQDKYLLGKPEVVEGSVCGYIETLRSRKCVPRKINGSNIHISLNDRFSIGKYFDFSLGGRYDRQNFTTSEELVRSGRYVDRSWNSGIVFKPNRHFSVSYRASSGFRTPSFQELFGIDIYHDYPKGWQRPALKSEKAANREIGLQWKGDFGFLEISSFRNRYTDMIAVADHKTKLPDSTGRLTEIDIRDYYNAQNMSLQGINILGKIDWNGVYGKLPEGLYTTLAYNRIKPKSVSNRPGLSLRSYALDAVQPSRYVLGFGYDQPEGKWGANIMLTYSKGKNPDELAYLAGDQKRYSTKRASSSWSTADVSAYLNLKKRLTLRAAIYNIGNYRYVTWESLRQTAESTANRHGGDSNYGRYAAPGRNFSLALEMKF

SEQ ID NO: 31471 - protein, 120 aa, Neisseria meningitidis
MASSNVNKEIKDKKLSLWAKRQAGSVKWFCGQPVQRASTATDAAITAASDATANIDTKHLPSTCRDASSASRTKTPGFAFKYFQKISRYRVLPESRQMTKKLRHSRAGGNLGLSAQKLIG

SEQ ID NO: 31472 - protein, 134 aa, Neisseria meningitidis; identical to SEQ ID NO: 19562

SEQ ID NO: 31473 - protein, 158 aa, Neisseria meningitidis; identical to SEQ ID NO: 17560

SEQ ID NO: 31474 - protein, 303 aa, Neisseria meningitidis
MDTLFSLKVFRQVVQSGGFTRAADALGISTAMASKHVSHLENTVQAKLLHRNSRNLSLTEAGEEYYRQCSYALDTLDDAAQKAAGGTEKPQGLLRVTMPLWFAGSQICNWLAEYRERYPEVTLELILDNRHVDLIAEGVDLALRVSQTLSPSLIARPLAEIEFALLASPDFLRRNGVPETPEEVAGLPAVLPTYTNQQKLDLTRKSDGKKYRLELTPVIRTDNTLMMREMIKAGACIGYQPLWAAEHDLRCGTLVRLLPGYAVPTDRLNAVYADRAFLSAKVRSFIDFLNEKIASRKGCRNAV

SEQ ID NO: 31475 - protein, 121 aa, Neisseria meningitidis; identical to SEQ ID NO: 4117

SEQ ID NO: 31476 - protein, 295 aa, Neisseria meningitidis
MQKSKLSWFLKLMLALSLAFLYIPLVVLVIYSFNESKLVTVWGGFSTKWYGALLENDTILEAAWLSLRIAVVSSLAAVVLGMLAGYAMARIKRFRGSTLFAGMISAPMVMPDVITGLSMLLLIIQVQIFLQGSEWLQHLYFDRGFFTIFLGHTTLCMAYITVVIRSRLVELDQSLEEAAMDLGARPLKIFFVITLPLIAPAIVSGFLLGITLSLDDLVITSFLSGPGSSTLPQVIFSKIKLGLDPQMNVLATILIGIIGTLVIIVNYWMMRQATKRDREAAEAYRQEKLAAEKAN

SEQ ID NO: 31477 - protein, 135 aa, Neisseria meningitidis; identical to SEQ ID NO: 18606

SEQ ID NO: 31478 - protein, 79 aa, Neisseria meningitidis; identical to SEQ ID NO: 1083

SEQ ID NO: 31479 - protein, 324 aa, Neisseria meningitidis
MPSENKIAFMQGSPRPLWAAFALLLICCGLFLTLNVKGDWDFVLQLRLTKLAALLMVAYAVGVSTQLFQTLTNNPILTPSILGFDSLYVFLQTLLVFTFGGVGYASLPLTGKFGFELAVMMGGSLLLFYTLIRQGGRDLPRMILIGVIFGILFRSLSSLLSRMIDPEEFTAAQANMFAGFNTVHSELLGIGALILLVSAAAVWRERYRLDVHLLGRDQAVNLGISYTRNTLWILLWIAALVATATAVVGPVSFFGLLAASLANHFSPSVRHSVRLPMTVCIGGILLVGGQTVFEHFLGMKAVLSVVVEFAGGLVFLYLVLRHKK

SEQ ID NO: 31480 - protein, 122 aa, Neisseria meningitidis
MNPKTLSRLSLCAAVLALTACGGNGQKSLYYYGGYPDTVYEGLKNDDTSLGKQTEKMEKYFVEAVNKKMNAAPGAHAHLGLLLSRSGDKEGAFRQFEEEKRLFPESGVFMDFLMKTGKGGKR

SEQ ID NO: 31481 - protein, 489 aa, Neisseria meningitidis; identical to SEQ ID NO: 1073

SEQ ID NO: 31482 - protein, 914 aa, Neisseria meningitidis
LKPICFYLMGVMLYHHSYAEDAGRAGSEAQIQVLEDVHVKAKRVPKDKKVFTDARAVSTRQDIFKSSENLDNIVRSIPGAFTQQDKSSGIVSLNIRGDSGFGRVNTMVDGITQTFYSTSTDAGRAGGSSQFGASVDSNFIAGLDVVKGSFSGSAGINSLAGSANLRTLGVDDVVQGNNTYGLLLKGLTGTNSTKGNAMAAIGARKWLESGASVGVLYGHSRRSVAQNYRVGGGGQHIGNFGAEYLERRKQRYFVQEGALKFNSDSGKWEPDLQKQQWKYNPYKKYNNQELQKYIEEHDKSWRENLAPQYDITPIDPSSLKQQSAGNLFKLEYDGVFNKYTAQFRDLNTKIGSRKIINRNYQFNYGLSLNSYANLNLTAAYNSGRQKYPKGSKFTGWGLLKDFETYNNAKILDLNNTATFRLPRETELQTTLGFNYFHNEYGKNRFPEELGLFFDGPDQDNGLYSYLGRFKGDKGLLPQKSTIVQPAGSQYFNTFYFDAALKKDIYRLNYSTNTVGYRFGGEYTGYYGSDDEFKRAFGENSPTYKKHCNPSCGLYEPVLKKYGKKRANNHSVSISADFGDYFMPFASYSRTHRMPNIQEMYFSQIGDSGVHTALKPERANTWQFGFNTYKKGLLKQDDTLGLKLVGYRSRIDNYIHNVYGKWWDLNGNIPSWVSSTGLAYTIQHRNFKDKVHKHGFELELNYDYGRFFTNLSYAYQKSTQPTNFSDASESPNNASKEDQLKQGYGLSRVSALPRDYGRLEVGTRWLGNKLTLGGAMRYFGKSIRATAEERYIDGTNGGNTRDVRQLGKRSIKQTETLARQPLIFDFYAAYEPKKNLIFRAEVKNLFDRRYIDPLDAGNDAATQRYYSSFDPKDKDEEVTCNDDGLCNGKYGGTSKSVLTNFARGRTFLITMSYKF

SEQ ID NO: 31483 - protein, 492 aa, Neisseria meningitidis
MKYKDLRDFIAMLEQQGKLKRVAHPVSPHLEMTEIADRVLRAEGPALLFEHPIKPDGTRYGYPVLANLFGTPERVAMGMGADSVSKLREIGQTLAYLKEPEPPKGIKDAFSKLPLLKDIWSMAPNVVKNAPCQEIVWEGEDIDLYKLPIQHCWPEDVAPLVTWGLTVTRGPHKKRQNLGIYRQQLIGKNKLIMRWLSHRGGALDYQEFRKLNPDTPYPVAVVLGCDPATILGAVTPVPDTLSEYQFAGLLRGSRTELVKCIGNDLQVPARAEIVLEGVIHPNETALEGPYGDHTGYYNEQDHFPVFTVERITMRENPIYHSTYTGKPPDEPAVLGVALNEVFVPLLQKQFPEITDFYLPPEGCSYRMAVVGMKKQYAGHAKRVMMGCWSFLRQFMYTKFIIVVDDDVNVRDWKEVIWAVTTRMDPVRDTVLVENTPIDYLDFASPVSGLGGKMGLDATNKWPGETDREWGRVIKKDPAVTAKIDGIWEELGL

SEQ ID NO: 31484 - protein, 131 aa, Neisseria meningitidis; identical to SEQ ID NO: 3391

SEQ ID NO: 31485 - protein, 154 aa, Neisseria meningitidis; identical to SEQ ID NO: 1226

SEQ ID NO: 31486 - protein, 154 aa, Neisseria meningitidis
MTDITPFANRLGKNIKHLMKWAKRNGIEAWRIYDRDIPQFPFAADVYGDRIHLQEYDTGWLMRPEEYEAWLAEVLEAVAFVTGFEPEQIRLKRRERQKGLQQYEKTGKAGDDFVITENGRKFWVNLDKYLDTGLFLDHRNTRKKVGETAAGKRF

SEQ ID NO: 31487 - protein, 248 aa, Neisseria meningitidis; identical to SEQ ID NO: 3755

SEQ ID NO: 31488 - protein, 369 aa, Neisseria meningitidis
MKYKRIVFKVGTSSITHSDGSLSRGKIQTITCQLAALHHAGHELVLVSSGAVAAGFGALGFKKRPVKIADKQASAAVGQGLLMEEYTANLSSDGIVSAQILLSRADFADKRRYQNAGGALSVLLQRRAVPIINENDTVSVEELKIGDNDTLSAQVAAMIQADLLVLLTDIDGLYTGNPNSNPDAVRLDKIEHINHEIIEMAGGSGSANGTGGMLTKIKAATIATESGVPVYICSSLKPDALAEAADNQADGSFFVPRAKGLRTQKQWLAFYSESRGGVYVDEGAEHALSEQGKSLLMSGIARIEGHFSRMDTVTVYSKATKQPLGKGRVLFGSAAAEDLLKSRKAKGVFIHRDDWISITPEIRLLLTEF

SEQ ID NO: 31489 - protein, 171 aa, Neisseria meningitidis
MKRTKKYPFLTLQRQRFHLNFENASSAAGIPAERDFYRWAWSALKSGYRRADISLILLDEEAARDYNRDYRGKDYATNVLSFALNEGETLPCQVSEKLYGDLIICPQVVLKEAAEQGKTPERHFAHLTIHGVLHLMGYDHIEDDEAEIMEAEEIRLMRAAGYPNPYREDGH

SEQ ID NO: 31490 - protein, 171 aa, Neisseria meningitidis; identical to SEQ ID NO: 18791

SEQ ID NO: 31491 - protein, 324 aa, Neisseria meningitidis; identical to SEQ ID NO: 766

SEQ ID NO: 31492 - protein, 767 aa, Neisseria meningitidis
MTHRPTAKQILHEVFGYPEFRGRQEAIVNALAGGESLMVLMPTGGGKSLCYQIPALMREGVAVVVSPLIALMNDQVASLHVAGIEAAAVNSGTSADEAREIADKLAQGRLKLLYVAPERLVTDRFLRFLDQQTVSLFAIDEAHCVSQWGHDFRPEYQQLGMLAERYPNVPRIALTATADAATRADIKHYLHLDDAPEFVSSFDRPNIYYQVIEKNNGKKQLLEFIRKEMAGQSGIVYCLSRKKVEDVAQFLCENGLEAIPYHAGLSMDVREENQRRFTREDNIIVVATVAFGMGIDKPDVRFVAHLDMPQSVEHFYQESGRAGRDGLPAVSWLCYGLNDWVLLRERIAEGNSDEVQKQIEMQKLDAMLAVCETAACRRVLLLKHFGEASEPCGRCDNCLHPPVRFDGTVLVQKLLSCVYRAGQRFAAGYITNLLRGKSDDWILRNGHDKLSTFGIGSEQTDKEWRSVIRQCISLGYLTVNIARYQALQLTEAAKKVLKGETEVMLRPLKRDKPAARTLKDNWLRTEREERLWQALRVWRMKQAEAEGIPAYMIFGDKTLRDLVEKMPQDLNGLHDIYGLGEAKIDRFGHGILKVCQNAADFSRDAVIRPQTEREQQLRQKLETWRYEQATAENCALHSVLSDESLADLLAATPETETDLEGVHGLGSVRAAKYGRDILTVCRPFSDGIDEAAKRKRRLMRALIQWCNETAKHEQSEPYRILSKAALRAIAAKQPKGLAELAAVYGVGEEKAARYGAAVLAVLGQNAV

SEQ ID NO: 31493 - protein, 164 aa, Neisseria meningitidis
MKKNILEFWVGLFVLLGVAAVGFLAFRVAGGAAFGNSGKTYTVYADFSDIGGLKANAPIKSAGVLVGRVGSIELDPKSYQAKVRLDLDSKYQFSSDVSAQILTSGLLGEQYIGLQQGGDTENLAAGDTISVTSSAMVLENLIGKFMTSFAEKNADGGNAEKAAE

SEQ ID NO: 31494 - protein, 112 aa, Neisseria meningitidis; identical to SEQ ID NO: 10404

SEQ ID NO: 31495 - protein, 550 aa, Neisseria meningitidis
MVAYVFLFLFVTAALVLIIRSHYRWTYFFASALFVFLVGGMLMLTAQWQRALNFASVWFVVLILFHRLKIHYYKQPLLISDFLLIADWRNWETLFHYKEAVIGMAGLLALAAYAVFGWSGADSLDVPWRWAGAVLFAAAFVSMRHFSKHPGAVKTWLDSLPDDGRDVFLNLPMSCRAVFFQVPVFEGDGEAFARQMPSETRPCGMSDEKPDIVVTLMESTLDPHCFDFAAAKIPDLKMFGRQEDTVFSSPLRVHTFGGATWKSEFAFLAGVPSTDFGALASGVFYSVVPHLQTGFVRNLREHGYFCVALSPFTKGNYNAKAAYDHFGFNLMFQPQDLGYPAPMGKNLWHISSEEMMQYARMILEKRHPDLENVRQPMFVYVLTMKEHGPYRTDTDNVFDLDAPDLNAKTISALNDYIGRIADLDKAVESFDRYLHERGKPFVFGYFGDHQVPFEGVSVRKKWDYAQPDYVTQFAVRSNIAGGFVQRQDFLDLAFAGGVLMEAAGLEAKDGFMRANMAMRGLCGGGLEDCPNRELVGNYRNYLYDVLKIAR

SEQ ID NO: 31496 - protein, 197 aa, Neisseria meningitidis
MASIQNLYETVVGVLGDQASKVISALGEITVECLPEHYISVMTALRDHEELHFELLVDLCGVDYSTYKNEVWQGKRFAVVSQLLSVKNNQRIRVRVWVSDDDFPVVESVVDIYNSADWYEREAFDMYGIMFNNHPDLRRILTDYGFVGHPFRKDFPISGYVEMRYDEEQKRVIYQPVTIEPREITPRIVREENYGGQ

SEQ ID NO: 31497 - protein, 192 aa, Neisseria meningitidis; identical to SEQ ID NO: 746

SEQ ID NO: 31498 - protein, 86 aa, Neisseria meningitidis; identical to SEQ ID NO: 3484

SEQ ID NO: 31499 - protein, 140 aa, Neisseria meningitidis; identical to SEQ ID NO: 6541

SEQ ID NO: 31500 - protein, 206 aa, Neisseria meningitidis
MLTPKSCDLFNIPFFQFSQLKKYQPESIPQIKADYKENWQIWQQLIQQVAAELGAPFAPPHIERWCNGWQVRAHFFAYFKYEQYKNSAAILSILLNRRRLSVSLDWHCYKADVSPIALPDYNRWLDNFDTEKYASFDMWHGAESEYDDYRTVAQQNESDRRLQNDEDFFCIGKHIERDDLGRQDVVKWIAETVEDLLSLYEACHGA

SEQ ID NO: 31501 - protein, 329 aa, Neisseria meningitidis
  misc_feature 2, 3: 'Xaa' is any amino acid
VXXKPRRPKHIDRFPLLKLDQVIDWQPIEQYLNRQKNRYLRDHRGRPAYPLLSMFKAVLPGQWHSLSDPELEHSLITRIDFNLFCRFDELIIPDYSTLCRYRNWLAQDDTLSELLKLINCQLTEKGLKIEKASAAVVDATIIQTAGSKQRQAIEVDEEGQISGQTTPSKDSDARWIKKNGLYKLGYKQHTRTDAEGYIEKLHITPANAHECKHLSPLLEGLPEGTTVYADKGYDSAENRQHLEEHQLLDGIMRKTCRNRPLSEAQTKRNRYLSKTRYVVEQSFGTLHRKFRYARAAYFGLIKVSAQSHLKAMCLNLLKAANRLSAPAAA

SEQ ID NO: 31502 - protein, 380 aa, Neisseria meningitidis; identical to SEQ ID NO: 7635

SEQ ID NO: 31503 - protein, 604 aa, Neisseria meningitidis
MPAETTVSGAHPAAKLPIYILPCFLWIGIVPFTFALKLKPSPDFYHDAAAAAGLIVLLFLTAGKKLFDVKIPAISFLLFAMAAFWYLQARLMNLIYPGMNDIVSWIFILLAVSAWACKSLVAHFGQERIVTLFAWSLLIGSLLQSCIVVIQFAGWEDTPLLQNIIVYSGQGVIGHIGQRNNLGHYLMWGILAAAYLNGQRKIPAALGAICLIMQTAVLGLVNSRTILTYIAAIALILPFWYFRSDKSNRRTMLGIAAAVFLTALFQFSMNTILETFTGIRYETAVERVANGGFTDLPRQIEWNKALAAFQSAPIFGHGWNSFAQQTFLINAEQHNIYDNLLSNLFTHSHNIVLQLLAEMGISGTLLVAATLLTGIAGLLKRPLTPASLFLICTLAVSMCHSMLEYPLWYVYFLIPFGLMLFLSPAEASDGIAFKKAANLGILTASAAIFAGLLHLDWTYTRLVNAFSPATDDSAKTLNRKINELRYISANSPMLSFYADFSLVNFALPEYPETQTWAEEATLKSLKYRPHSATYRIALYLMRQGKVAEAKQWMRATQSYYPYLMPRYADEIRKLPVWAPLLPELLKDCKAFAAAPGHPEAKPCK

SEQ ID NO: 31504 - protein, 148 aa, Neisseria meningitidis
MQHEEGNRQRPQGELLLRTVAMPRDTNPNQDIFGGWIMSQMDLGGGILAAEIARGRIVTVAVQEMNFIRPVKVGNVVCCYGHCVRVGNTSLQLKIEVWVKTLMNDCVTEDRHLVTEAVFTYVAIDAEGNPRPIPKEGNPKLSGLLPTP

SEQ ID NO: 31505 - protein, 394 aa, Neisseria meningitidis
MGKHILLGVTGSIAAYKSCELVRLLKKQGHSVTVVMSRSATEFVSPLTFQALSGNPVLTDTHGSNGSNGMEHINLTRNADVFLIAPASMNTVAKICNGVADNLLTNLAAARKCPLAIAPAMNVEMWLNPANQRNIAQLVSDGITVYMPGLGEQACGENGMGRMPEPAELLDLLPDLWTPKILRDKKILITAGATFEAIDPVRGITNISSGKMGVALARACRAAGAEVSLIYGQLQTELPFGISNRVQTVSAEDMHRAVHRLIDKQDAFISVAAVSDYKVKNRSTQKFKKDKNAKPLSIELDENPDILASIASLPNPPFCIGFAAETENVMAYAREKRIKKKIPVIVANDVSIAMGKPTNRITIIGDDEELSFPETSKDEAAMQIVERLAVYLNK

SEQ ID NO: 31506 - protein, 39 aa, Neisseria meningitidis; identical to SEQ ID NO: 2850

SEQ ID NO: 31507 - protein, 274 aa, Neisseria meningitidis; identical to SEQ ID NO: 5218

SEQ ID NO: 31508 - protein, 66 aa, Neisseria meningitidis
MSYTQLTQGERYHIQYLSRHCTVTEIAKQLNRHKSTISREIRRHRTQGQQYSAEKAQRRKPDYQTA

SEQ ID NO: 31509 - protein, 475 aa, Neisseria meningitidis
MIHTEPSAQPSTMDTAAFLKHIESAFRRIFSDGIDLMRYLPEDKWLALKQAGLLLPFLDKKYGGRKGSQFEIQEVLRIAGHYGVPVTLRTGIEGALVLQPLQEFGDEAQIAQGLDMVFKGEGGGLGVTEPETSGAAIAREMQSYYEYTDGQTIYVNAAKYWQGNSQSDFLLVAAKERKNGKLAKVIDLLLVPKTYIRCETLASEGLRAVRYAVNRIDAEMPATAVMKLSQSDAAGLRAFQNIFIRSRLQLIGMTHGIMEYTLENLERYVRNDIRFVDYERREIRRRHQVSEILYRYVCHSVSPVAPVAHQLMEANIVKTLATEYTYAAAQMLQKLLGAKGFERGHTAGNIAIDIRPFTIFEGPNDMLYAEIYDQFVRATAEEKEAGMKLDKNQTLLDRLQTDARFAAVARDYTLPEDIRSFLQEHTLTDACALQKVFIGKIIARLFVFVQAEHEDTAAFLLNDIRKDILDCRYCG

SEQ ID NO: 31510 - protein, 186 aa, Neisseria meningitidis
  misc_feature 182, 183, 184: 'Xaa' is any amino acid
MSYTQLTQGERYHIQYLSRHCTVTEIAKQLNRHKSTISREIRRHRTQGQQYSAEKAQRQSQTIKQRKRQPYKLDSQLIQHIDTLIRRKLSPEQVCAYLCKHHQITLHHSTIYRYLRQDKSNGSTLWQHLRICSKPYRKRYGSTWTRGKVPNRVGIENRPAIVDQKSRIGDWEADTIVGKGQXXXHT

SEQ ID NO: 31511 - protein, 270 aa, Neisseria meningitidis
MASKPFLKWAGGKHKLVPFIEHNLPTPTRKRLIEPFCGSAALSLALDFEHYLLNDINADLIGLFRILKEEKSGFIDYARSFFISENNSDSRFYELREQFNFSKNLHERSALFIYLNRHAFNGLCRYNSKGVFNVPFGRYKSPYFPQQEMEGFIQKSDRVELMCGDFQMILSQTDNTDTVYCDPPYAPLSPTASFTTYAKEGFNLDNQIRLAQSAQQIAPDSQGVLISNHDTEFTRDIYSFAILKTIEVQRNIAAKGSSRKKVGELLAIYD

SEQ ID NO: 31512 - protein, 268 aa, Neisseria meningitidis; identical to SEQ ID NO: 47

SEQ ID NO: 31513 - protein, 921 aa, Neisseria meningitidis
MRIRRRLKNIYLLDKKNLARNHVQLINQFEQTGTHANRYDVTVLVNGLPLVQIELKKRGVAVREAFNQVHRYSKESFNSENSLFKFLQIFVISNGTDTRYFANTTKRDKNSFDFTMNWARSDNHPIKDLKDFTATFLQKSVLLGVLLHYSVFDANDTLLIMRPYQIAAAERILWKINSSAQAKNWSGPESGGYVWHTTGSGKTLTSFKAARLATESAFIDKVFFVVDRKDLDYQTMKEYQRFSPDSVNGSESTAGLKRNLEKDDNKIIVTTIQKLNNLMKSEDNLPVYHQQVVFIFDECHRSQFGEAQKNLKKKFKKFCQFGFTGTPIFPENALGAETTAGVFGRELHSYVITDAIRDEKVLKFKVDYNDVRPQFKAVEAEQDEKKLSAAENRQALLHPERIREITQYILNQFRQKTHRLNAGGKGFNAMFAVSSVDAAKCYYEAFKTQQAGSLNPLKTATIFSFAANEEQNAVGEIVDETFEPEAMDGSAKEFLQAAINDYNACFKTNFGTDSKAFQNYYRDLAKRVKNQEVDLLIVVGMFLTGFDAPTLNTLFVDKNLRYHGLMQAFSRTNRIYDATKTFGNIVCFRDLEQATIDAITLFGDKHTKNVVLEKSYEEYMNGYTDSQTGEVRRGYLDVAKELRERFPEPDEIETEKDKKDFAKLFGEYLRAENVLQNYDEFAALRELQSVDAADEDAMKAFQEKYYLSDEDVQEMRQVPMPSERAVQDYRSAYNDIRDWLRRQKAGEQKEQSKIDWDDVVFEVDLLKSQEINLDYILQLVFEHHKKIKGKAELVEEIRRIIRASIGHRAKEGLIVDFINDTDLDKVPDVPAILETFYTYAQEVMRHEAAGLIAAEGLNETAAKRYLISSLKRGYASENGTELTETLPKMSPINPQYLTKKQSVFQKIAAFVEKFAGIGTDI

SEQ ID NO: 31514 - protein, 71 aa, Neisseria meningitidis; identical to SEQ ID NO: 2248

SEQ ID NO: 31515 - protein, 63 aa, Neisseria meningitidis; identical to SEQ ID NO: 5865

SEQ ID NO: 31516 - protein, 95 aa, Neisseria meningitidis; identical to SEQ ID NO: 3028

SEQ ID NO: 31517 - protein, 333 aa, Neisseria meningitidis
MIDRQTNEPKQKTRIILAPMQGLVDDVMRDLLTRIGGYDECVSEFVRITHTVHSRSIWLKYVPEIANGNKTFSGTPCTVQLLGSDADNMAENALEAVRFGANKIDLNFGCPAPTVNKHKGGAILLKEPELIFHIVKTLRGRLPAHIPLTAKMRLGYEDKSRALECACAIAEGGACGLTVHARTKAEGYEPPAHWEWIRKIRDSVNIPVTANGDVFSLQDYIGIKTISGCNSVMLGRGAVIRPDLARQIKQYENGGPVKDTDFAEVSKWIRQFFELCLTKEANNKYPIARLKQWLGMMKKTFDPAQTLFDRVRTVKDADEVRRILNAFEHEINV

SEQ ID NO: 31518 - protein, 415 aa, Neisseria meningitidis
MLKQTTLLAACASFAALLGGCATQQPAPVIAGNSGMQDAPSSAVYNNPYGATPYSPAPAGDAPYVPPVQSAPVYTPPAYVPPSAPAVSGTYVLSYAPVDINAATHTIVRGDTVYNISKRYHISQDDFRAWNGMTDNTLSIGQIVKVKPAGYAAPKAAAVKSRPAVPAAAQPPVQSAPVDINAATHTIVRGDTVYNISKRYHISQDDFRAWNGMTDNMLSIGQIVKVKPAGYAAPKTSAVESRPAVPAAVQTPVKPAAQPPVQSAPQPAAPAAENKAVPAPAPQSPAASPSGTRSVGGIVWQRPTQGKVVADFGGNNKGVDIAGNAGQPVLAAADGKVVYAGSGLRGYGNLVIIQHNSSFLTAYGHNQKLLVGEGQQVKRGQQVALMGNTDASRTQLHFEVRQNGKPVNPNSYIAF

SEQ ID NO: 31519 - protein, 196 aa, Neisseria meningitidis; identical to SEQ ID NO: 2946

SEQ ID NO: 31520 - protein, 357 aa, Neisseria meningitidis
MRPFFVGATVLAILGALVFFISPGAVVLHRQIFLELMLPAAYGGFLTAALLDWTGFSGNLKPVATLMAALLLAASAILPFSPQTASFFVAAYWLVLLLFCARLIWLDRNTDNFALLMLLAAFTVFQTAYAVSGDLNLLRAQVHLNMAAVMFVSVRVSILLGAEALKECRLKDPVFIPNVVYKNIAITFLLLHAAAELWLPAQTAGFTSLAVGFILLAKLRELHHHELLRKHYVRTYYLLQLFAAAGYLWTGAAKLQNLPASAPLHLITLGGMMGSVMMVWLTAGLWHSGFTKLDYPKLCRIAVLLLFMAAVSRAFLMNVNPIFFITVPAILTAAVFVLYLLTFVPIFRANAFTDDPE

SEQ ID NO: 31521 - protein, 485 aa, Neisseria meningitidis; identical to SEQ ID NO: 22659

SEQ ID NO: 31522 - protein, 473 aa, Neisseria meningitidis; identical to SEQ ID NO: 719

SEQ ID NO: 31523 - protein, 445 aa, Neisseria meningitidis
MSNHTSWSSKIGFVLAAAGSAIGLGAIWKFPYTAGTNGGAVFFLLFLIFTVLVALPVQLAEFYIGRTGGKNAVDSFRALRPSTQWLWVGRMGVSACFILLSFYSVVGGWVLNYVVHSFTGAVHTGADFEALFGATISNPAGSLSYQALFMLITVWVVKGGISDGIEKANRYLMPGLFILFIALAIRSLTLPGAMEGVSFLLKPNWSYFKADTMITALGQAFFALSIGVSAMITYASYLGKDQDMFRSGHTIMWMNLLVSLLAGLVIFPAVFAFGFEPSQGPGLIFIVLPAVFMKMPFGTVLFAVFMLLVVFATLTSAFSMLETVIASTIRQDERKRKKHTWLIGTAIFIVGIPSALSFGVWGEFKVFGKTIFDLWDYLISAVIMPVGALSVAVFTAWIQDKQSVLKDAGAGSTVPRAVLLLWLNTLRYLAPIAIIIVFVNSLDIL

SEQ ID NO: 31524 - protein, 867 aa, Neisseria meningitidis
MSKTVRYLKDYQTPAYRILETDLHFDIAEPQTVVKSRLTVEPQRVGEPLVLDGSAKLLSVKINGAAADYVLESETLTIAGVPSERFTVEVETEILPAENKSLMGLYASGGNLFTQCEPEGFRKITFYIDRPDVMSKFTTTIVADKKRYPVLLSNGNKIDGGECSDGRHWVKWEDPFAKPSYLFALVAGDLAVTEDRFTTMSGRNVKIEFYTTEADKPKVGFAVESLKNAMKWDETRFGLEYDLDIFMVVAVGDFNMGAMENKGLNIFNTKFVLADSRTATDTDFEGIESVVGHEYFHNWTGNRVTCRDWFQLSLKEGLTVFRDQEFSGDRASRAVRRIENIRLLRQHQFPEDAGPTAHPVRPASYEEMNNFYTMTVYEKGAEVVRMYHTLLGEEGFQKGMKLYFQRHDGQAVTCDDFRATMADANGINLDQFALWYSQAGTPVLEAEGRLKNNVFELTIKQTVPPTPDMADKQPMMIPVKIGLLNRNGEAVAFDYQGKRATEAVLLLAEAEQTFPLEGVTEAVVPSLLRGFSAPVHLNYPYSDDDLLLLLAHDSDAFTRWEAAQTLYRRAVAANLAALSDGVELPKHEKLLAAVEKVISDDLLDNAFKALLLGVPSEAELWDGTENIDPLRYHQAHEALLDTLAVHFLPKWHELNRQAAKQENQSYEYSPEAAGWRTLRNVCRAFVLRADPAHIETVAEKYGEMAQNMTHEWGILSAVNGNESDTRNRLLAQFADKFSDDALVMDKYFSLVGSSRRSDTLQQVQTALQHPKFSIENPNKARSLIGSFSRNVPHFHAEDGSGYRFIADKVIEIDRFNPQVAARLVQAFNLCNKLEPHRKNLVKQALQRIRAQEGLSKDVGEIVGKILD

SEQ ID NO: 31525 - protein, 69 aa, Neisseria meningitidis
LTKGRLKNSFDKDAVAKEIGLQREVTQAFGKTPPKSQRSLPTNSAIPEVTDGIRQPKPCRRPNCKTNPT

SEQ ID NO: 31526 - protein, 126 aa, Neisseria meningitidis
MKQTVKWLAAALIALGLNQAVWADDVSDFRENLQAAEQGDADAQNNLGAMYAERQGVRRDDAEAVRWFRKAADQGLAQAQFNLGAMYYKGHGVRQDRALAQEWLGKACQNGNQDGCDNDQRLKAGY

SEQ ID NO: 31527 - protein, 455 aa, Neisseria meningitidis
MPDLHTEFSRLLPADEIAELSPTLLKDQRNRFTSAPDIILQPRSVESVQTIMRFCYEHRIPVTPQGGNTGLCGAAVSENGVLLNLSKLNRIRSINLSDNCITVEAGSVLQTVQQAAEASNRLFPLSLASEGSCQIGGNIACNAGGLNVLRYGTMRDLVIGLEVVLPNGELVSHLHPLHKNTTGYDLRHLFIGSEGTLGIITAATLKLFARPSDKATAWVGIPDIESAVRLLTETQAHFAERLCSFELIGRFAAELSSEFSKFPLPTHSEWHILLELTDSLPDSNLDDRLVEFLYKKGFTDSVLTQSEQERIHMWALRENISASQRKLGTSIKHDIAVPIGRVADFVRRCAKDLEQNFKGIQIVCFGHLGDGSLHYNTFLPEILSNEVYRYENDINDAVYRNVLACNGTIAAEHGIGIIKKQWLDKVRTPAEIALMKSIKQHLDPYNIMNPGKLLP

SEQ ID NO: 31528 - protein, 505 aa, Neisseria meningitidis
MLYFRYGFLVVWCAAGVSAAYGADAPAILDDKALSQVWRSVSDKWAESDWKVENDAPRVVDGDFLLAHPKMLEHSLRDALNGNQADLIASLEDLYAKLPDYDAVLYGRARALLAKLAGRPAEAVARYRELHGENAADERILLDLAAAEFDDFRLKSAERHFAEAAKLDLPAPVLENVGRFRKKTEGLTGWRFSGGISPAVNRNANNAAPQYCRQNGGRQICSVSWAERAAGLNYEIEAEKLTALADNHYLLFRSNIGGTSYYFSKKSAYDDGFGRAYLGWQYKNARQTAGILPFYQVQLSGSDGFDAKTKRVNNRRLPPYMLAHGVGVQLSHTYRPNPGWQFSVALEHYRQRYREQDRAEYNNGRQDGFYVSLAKRLGESATVFGGWQFVRFVPKRETVGGAVNNAAYRRNGVYAGWAQEWRQLGGLNSRVSASYARRNYKGIAAFSTEAQRNREWNVSLALSHDKLSYKGIVPALNYRFGRTESNVPYAKRRNSEVFVSADWRF

SEQ ID NO: 31529 - protein, 105 aa, Neisseria meningitidis; identical to SEQ ID NO: 895

SEQ ID NO: 31530 - protein, 216 aa, Neisseria meningitidis
MISVEHVSKQYQMRGGMRTVLDDINFSLQKGEKVGILGRNGAGKSTLIRLISGVEPLTTGEIKRTMSISWPLAFSGAFQGSLTGMDNLRFICRIYNVDIDYVKNFTEEFSELGQYLYEPVKRYSSGMKARLAFALSLAVEFDCYLIDEVIAVGDSRFADKCKYELFEKRKDRSIILVSHSHSAMKQYCDNAMVLEKGHMHQFEDMDKAYEYYNSLP

SEQ ID NO: 31531 - protein, 96 aa, Neisseria meningitidis
MALTLADVDKIARLSRLHLTAAEKEKSLQELNDIFAMVEQMQNINTDGIEPMAHPHEAALRLREDEVTETDRAAEYQAVAPEVRNRLYIVPQVIEE

SEQ ID NO: 31532 - protein, 177 aa, Neisseria meningitidis
MADFNQILTPGDVDGGIINVVNEIPASSNHKIEWNRKLAVFQLDRVEPAIFAKPTNYGFIPQTLDEDGDELDVLLVTEQPLATGVFLEARVIGVMKFVDDGEVDDKIVCVPADDRNNGNAYKTLSDLPQQLIKQIEFHFNHYKDLKKAGTTKVESWGGVEEAKKVIKESIERWNKQA

SEQ ID NO: 31533 - protein, 167 aa, Neisseria meningitidis; identical to SEQ ID NO: 18251

SEQ ID NO: 31534 - protein, 74 aa, Neisseria meningitidis; identical to SEQ ID NO: 2464

SEQ ID NO: 31535 - protein, 449 aa, Neisseria meningitidis; identical to SEQ ID NO: 5514

SEQ ID NO: 31536 - protein, 125 aa, Neisseria meningitidis; identical to SEQ ID NO: 535

SEQ ID NO: 31537 - protein, 219 aa, Neisseria meningitidis; identical to SEQ ID NO: 8152

SEQ ID NO: 31538 - protein, 259 aa, Neisseria meningitidis
MFFVLSPAKNLNEKDPAPVSEFTQPDLLAESDILMQQLRELAPQQIAELMHVSDKIALLNAQRNAEWHTPFTPENAKQAVFMFNGDVYEGMDANTLDIGQIRYLQNHVRLLSGLYGLLRPLDLIQPYRLEMGTAFANLRGKNLYEFWGDIITNLLNDTLAQAGSNTLVNLASQEYFKSVNTKTLRARLITPIFKDEKNGKYKIISFYAKRARGLMVRYAAEHHITDPEMLKNFNYEGYAFNDAASNESEWVFMRSEQIK

SEQ ID NO: 31539 - protein, 473 aa, Neisseria meningitidis; identical to SEQ ID NO: 19022

SEQ ID NO: 31540 - protein, 69 aa, Neisseria meningitidis; identical to SEQ ID NO: 3057

SEQ ID NO: 31541 - protein, 145 aa, Neisseria meningitidis
MDTPVYLYTDGACKGNPGAGGWGVLMRYGSHEKELFGGEAQTTNNRMELTAVIEGLKSLKRRCTVIICTDSQYVKNGMENWIHGWKRNGWKTAAKQPVKNDDLWKELDVLVGQHQVSWTWVKGHAGHAENERADDLANRGAAQFS

SEQ ID NO: 31542 - protein, 222 aa, Neisseria meningitidis
MTTHLSNVAPDLQNYLNAIGEPEHPVLTRLREKTGHHRMGKMAIAREQAAVLVWLAKLIRAEKYLEVGVFTGYSSTALALALPEHGRITACDINVTFTDTARQVWNEAGVAHKISLHLQPALLTLDDLIAQGEAGSYDLALIDADKPPTPQYFERCLKLVRQGGIIAIDNILLNGRVMREAASDAPPSVGILKDFNQNLPNDTRIVPITLPVGDGLTLLLKK

SEQ ID NO: 31543 - protein, 331 aa, Neisseria meningitidis
MLRKLLKWSAVFLTVSAAVFAALLFVPKDNGRAYRIKIAKNQGISSVGRKLAEDRIVFSRHVLTAAAYVLGVHNRLHTGTYRLPSEVSAWDILQKMRGGRPDSVTVQIIEGSRFSHMRKVIDATPDIEHDTKGWSNEKLMAEVAPDAFSGNPEGQFFPDSYEIDAGGSDLRIYQTAYKAMQRRLNEAWESRQDGLPYKNPYEMLIMASLIEKETGHEADRDHVASVFVNRLKIGMRLQTDPSVIYGMGAAYKGKIRKADLRRDTPYNTYTRGGLPPTPIALPGKAALDAAAHPSGEKYLYFVSKMDGTGLSQFSHDLTEHNAAVRKYILKK

SEQ ID NO: 31544 - protein, 82 aa, Neisseria meningitidis; identical to SEQ ID NO: 2338

SEQ ID NO: 31545 - protein, 377 aa, Neisseria meningitidis; identical to SEQ ID NO: 2272

SEQ ID NO: 31546 - protein, 472 aa, Neisseria meningitidis
MSIKNAVKLIEESEARFVDLRFTDTKGKQHHFTVPARIVLEDPEEWFENGQAFDGSSIGGWKGIQASDMQLRPDVSTAFVDPFYDDVTVVITCDVIDPADGQGYDRDPRSIARRAEAYLKSSGIGDTAYFGPEPEFFVFDGVEFETDMHKTRYEITSESGAWASGLHMDGQNTGHRPAVKGGYAPVAPIDAGQDLRSAMVNILEELGIEVEVHHSEVGTGSQMEIGTRFATLVKRADQTQDMKYVIQNVAHNFGKTATFMPKPIMGDNGSGMHVHQSIWKDGQNLFAGDGYAGLSDTALYYIGGIIKHAKALNAITNPSTNSYKRLVPHFEAPTKLAYSAKNRSASIRIPSVNSSKARRIEARFPDPTANPYLAFAALLMAGLDGIQNKIHPGDPADKNLYDLPPEEDALVPTVCASLEEALAALKADHEFLLRGGVFSKDWIDSYIAFKEEDVRRIRMAPHPLEFEMYYSL

SEQ ID NO: 31547 - protein, 210 aa, Neisseria meningitidis; identical to SEQ ID NO: 5450

SEQ ID NO: 31548 - protein, 1566 aa, Neisseria meningitidis
MKTKRFKINAISLSIFLAYALTPYSEAALVRDDVDYQIFRDFAENKGKFFVGATDLSVKNKQGQNIGNALSNVPMIDFSVADVNKRIATVVDPQYAVSVKHAKAEVHTFYYGQYNGHNDVADKENEYRVVEQNNYEPHKAWSASNLGRLEDYNMARFNKFVTEVAPIAPTDAGGGLDTYKDKNRFSSFVRVGAGRQLVYEKGAYHQEGNEKGYDLRDLSQAYRYAIAGTPYKDINIDQTMNTEGLIGFGNHNKQYSAEELKQALSQDALTNYGVLGDSGSPLFAFDKQKNQWVFLGTYDYWAGYGKKSWQEWNIYKKEFADKIKQRDNAGTIKGNGEHHWNITSGTNSKIGSTAVRLAGNERGANNGQNVTFENNGTLVLDQNINQGAGGLFFKGDYTVKGANNDITWLGAGIDVTDGKKVVWQVKNPNGDRLAKIGKGTLEVNGTGVNQGQLKVGDGTVILNQQADADKKVQAFSQVGIVSGRGTLVLNSSNQINPDNLYFGFRGGRLDANGNDLTFEHIRNVDEGARIVNHNTGHTSTITLTGKSLITDPKTISIHYIQNNDDDDDGYYYYRPRKPIPQGKDLYFKNYRYYALKSGGSVNAPMPENGQTENNDWVFMGYKQEEAQKNAMNHKNNQRISGFSGFFGEENGKGHNGALNLNFNGKSAQNRFLLTGGTNLNGKISVTQGNVLLSGRPTPHARDFVNKSSAQKDAHFSKNNEVVFEDDWINRTFKATEITVNQSASFSSGRNVSNITANITATDNAKVNLGYKNGDEVCVRSDYTGYVTCNTGNLSDKALNSFGATQINGNVNLNQNAALVLGKAALWGQIQGQGNSRVSLNQHSKWHLTGDSQVHNLSLADSHIHLNNASDAQSANQYHTLKINHLSGNGHFHYLTHLAENLGDKVLVKESASGHYQLHVQDKTGEPNQEGLNLFDASSVQDRSRLSVSLANNHVDLGALRYTIKTENGITRLYNPYAENRRRVKPAPSPATNTASQAQKATQTDGAQIAKPQNIVVAPPSPQANQAEEALRQQARAEQVKRQQAEAEKVAHQKAEEAKRQQDALARQQAEQERQRLEAERQAAEIAKQKAEAEEAKRRAAEIAEQKAAAEEAKRQAAELARQQEEARKAAELAAKQKAETERKAAEIAEQKAEAEREAAELAKQKAEEEGRQAAQSQPKRRNRRAIPPELSSDATTRALPRIARNSNPDASDYEEIPLDALEDEDVSESVDTSDKQPQDNTELHEKVETVSLQPRAAQPRAQAAAQPQAQAVAQADAVSTNTNSALSDAMASTQSILLDTGASLTRHIAQKSRADAEKNSVWMSNIGYGRDYASAQYRRFSSKRTQTQIGIDRSLSENMQIGGVLTYSDSQHTFDQASGKNTFVQANLYGKYYLNDAWYVAGDIGAGSLRSRLQTQQKANFNRTSIQTGLTLGNTLKINQFEIVPSAGIRYSRLSSADYKLGNDSVKVSSMSVKTLTAGLDFAYRFKVGNLTVKPLLSAAYFANYGKGGVNVGGNSFAYKADNQQKYSAGAALLYRNVTLNVNGSITKGKQLEKQKSGQIKIQIRF

SEQ ID NO: 31549 - protein, 302 aa, Neisseria meningitidis; identical to SEQ ID NO: 6232

SEQ ID NO: 31550 - protein, 446 aa, Neisseria meningitidis
LHTLLAFIFAILILVSLHEFGHYIVARLCGVKVVRFSVGFGKPFFTRKRGDTEWCLAPIPLGGYVKMVDTREGEVSEADLPYAFDKQHPAKRIAIVAAGPLTNLALAVLLYGLSFSFGVTELRPYVGTVEPDTIAARAGFQSGDKIQSVNGTPVADWGGAQTEIVLNLEAGKVAVGVQTASGAQTVRTIDAAGTPEAGKIAKNQGYIGLMPFKITTVAGGVEKGSPAEKAGLKPGDRLTAADGKPIASWQEWANLTRQSPGKKITLTYERAGQTHTADIRPDTVEQPDHTLIGRVGLRPQPDRAWDAQIRRSYRPSVVRAFGMGWEKTVSHSWTTLKFFGKLISGNASVSHISGPLTIADIAGQSAELGLQSYLEFLALVSISLGVLNLLPVPVLDGGHLVFYTAEWIRGKPLGERVQNIGLRFGLALMMLMMAVAFFNDVTRLLG

SEQ ID NO: 31551 - protein, 397 aa, Neisseria meningitidis
MQNYLTPNFAFAPMIPERASGSRVWDTEGREYIDFSGGIAVNALGHCHPALADALNTQMHKLWHISNIYTTRPAQELAQKLVANSFADKVFFCNSGAEANEAALKLARKYARDRFGGGKSEIVACINSFHGRTLFTVSVGGQPKYSKDYAPLPQGITHVPFNDIAALEAAVGEQTCAVIIEPIQGESGILPATAEYLQTARRLCDRHNALLILDEVQTGMGHTGRLFAYEHYGIVPDILSSAKALGCGFPIGAMLATEKIAAAFQPGTHGSTFGGNPMACAVGSRAFDIINAPETLHNVCSQGQKLQTALRSLGEQTGVFKQVRGMGLLLGCVLDAPYRGRASEITAAALKHGVMILVAGADVLRFAPSLLLDDEDTAEGLRRLEHVLTEFAAANRP

SEQ ID NO: 31552 - protein, 259 aa, Neisseria meningitidis
MHIIDSHCHLNFEGLKERLPEVLSNMEANGVGQALAISVSRESFSEVFAVAEAHEHIYCTIGVHPDSREAEEFSIAEMVEAAAHPKVVGIGETGLDYYWCKGDLSWQHKRFADHIEAANQTGLPVIVHTRDAAADTLAILKECKTNSGVIHCFSEDTAFARAAMDLGLYISFSGIVTFKNAPLVQEAAKYVPDDRILVETDAPFLAPVPKRGRQNEPAFVRYTAEHIAKLRNQTLEQVAAYTTENFYRLFKKVPDMRAV

SEQ ID NO: 31553 - protein, 74 aa, Neisseria meningitidis
MNSETLDVIGLKCPLPILRAKKALAQMQQGDVLTVLATDGGAPGDFEAFCRQTGHVLLDSSEQDGVFRLVVKHK

SEQ ID NO: 31554 - protein, 102 aa, Neisseria meningitidis; identical to SEQ ID NO: 427

SEQ ID NO: 31555 - protein, 127 aa, Neisseria meningitidis; identical to SEQ ID NO: 1080

SEQ ID NO: 31556 - protein, 103 aa, Neisseria meningitidis; identical to SEQ ID NO: 2233

SEQ ID NO: 31557 - protein, 220 aa, Neisseria meningitidis; identical to SEQ ID NO: 5269

SEQ ID NO: 31558 - protein, 394 aa, Neisseria meningitidis; identical to SEQ ID NO: 5132

SEQ ID NO: 31559 - protein, 753 aa, Neisseria meningitidis
LKVTKRDGRLEAIDLDKIHRVVTWAADGLENVSVSQVELKSHIQFYNGIRTDDIHETIIKAAADLISEDTPDYQYLAARLAIFHLRKIAYGEYEPPHLYDHVKKLTDAAKYDRHILEDYSREEFDELNAYIDHERDMSFSYAAVKQLEGKYLVQNRVTRQIYETPQFLYVLVAMCLFSKYPKETRLDYVKRFYDAVSTFKVSLPTPIMSGVRTPTRQFSSCVLIECDDSLDSINATTSAIVKYVSQRAGIGINAGRIRGLDSEIRGGEARHTGCIPFFKMFQAAVKSCSQGGVRGGAATLFYPLWHIEAESLLVLKNNRGVEDNRIRQLDYGVQINRLLYTRLIKGGNITLFSPNEVPGLYEAFFADQDEFERLYTKYEQDPDIRKRIIPAADLFSTLMQERAGTGRIYIQNVDHCNTHSPFDPRVAPVHQSNLCMEIALPTKPLDNINDPNGEIALCTLSAFNLGALNSLDELEGLADLTVRALDALLDYQGYPVEAARTSTMGRRSLGIGVINYAYYLAKNGVRYSDGSALGLTHRTFEAIQYYLLKASANLAKEYGACTLFNQTVYSQGKLPIDTYKKDLDAVCNEPLHYDWESLRADIVKYGLRNSTLTALMPSETSSQIANATNGIEPPRGLVTVKASKDGILKQVVPEFETLKNAYETLWQLPGNEGYLKLVGVMQKFVDQSISANTAYDPNKFEGSKVSMKQMLKDLLTAYKYGVKTLYYHNTRDGADDTQADIQDDGCAGGACKI

SEQ ID NO: 31560 - protein, 259 aa, Neisseria meningitidis; identical to SEQ ID NO: 588

SEQ ID NO: 31561 - protein, 231 aa, Neisseria meningitidis
MHDTASLIKFVQKHKQDGTQIYIDADFKSGRIDVTAVINGHTQQAPGWLDFYAVYTPQHTTSASNWLNNNAHRMNQMEFSHFLTNNARNIVSKNPGNENSVYPTAAEVLDFALNLEYTEKTTFKQGYREQDGRINFTFQSEDSGQTEKNLKMFERFGIEFTPHQGGASYFVEALLKFRIDKNSGALVLWYELQQIDAVIEQAAKDISEAVQKAFPEIDIYFGIIDLKKKVV

SEQ ID NO: 31562 - protein, 204 aa, Neisseria meningitidis
MKNNDCFRLKDSQSGMALIEVLVAMLVLTIGILALLSVQLRTVASVREAETQTIVSQITQNLMEGMLMNPTIDSDSNKKNYNLYMGNHHALSVVDGDFQVGVIKTKTQLAEAQLKRFSYELKNALPDAAAIYYAICKDSLGVAPTLSAGSTFSSNCDASANGDTLIKVLWVNDSAGDSDIAHTNLETNGNNIVYTYQARVGGRE

SEQ ID NO: 31563 - protein, 462 aa, Neisseria meningitidis; identical to SEQ ID NO: 26127

SEQ ID NO: 31564 - protein, 58 aa, Neisseria meningitidis; identical to SEQ ID NO: 19474

SEQ ID NO: 31565 - protein, 91 aa, Neisseria meningitidis; identical to SEQ ID NO: 5612

SEQ ID NO: 31566 - protein, 948 aa, Neisseria meningitidis
MCNHRPQHSHDNDTIRIRGARTHNLKNIDLDIPRHKLVVVTGLSGSGKSSLAFDTLYAEGQRRYVESLSAYARQFLQMMDKPDVDLIEGLSPAISIEQKSTSHNPRSTVGTVTEIHDYLRLLYARVGTPYCPEHNLPLSSQTVSQMVDAVLKLPEDTRVMILAPAVRERKGEFVDFFADLQAQGFARVCVDGEVYQLDEVPKLEKNIKHNIDVVIDRVKVKADIKQRLAESFETALRHGNERALAMEMDSGEEHWFSARFACPVCSYSLPELEPRLFSFNNPMGSCPTCDGLGNTNFFDSEKVVAHPELSLASGAIDGWDKRNQFYFQMIQSLARHYGFDVQAAWETLPAKIKKVVLHGSGKEVIDFTYLSERGTTFNRSHAFEGIIPNLERRYRETDSETVREKLREYQNHRACPSCGGARLRKEARYVYVGGEPLHEVSAWPLTKTHRFFETLDLDGNKKQIAEKILKEITERLGFLINVGLDYLNLSRSAETLSGGEAQRIRLASQIGSGLTGVMYVLDEPSIGLHQRDNDRLLATLKRLRDLGNSVIVVEHDEDAIREADFVVDMGPGAGEHGGNVLIADTPENVAKCENSVTGQYLSGKKSIAVPSERTPVNPGRMLVLKGARGNNLKNVTLELPLGLITCITGVSGSGKSTLINDTLAKITARELNRAQEEPAPYDDIRGLEHLDKVINVDQSPIGRTPRSNPATYTGLFTPIRELFAGVPLSRERGYNVGRFSFNVKGGRCEACQGDGVIKVEMHFLPDVYVPCEVCHGKRYNRETLEIQYKGKNISQVLDMTVEEACEFFDAVPTVSRKLQTLMDVGLGYIRLGQSATTLSGGEAQRVKLALELSKRDTGRTLYILDEPTTGLHFADIALLLEVIDRLKGKGNSIVIIEHNLDVIKTADWIVDLGPEGGDGGGRIIASGSPEEVAKVKGSYTGKYLKNIL

SEQ ID NO: 31567 - protein, 502 aa, Neisseria meningitidis
MTTNPANVLASVDLGSNSFRLQICENNNGQLKVIDSFKQMVRFAAGLDEQKNLSASSQEQALDCLAKFGERLRGFRPEQVRAVATNTFRVAKNIADFLPKAEAALGFPIEIIAGREEARLIYTGVIHTLPPGGGKMLVIDIGGGSTEFVIGSTLNPDITESLPLGCVTYSLRFFQNKITAKDFQSAISAARNEIQRISKNMRREGWDFAVGTSGSAKSIRDVLAAEMPQEADITYKGMRALAERIIEAGSVKKAKFENLKPERIEVFAGGLAVMMAVFEEMKLDRMTVTEAALRDGVFYDLIGRGLNEDMRRQTVAEFQHRYHVSLNQAKRTAETAQTFMDSLCHAKNVTVQELALWQQYLGRAAALHEIGLDIAHTGYHKHSAYILENADMPGFSRKEQTILAQLVIGHRGDMKKMGGIIGTNEMLWYAVLSLRLAALFCRSRQDLSFPKNMQLRTDTESCGFILRIDREWLERHPLIADALEYESVQWQKINMPFKVEAV

SEQ ID NO: 31568 - protein, 116 aa, Neisseria meningitidis; identical to SEQ ID NO: 5541

SEQ ID NO: 31569 - protein, 207 aa, Neisseria meningitidis; identical to SEQ ID NO: 9989

SEQ ID NO: 31570 - protein, 427 aa, Neisseria meningitidis; identical to SEQ ID NO: 24490

SEQ ID NO: 31571 - protein, 312 aa, Neisseria meningitidis; identical to SEQ ID NO: 8892

SEQ ID NO: 31572 - protein, 1067 aa, Neisseria meningitidis
MRTTPTFLTKTFKPAAMALAVATTLSACLGGGGGTSAPDFNAGGTGIGSNSRATTAKSAAVSYAGIKNEMCKDRSMLCAGRDDVAVTDRDAKINAPPPNLHTGDFTNPNDAYKNLINLKPAIEAGYTGRGVEVGIVDTGESVGSISFPELYGRKEHGYNENYKNYTAYMRKEAPEDGGGKDIKASFDDEAVIETEAKPTDIRHVKEIGHIDVVSHIIGGRSVDGRPAGGIAPDATLHIMNTHDGTKNEIMSAAIRNAWVKLGERGVRIVNNSFGTTSRAGTADHFQIANSEEQYRQALLAYSGGDKTDEGIRLMQQSDYGNLSYHIRNKNMLFIFSASNDAQAQPNTLTLLPFYEKDAQKGIITVAGVDRSGEKFNGSNHCGITAMWCLSAPYEASVRFTRTNPIQIAGTSFSAPIVTGTAALLLQKYPWMSNDNLRTTLLTTAQDIGAVGVDSKFGWGLLDAGKAMNGPASFPFGDFTADTKGTSDIAYSFRNDISGTGGLIKKGGSQLQLHGNNTYTGKTIIEGGSLVLYGNNKSDMRVETKGALIYNGAASGGSLNSDGIVYLADTDRSGANETVHIKGDLQLGGEGTLYTRLGKLLKVDGTAMTGGKLYMSARGKGAGYLNRTGQRVPFLSAAKIGRDYSFFTNIETDGGLLASLDSVEKTAGSEGDTLSYYVRRGNAARTASAAAHSAPAGLKHAVEQGGSNLENLMVELDASESSATPETVETAAADRTDMPGIRPYGATFRAAAAVQHANAADGVRIFNSLAATVYADSTAAHADMQGRRLKAVSDGLDHNATGLRVIAQTQQDGGTWEQGGVEGKMRGSTQTVGIAAKTGENTTAAATLGMGHSTWSENSANAKTDSISLFAGIRHDAGDIGYLKGLFSYGRYKNSISRSTGADEHAEGSVNGTLMQLGALGGVNVPFAATGDLTVEGGLRYDLLKQDAFAEKGSALGWSGNSLTEGTLVGLAGLKLSQPLSDKAVLFATAGVERDLNGRDYTVTGGFTGATAATGKTGARNMPHTRLVAGLGADVEFGNGWNGLARYSYAGSKQYGNHSGRVGVGYRF

SEQ ID NO: 31573 - protein, 378 aa, Neisseria meningitidis
MGLKKACLTVLCLIVFCFGIFYTFDRVNQGERNAVSLLKDKLFNEEGEPVNLIFCYTILQMKVAERIMAQHPGERFYVVLMSENRNEKYDYYFNQIKDKAERAYFFHLPYGLNKSFNFIPTMAELKVKAMLLPKVKRIYLASLEKVSIAAFLSTYPDAEIKTFDDGTINLIQSSSYLGDEFSVNGTIKRNFARMMIGDWSIAKTRNASDEHYTIFKGLKNIMDDGRRKMTYLPLFDASELKAGDETGGTVRILLGSPDKEMKEISEKAAKNFNIQYVAPHPRQTYGLSGVTTLNSPYVIEDYILREIKKNPHTRYEIYTFFSGAALTMKDFPNVHVYALKPASLPEDYWLKPVYALFTQSGIPILTFDDKNQSHSKSK

SEQ ID NO: 31574 - protein, 146 aa, Neisseria meningitidis; identical to SEQ ID NO: 6964

SEQ ID NO: 31575 - protein, 328 aa, Neisseria meningitidis; identical to SEQ ID NO: 991

SEQ ID NO: 31576 - protein, 530 aa, Neisseria meningitidis; identical to SEQ ID NO: 689

SEQ ID NO: 31577 - protein, 334 aa, Neisseria meningitidis; identical to SEQ ID NO: 23788

SEQ ID NO: 31578 - protein, 388 aa, Neisseria meningitidis
MRKFNLTALSVMLALGLTACQPPEAEKAAPAASGEAQTANEGGSVSIAVNDNACEPMELTVPSGQVVFNIKNNSGRKLEWEILKGVMVVDERENIAPGLSDKMTVTLLPGEYEMTCGLLTNPRGKLVVTDSGFKDTANEADLEKLSQPLADYKAYVQGEVKELVAKTKTFTEAVKAGDIEKAKSLFADTRVHYERIEPIAELFSELDPVIDAREDDFKDGAKDAGFTGFHRIEYALWVEKDVSGVKEIAAKLMTDVEALQKEIDALAFPPGKVVGGASELIEEVAGSKISGEEDRYSHTDLSDFQANVDGSKKIVDLFRPLIETKNKALLEKTDTNFKQVNEILAKYRTKDGFETYDKLGEADRKALQASINALAEDLAQLRGILGLK

SEQ ID NO: 31579 - protein, 443 aa, Neisseria meningitidis
MSGWHTLLQDASYKGVGFDIEVVDESNGKALAEHARPFVQGIDLEDMGMTGRQVQINAVFWGKGYAGRLKKLLDALEQPGGGVLVHPVWGRMHNMIAASWSYRHEADYVDYAGIDITFREAAEAQEIFVFENAFLVELEALIADIDTYREAAIGFVDAVLAVDAGVSALWGSALGIWSAASGTFGAVRRLFDLDKIAFPDRGGYSAAAFKNGSAKLFADISVMVDTGIRREAGLADNAMHHAGWSPRQRFDGAAAVADRAAAIPDNLLTGRFSDGLQNRLNRLTAKQVQPVAQAVRLLSTSSLLSVATALIEAHGEEMTAPDLIEVNRAMRRRMQAEIAALRAVQTAAAESGGLTANAVYTEAYQTAESLRAAAGRLNALVAAVINQKPPLIVRQAPIDGTIHQIAHEFYGDIARAAELVRLNPHIHHPAFIKRGTLVNSYAK

SEQ ID NO: 31580 - protein, 117 aa, Neisseria meningitidis; identical to SEQ ID NO: 6607

SEQ ID NO: 31581 - protein, 218 aa, Neisseria meningitidis
MNRQKVIAIDGPGASGKGTVAARVAAALGYDYLDTGALYRLTALYAQKQGVEWHDEENVSKLAKKLPAVFSGSRILLDGEDVSDGIRTEAIGMGASAVAQLPKVRASLLQRQRDFLTEKGLVADGRDTGSVVFPQAELKIFLTAESKIRAERRAKQIGIPCEGLAFERILSDIEARDEADRNRKVAPLKQQPDALLLDTSRLTIEETVKKVLDWYRKV

SEQ ID NO: 31582 - protein, 426 aa, Neisseria meningitidis
LKDCFPQGLNGKKTAVALSGGLDSVVLLHLLVRAGKKGGFIPDALHIHHGLSPRADDWADFCQNYCDMLGVGLETVKVCVEKNGLGIEAAARQKRYAAFAEKGFDVLALAHHRDDQIETFMLAVARGGGLRALAAMPTVRPFGEKGIIWRPLLPFSRQDIWDYAQKHGLPNIEDESNSDTAYLRNRFRHRILPELSAQIPHFGRHVLNNVRALQEDLALLDEIIGQDCRWVCEEGSFDTVRWQAFSPRRKTHILRYFLKENGIPMPNQNALADIARVLTEAKTGRWNLQGFELHHYAGRLFVFRLEKTDKLRFLKDRQISGNLREILTGQGFVLKRHPFGLPEHLLEQDGILRTVAVSDTLAVGGIHKDVKKILQGKRVLPVLRPIWPLVADSGNRPLALANCCADFQYSVSDGILPVHPDFPILF

SEQ ID NO: 31583 - protein, 115 aa, Neisseria meningitidis; identical to SEQ ID NO: 15103

SEQ ID NO: 31584 - protein, 299 aa, Neisseria meningitidis
  misc_feature 2, 3: 'Xaa' is any amino acid
VXXIKNLDNFSNAAQLVVDGIMIPLLPKDSESGNNQANQGTNGGTAFTRKFDHTPKSDEKDTQAGTAANGNQAASNTAGDANGKTKTYAVEVCCSNLNYLKYGLLTRKTAGNTGEGGNGSPTAAAQTDAQSMFLQGERTDEKEIPKEQQNIVYRGSWYGHIANGTSWSGNASNATSGNKADFTVNFGEKKINGTLTAENRQAATFTIEGTIQDNGFSGTAKTADLGFDLDQSNTTGTPKAYITDAKVQGGFYGPKAEELGGWFAYPGDKQAQPSASGSGASAANSATVVFGAKRQQLAQ

SEQ ID NO: 31585 - protein, 527 aa, Neisseria meningitidis
MPNKKKKAAFARAATENGVPDVSNIKNSYDDLMYESKAFSQTAINALEARARMMGLKPAAAAKAKVLELGCSMGGNIITQALYYPDAEFVGIDLSGRQVAQGNAIIEKMGLKNVRLEEKDILTVDESFGKFDYIIVHGIWSWVPDAVKDKIFSICRNNLTEHGIAYISYNVYPGWKRQEQLREIMYFAGRDVLEEPLEARTRKGLDALKALAEILENDKGLGGGGKLPAIQKILNHNTYYVAHEYMEIFNDPIYVNGFIEWANRHRLAYIGDTDLHVSFVSWMAEHTRERILALAGDDYIAKEFYSDILSDRQFRRSLLCREEVGDNIRRDESVAVEVIESLNFRPARGETINFDENDTLLSGIRDVMKTGEPFKTEDVAENLARRFPGLEFDRMKINSQLLLQTILGRFSVSSDNAGKQFFEDHKTYVPARFTDYAAAFVEHGAEAFVQPANRYNESTPSFGYGHLYIMRQLSRPTSKQALIETVAENLNIVSTTPDGLTFHPPAEVYVEEILADLADRHFLVSAD

SEQ ID NO: 31586 - protein, 928 aa, Neisseria meningitidis
MANNKTLFEVIENRKAVYLEDGDDEKYRLPKFVSNNLKYPFFEWQKSALENFVIFDRTSKLKDFPDIKNRPTHLLFNMATGAGKTMMMAALILYYFEKGYRHFLFFVNQNNIVDKTENNFIDPTHAKFLFTEKILQGDTVIPIRKVETFSPHSDGIEIKFTSIQKLYNDIHTERENQTTLADLHELNLVMLGDEAHHLNAQTKGKKQGELDLEVELKANAGNAEIERKGWEHMVLELLLNKNGNPSQNVLLEFTATLPENADVQQKYADKIITKFGLKEFLQKGYTKEINLVSSTLGKKERVLHALLFAWYRHQIALKYGIANFKPVMLFRSKTIDESKADYLAFLNWAENVQAVDFSFLTTFSTSLNDSDSDNANEQGKTRTEQALKFMQEKGVEFAHLADWVKQNYQKHNVIITNSETNKTKTEKTDSETEKLLNNLEAADNPIRAIFTVDRLTEGWDVLNLFDIVRLYEGQNGGGSNKKSGKTAAATVSEKQLIGRGVRYFPFAFEGKQPNKRKFDNDMQHELRILEELFYYTHDEQSRYISELKNELRKDGYLPEKDDDKVLATFKLKSEFAANKDFRELLIWANKKIPNPNAKTNNANSLQANPQTLSFQVHGNQLLQETQFTADENDEKVKQLGTQNNFTQTIKMSEMERHIFNKALHIKGKNSQSLFHFDRLQSKLNIQNRNELQNKLLKDWQIEFLGLGQDKQVCPDDKLAGCLKILEMVEKHLNESDKPFIGTKEFTPKKLWEIFGTPKQKWVKKDDVKTTIATQNDWYVMNNFAGTGLEEALIQFISARLGDLKSKYDVHLIRNEEVFKLNNFADGEGFMPDFILLLKDKQKSSSNGVKDFLHYQIFIEPKGEHLVETDGWKEEFLEAITVEYGMDKILQKDTPHYRLIGLPFFTDHQKNGQFTESFPLGAASLEKMK

SEQ ID NO: 31587 - protein, 553 aa, Neisseria meningitidis
MTESITRDSMQYDVVIVGAGPSGLSAAIKLKQLAEQNGREISVCVVEKGSEAGAHSLAGAVIDPIALNELIPDWKEKGAPLTRTVTQDKVLFLTEKKAFNLPITPNFDNHGNYIVSLGEVVRWLAEQAENMGVEIYPGFAAAEVLYHEDGSVKGIATGNMGVGKNGEPTDSFQPGMELWAQQTLFAEGCRGSLSKQIIERFKLDQNSQPQTYGLGIKEVWEVPSEQHQPGLVMHSAGWPLDSKTYGGAFVYHFDDNKVAVGFVVGLDYQNPYLSPFEEFQRFKTHPEIRKTFEGGRRIAYGARSLIEGGLQSLPKLSFKGGVLVGDAAGFLNMPRIKGIHTAMKSAMIAAEAVFPLLGNLEEVENFNSGKEVENYQKLFEQSWLYQELYTARNVRPSFKWGVYLGSLYTGIDQMIFRGKAPWTLKHHGKDNEQLKKAAACKPIDYPKPDGVLTFDRLSSVFLANLAHEENQPDHLVLNNPQTMIDVNYKEYASPETRYCPAGVYEIVEENGNPRLQINAANCVHCKTCDIKDPTQNITWICPEGASGPNYGGM

SEQ ID NO: 31588 - protein, 636 aa, Neisseria meningitidis
MNILSVENASFAIGHVALLDKTSFQLDSGEKVGLIGRNGAGKSSFLKILAGLQKLDDGQIIVQNNLKIVYVPQESFFDKDATVFDTVAEGLGKIRDLLRRYHRVGHELENGSGEALLKELNELQLEIEAKDGWKLDAAVKQTLGELGLPENEKIGNLSGGQKKRVALAQAWVQKPDVLLLDEPTNHLDIDAIIWLENLLKAFEGSLVVITHDRRFLDNIATRIVELDRGILRSYPGSFSKYSEKKAQELAVEAEHNRLFDKFHAQEEAWIRKGIEARRTRNEGRVRRLEELRRQRAERRNVQGQVNFKLDSGEKSGKIIAELEHASFTYGDKVIMDKFSAILQRGDKIGLIGPNGIGKTTFLKLILGELQPTYGRIRIGSKQEVAYFDQFRSALNENDTMFYTLGQGNDYVEVSGKKKHVMSYLEDFLFPPARAQSPVSSLSGGERNRLLLAKLFTCPANILVLDEPTNDLDIDTQELLEDLLRDYQGTVFLVSHDRMFLDNVITQSIVFEGNGRLKEYIGGYQDYIDAKSREAKIQTASAPKTADAEPVKEKPKANRTVKLSYKEQRELDALPDEIAALEAEQAEINAQLSDPEIFKDYEKAGALQSRAEEIEMLLLEKLERWELLETKRNGNAV

SEQ ID NO: 31589 - protein, 658 aa, Neisseria meningitidis
MNEFSLAPIVIVLLVSVITVILCRKFNIPSMLGYLLVGFLAGPGMLSLIPKSHATDYLGEIGIVFLMFSIGLEFSLPKLRAMRRLVFGLGGLQVGVTMLSVMGILMLTGVPFNWAFAVSGALAMSSTAIVSRILSEKTELGQPHGQMAMGVLLMQDIAVVPLMILIPALAGGGDGNIWAALGLAFAKMLLTLGLLFFVGSKIMSRWFRMVAKRKSSELFMINVLLVTLGVAYLTELEGLSMALGAFVAGMLLSETEYRFQVEDDIRPFRDILLGFFFITVGMKLDIQALIGGWRQVLMLLAMLLVLKALVVFAIAFKMKHSVGDSLKTALYLAQGGEFGFVMLAIAGQLDMVSPELEQAATAAVLLSMIAAPLMMGGGDALVGRFIKSSWDMKSLDLHSMLVETMSKSDHVLIVGFGRGGQTVGRVLSQEDIPYFALDLDIARVQVAKNAGEPVSFGDAKRREVLEAAGLGRAKMVVVTLNNMHETQHVLDNVLSMYPNMPVYVRATNDDYVKTFTDMGAEEAVSDTKETGLVLAGYAMLGNGASYRHVYQTMANIRHSRYAALEGLFVGSDDEAGFGENGETVRHAFPLAAEAYAVGKTVGTLPMAAYGIKLLFVRRRTGRIENPDASFTLEGGDVLVVAGKKEEIISFENWSLQGI

SEQ ID NO: 31590 - protein, 447 aa, Neisseria meningitidis
MFHSVNVFTGETLYRRPAQDYAEFERRLADLKMRGGAFAQLGVTERAARLQKFADRLEAEKECFAEMVCEEVGRCLHECRAEIGKSIELIRYYARLAPELLAHKTIATQASLSQVRFEPLGVVFAVMPWNYPVWQVLRFAVPAVCAGNACAVKPAPSVARVSQALFDLASDGIPLAGVWLDEADTLKAIEHTDAMAFTGSTHTGRILAAHAGANLKKTVLELGGSNAFIVMPDADLERAAAEACYSRFRDAGQSCNAAKRIIVTEAAADRFITLFLAECAKLKMGDPKHPDTTLAPLHREDLRDRVHGQVEDAVSNGAVCLTGGKIPQGRGWFYPATVLDRVNPACRVWREEVFGPAALILRAENEEHAIALANDSPFGLGACIYTADTERAWRFAEKIQAGSVFINRHTSSDLRLPFGGVKDSGYGRELSEFGLYEFVNVKTYWQK

SEQ ID NO: 31591 - protein, 138 aa, Neisseria meningitidis; identical to SEQ ID NO: 15462

SEQ ID NO: 31592 - protein, 1012 aa, Neisseria meningitidis
MFWIVLIVILLLALAGLFFVRAQSEREWMREVSAWQEKKGEKQAELPEIKDGMPDFPEFALMLFHAVKTAVYWLFVGVVRFCRNYLAHESEPDRPVPPASANRADVPNAFDGYSDSGNGTEEAETEAAEAETAEEEAADTEDIATAVIDNRRIPFDRSIAEGLMPSESEISPVRPVFKEITLEEATRALNSAALRETKKRYIDAFEKNETAVPKVRVSDTPMEGLQIIGLDDPVLQRTYSRMFDADKEAFSESADYGFEPYFEKQHPSAFSAVKAENARNAPFRRHAGQAEAKSPDVSQGQSVSDGTAVRDACRRVSVNLKEPNKATVSAEARISRLIPESRTVVGKRDVEMPSETENVFTETVSSVGYGGPVYDETADIHIEEPAAPDAWVVEPPEVPKVPMPAIDIPPPPPVSEIYNRTYEPPSGFEQVQRSRIAETDHLADDVLNGGWQEETAAIADDGSEGAAERSSGQYLSETEAFGHDSQAICPFEDVPSERPSCRVSDTEADEGAFQSEETDAVYEHLPTTDLLLPPLFNPEATQTEEELLENSITIEEKLAEFKVKVKVVDSYSGPVITRYEIEPDVGVRGNSVLNLEKDLARSLGVASIRVVETILGKTCMGLELPNPKRQMIRLSEIFNSPEFAESKSKLTLALGQDITGQPVVTDLSKAPHLLVAGTTGSGKSVGVNAMILSMLFKAAPEDVRMIMIDPKMLELSIYEGIPHLLAPVVTDMKLAANALNWCVNEMEKRYRLMSFMGVRNLAGFNQKIAEAAARGEKIGNPFSLTPDDPEPLEKLPFIVVVVDEFADLMMTAGKKIEELIARLAQKARAAGIHLILATQRPSVDVITGLIKANIPTRIAFQVSSKIDSRTILDQMGAENLLGQGDMLFLPPGTAYPQRVHGAFASDEEVHRVVEYLKQFGEPDYVDDILSGGGSEELPGIGRSGDGETDPMYDEAVSVVLKTRKASISGVQRALRIGYNRAARLIDQMEAEGIVSAPEHNGNRTILVPLDNA

SEQ ID NO: 31593 - protein, 852 aa, Neisseria meningitidis
MPANLSSALETFKQQRDAAEAHYLKANRVSVFFREYTAAVETLLAALWAEYFQNSALCLMAVGGFGRGELYPCSDVDLAVVSPAPLSDGIQEQIARFVQTLWDCKLMPSVKSGGIGELCESVRDDITGDTAFLEARFLFGNRQTADELAKKMNAQRNVPAFVEAKLVEMEHRHAKSQGSGAVLEPNIKSCPGGLRDIHTLLWIAKAQGLATNLPDLLKQRILTRAEAGMLSHGYRRLAHIRIHLHLNANRAEDRLLFDLQPQVAESMGYEGLNLRRQSEELMRVFYRAIKTVKQLGGILTPMLQSRVSSTPLRVTLRIDDDYIQVNNQIAARHTDIFFRRPEHIFKIVEIMQQRNDITALEPQTLRAWWGATRKINRSFYQNSENRHRFAGFFRNGNGLTQTLRFLNLYGVLGRYLPAWEKIVGLLQHDLFHIYPVDDHILTVVRNVRRLALDMHSHELPYASALMQSFEKQDILYLAAFFHDIAKGRGGDHAIQGIADARQFAADHFLTEEESDLLAWLVENHLLMSTVAQKEDIQDPSVLDAFCKRVQTHERLSALYFLTISDIRGTNPKLWNAWRASLLESLFHAAGRYLTGNGGNPHTLFGRRRQEAADLLTRAAVPEKQQKKLWNALGSAYFARHQSREILWHAANLVHDFETPIVRSRILPKSDSFQVMVFMPNGPRLFARLCRIFSRHGFDILAARAFITEHDYILDTFIVQIPSQHAPEDYPDIQSALEAELNNFIHGHTVAEISSHSRRISRRSRYMPIAPSITITPEEDYPDWYSVEITAVNRPFLLADMAEVFFAHNVSLRYAKISTLDERAEDSFTVFSPDLKNPKIQSSLKQALLEQLA

SEQ ID NO: 31594 - protein, 236 aa, Neisseria meningitidis; identical to SEQ ID NO: 25351

SEQ ID NO: 31595 - protein, 228 aa, Neisseria meningitidis
MFDFGLGELVFVGIIALIVLGPERLPEAARTAGRLIGRLQRFVGSVKQEFDTQIELEELRKAKQEFEAAAAQVRDSLKEIGTDMEGNLHDISNGLKPWEKLPEQRTPADFGVDENGNPLPDAANTLSDGISDVMPSERSYASAETLGDDRQTGSTAEPAETDQDRAWREYLTASAAAPVVQTVEVSYIDTAVETPVPHTTSLRKQAISRKRDLRPKSRAKPKLRVRKS

SEQ ID NO: 31596 - protein, 271 aa, Neisseria meningitidis; identical to SEQ ID NO: 1333

SEQ ID NO: 31597 - protein, 195 aa, Neisseria meningitidis
MNNMFAAKLSKLVYTASDHPDPLSEMGEFDRLILLIRKLYQILDGQHILSRVTVCLHYRSRRGLIALDKAAAGCDAAMLRAQRWRIYTQIAERLSGSGGGFTVTAESVSAACPELEGRYLELVRRAAVSFGFTQGQENPAGGQEKTQAVPDAASSHSVRKPIKINIEAKVERYLAYRPTAALKVTRRRFFRLQNR

SEQ ID NO: 31598 - protein, 157 aa, Neisseria meningitidis; identical to SEQ ID NO: 140

SEQ ID NO: 31599 - protein, 102 aa, Neisseria meningitidis; identical to SEQ ID NO: 1826

SEQ ID NO: 31600 - protein, 319 aa, Neisseria meningitidis
MKPVFLDFEQPIAELTNKIDELRFVQDESAVDISDEIHRLQKKSNDLTKSIFSKLTPAQVSQVSRHPQRPYTLDYIEALFTDFEELHGDRHFADDHAIVGGLARFNGQSVMVVGHQKGRDTKEKIRRNFGMPRPEGYRKALRLMKTAEKFGLPVMTFIDTPGAYPGIGAEERGQSEAIGKNLYELTRLRVPVLCTVIGEGGSGGALAVAVGDYVNMLQYSTYSVISPEGCASILWKTAEKAADAAQALGITADRLQKLDLVDTVIKEPLGGAHRDFGQTMKNVKAVLEKQLHEAQSIPLADLLSRRFDRIMAYGKFSEQ

SEQ ID NO: 31601 - protein, 241 aa, Neisseria meningitidis
MDFLSCWRRIADAPTIRRCVLCHGSSGVSDGICAGCRNDLAAYRTDAANSCPLCFRHVQGGAVCGGCQKKPPAFDRMWASLHYEPPVSNMIRALKHLADLGMVQPLADLMMQNPPDRLADECFDFVLPVPLSRERLLQRGFNQSEGIVGLLAQRYGWRILPRHTVFRHHRPPQSTLKGGERRRNIKNAFEIRTPPPKNCNILLIDDVFTTGATLDELAKTLKKSGANRICCWTLARTPMKK

SEQ ID NO: 31602 - protein, 232 aa, Neisseria meningitidis; identical to SEQ ID NO: 1935

SEQ ID NO: 31603 - protein, 193 aa, Neisseria meningitidis; identical to SEQ ID NO: 519

SEQ ID NO: 31604 - protein, 470 aa, Neisseria meningitidis; identical to SEQ ID NO: 14842

SEQ ID NO: 31605 - protein, 544 aa, Neisseria meningitidis
MTKFIFVTGGVVSSLGKGIAAASIAAILESRGLNVTMLKLDPYINVDPGTMSPFQHGEVFVTDDGAETDLDLGHYERFIDSTMTRRNSFSTGQVYENVIAKERRGDYLGGTVQVIPHITDEIKRRIHEGAAGYDVAIVEIGGTVGDIESLPFLEAIRQMRSQLGRNNTLFAHLSYVPYIAAAGEIKTKPTQHTVKEMLSIGLQPDILICRMDRTMPADERRKIALFCNVEERAIVGSYDVDSIYECPEMLHDQGIDNIITEQLQLNVQQADLTAWKKIVHAVKNPKHTVKIAMVGKYVDLTESYKSLIEALKHAGIHTETDVQITFVDSESIEKNKGDVSMLKDMDAILVPGGFGSRGVEGKIAAVRYARENNVPYLGICLGMQIALIEYARDVAGLKGANSTEFDLKCAAPVVALIDEWQTADGSVETRDESADLGGTMRLGAQEVELKAGSLAAKIYGSGHIRERHRHRYEVNNNYVPQLEKAGLVIGGVSAGRERLVETIELPNHPWFFACQFHPEFTSNPRKGHPLFTAFVKAALNNKKA

SEQ ID NO: 31606 - protein, 706 aa, Neisseria meningitidis
MFDKHVKTFQYGNHTVTLETGEIARQAAAAVKVSMGDTVVLVAVTTNKEVKEGQDFFPLTVDYLERTYAAGKIPGGFFKREGKQSEKEILTSRLIDRPIRPLFPEGFYHDIQIVAMVVSVDPEIDSDIPAMLGASAALVLSGVPFAGPIGAARVGYINGVYVLNPTKAELAKSQLDLVVAGTSKAVLMVESEAKILPEDVMLGAVVYGHDQMQVAINAINEFADEVNPELWDWKAPETNEELVAKVRGIAGETIKEAFKIRQKQARSAKLDEAWNAVKEALITEETDTLAANEIKGIFKHLEADVVRSQILDGQPRIDGRDTRTVRPLNIQTSVLPRTHGSALFTRGETQALAVATLGTSRDEQIIDALSGEYTDRFMLHYNFPPYSTGEVGRMGAPKRREIGHGRLAKRALLAVLPKPEDFSYTMRVVSEITESNGSSSMASVCGGCLSLLSAGVPLKAHVAGIAMGLILEGNKFAVLTDILGDEDHLGDMDFKVAGTTEGVTALQMDIKIQGITKEIMQIALAQAKEARLHILDQMKAAVAGPQELSAHAPRLFTMKINQDKIREVIGKGGETIRAITAETGTEINIAEDGTITIAATTQEAGDAAKKRIEQITAEVEVGKVYEGTVVKILDNNVGAIVSVMPGKDGLVHISQIAHERVRNVGDYLKVGQVVNVKALEVDDRGRVRLSIKALLDAPAREENAAE

SEQ ID NO: 31607 - protein, 259 aa, Neisseria meningitidis; identical to SEQ ID NO: 9036

SEQ ID NO: 31608 - protein, 290 aa, Neisseria meningitidis; identical to SEQ ID NO: 695

SEQ ID NO: 31609 - protein, 74 aa, Neisseria meningitidis; identical to SEQ ID NO: 5759

SEQ ID NO: 31610 - protein, 187 aa, Neisseria meningitidis
MKLIILDRDGVINQDRDDFVKSVDEWIPVEGSMDAVAFLTQAGCTVAVATNQSGIGRKYFTVQNLTEMHAKMHRLVRQAGGEINGIWFCPHTDADNCNCRKPKPGMIEDIIGRFNAQASETWLVGDSLRDLQAIDAVGGKPALVLTGKGKKTLSQHGHELPEHTQVFDTLLDFSQYIMQENTAPQAD

SEQ ID NO: 31611 - protein, 52 aa, Neisseria meningitidis
MNPPLPICTLSALAACTLSGQGGSRVYGEIKARDLCVTAPILLSAFCLACSR

SEQ ID NO: 31612 - protein, 360 aa, Neisseria meningitidis
MQTANKKTILVTGGAGFIGSAVVRHIIRNTQDSVVNLDKLTYAGNLESLTDIADNPRYAFEQVDICDRAELDRVFAQHRPDAVMHLAAESHVDRSIGSAGEFIQTNIVGTFNLLEAARAYWQQMPSEQHEAFRFHHISTDEVYGDLGGTDDLFTETAPYAPSSPYSASKASSDHLVRAWLRTYGLPTIVTNCSNNYGPYHFPEKLIPLMILNALDGKPLPVYGDGMQIRDWLFVEDHARALYQVVTEGVVGETYNIGGHNEKANIEVVKTICDLLEELVPEKPAGVARYEDLITFVPDRPGHDVRYAVDAAKIRRDLGWLPLETFESGLRKTVQWYLDNKTWWQNVLNGSYRLERLGTGK

SEQ ID NO: 31613 - protein, 330 aa, Neisseria meningitidis
  misc_feature 326, 327, 328: 'Xaa' is any amino acid
MSTFFRQTAQAMIAKHIDRFPLLKLDQVIDWQPIEQYLNRQKTRYLRDHRGRPAYPLLSMFKAVLLGQWHSLSDPELEHSLITRIDFNLFCRFDELSIPDYSTLCRYRNWLAQDDTLSELLELINRQLTEKGLKVEKASAAVVDATIIQTAGSTQRQVIEVDEEGQISSQTTPSKDKDARWIKKNGLYKLGYKQHTRTDGEGYIEKLHITPANAHECKHLSPLLEGIAEGTTVYADKGYDSAENRQHLEEHQLLDGIMRKACRNRPLTEAQTKRNRYLSKTRYVVEQSFGTLHRKFRYARSTYFGLIKVSAQSHLKAMCLNLLKAXXXHT

SEQ ID NO: 31614 - protein, 170 aa, Neisseria meningitidis; identical to SEQ ID NO: 8813

SEQ ID NO: 31615 - protein, 181 aa, Neisseria meningitidis
MLKTSFAVLGGCLLLAACGKSENTAEQPQNAVQSAPKPVFKVKYIDNTAIAGLALGQSSEGKTNDGKKQISYPIKGLPEQNVVRLTGKHPGDLEAVGGKCMETDGKGAPSGWAANGVCHTLFAKLVGNIAEDGGKLTDYLISHSALQPYQAGKSGYAAVQNGRYVLEIDSEGAFYFRRRHY

SEQ ID NO: 31616 - protein, 257 aa, Neisseria meningitidis
MKPKIQRHGEILSLVRRHQFMSVDELAAALDVTPQTIRRDIRELEDAGSLKRHHGGASSGGNLPEGLPASRQIQCQNEKNAIARLIAEHIPDESSLFVSIGTTMEAVASELVRRRGSLRVITNNIHVASIVSARTDYTVIITSGVVRPLDGGITGVATVDFINQFKVDYAVMSTHGVESDGSLLDDDYKEVSVMQAMIANARVRFLGVDHSKFRSNALVRLGDITAFDKVFTDRLPDTAMQKMLKEAGVECLIADAV

SEQ ID NO: 31617 - protein, 143 aa, Neisseria meningitidis
MAGGQAIDLANVGKQMVQADLEQMHSLKTGALIRAAVLLGAMSCPNLSEDSLAVLDAYAAKLGLAFQVIDDVLDCEADTATLGKTAGKDADNDKPTYVKLMGLEAARSYAHKLVAEAVALLEPFGDKALRLRQLAEFAVARKY

SEQ ID NO: 31618 - protein, 188 aa, Neisseria meningitidis
MPSEACWRFRRHILIEKMMTLKTAPLKRRFAAMLYEMLLVGAATCLAALFAGIAAIFLNPVSIAVSALVTSILIMGSWWLYFRANWHGQGQTLAMRTWKIGLCDLNGIQPSLHLLRLRFIWACIFIVFIPMLAYAGLRHFLGIPPKGAAGAALIWLILPWGFALLNPDRQFLYDFLAGTRLVAVKGKP

SEQ ID NO: 31619 - protein, 239 aa, Neisseria meningitidis
MKDDVLKQQAHAAIQKRLGYAFRDISLLRQALTHRSHHAKHNERFEFVGDSILNYTVARMLFDAFPKLTEGELSRLRASLVNEGVLAEMAAEMNVGDGLYLGAGELKSGGFRRPSILADAMEAMFAAVSFDADFNTAEKVVRHLFADRVRCADFQNQAKDGKTALQEALQARRFALPKYRIEEQIGHANDSMFVVSCDLGELGFVCRAKGTSRKAAEQSAAKEALQWLEEKLPLKKKKK

SEQ ID NO: 31620 - protein, 354 aa, Neisseria meningitidis
MTLLKNDTFLRALLKQPVEYTPIWMMRQAGRYLPEYKATRAKAGSFLDLCKNTELATEVTIQPLERFDLDAAILFSDILTVPDAMGLGLYFAEGEGPKFKRALQHEDDIAKLHVPDMEKLQYVFDAVSSIRKALDGRVPLIGFSGSPFTLACYMVEGGSSKEFRTIKTMMYSRPDLLHKILDTNAQAVTAYLNAQIDAGAQAVQIFDTWGGVLSDAAFKEFSLKYIRQIVAGLKRESEGRRVPVIVFAKGGGLWLESMAEIGADALGLDWTCNIGEARRRVGNQVALQGNFDPSALFGTPESIRAEVARILADYGHGSGHVFNLGHGINQHADPEHAKILVDTVHELSRQYHGG

SEQ ID NO: 31621 - protein, 251 aa, Neisseria meningitidis
MMDLDLLSEEARREMLACAEEAVPSEMCGVLVFSYEGYEFLPLSNCAENPHETFEISADDWMAAERVGEIVAVVHSHPRGEPFLSGADRRMQVETGLPWILVTQGRLKLFRPVPHLRGRVFEYGKTDCGALVRDAFMLMGLVFPDHPRGDMDEDAAEGFLEKHLENCGFSRVSDGLCAGDVVLTATGGHASHAVLYLGNDWMLHHAYNQLSCRVPYTRYWADVTHSVWRHPDFEPAMMQALENDFTHMEQA

SEQ ID NO: 31622 - protein, 254 aa, Neisseria meningitidis
MCSCLVVKNTVIGSGRTKIAVPLVARDAAELSAVLEQIKNMPFDIAEFRADFLECAGSIGEILHHTQTVRDALPDKPLLFTFRRHGEGGSFPCSDDYYFKLLDALIESRLPDIIDIELFSGETAVRCAVANAQKNGIAALLCNHEFHRTPPQEEIVCRLKQMEDCGADICKIAVMPQSAEDVLTLLSATLKAKELAAKPIVTMSMGQTGAVSRLAGQVFGSSITFGSGTQNSAPGQIGVSALRATLDCLENGAD

SEQ ID NO: 31623 - protein, 383 aa, Neisseria meningitidis
MSNRDQLFKAPPFENHSPLTWYQAASQLPNFIRDDAQAATIEHLDRLWTELMMFKRKRNRFLGRSLRSPQVPKGLYFYGGVGRGKSFLMDAFFGCLPYRRKRRVHFHAFMAEIHQRLKTLKSESNPLKSVAAEIAKETRVLCFDEFHVSDIADAMILGRLLENLLNEGVVLVATSNYAPSELYPQGQNRSSFLPTIALIESSLTVLNVDGGEDYRLRTLRPAEIFFTPANEENEAKLAKLFKEMTGITDLNPGISTIHGREIPHKAESGRAIWFDFRALCFGPRSQSDYLYLAEHYEMVFISGLEQLSPQEKAEARRLTWLIDVLYDFRVKLCATGAVDVNHIYTEGDFAEEFTRTASRMVEMQSEVYLEQPHLTLSPKASGG

SEQ ID NO: 31624 - protein, 171 aa, Neisseria meningitidis; identical to SEQ ID NO: 2512

SEQ ID NO: 31625 - protein, 640 aa, Neisseria meningitidis
MIEIKNLTLQRGLKILLDKANATVNPGQRVGLIGKNGTGKSSLFALLKGEITQDGGDVSIPKNWRLASVSQETPDLDISALDYVLQGDAELQAFQTALRQAEAQNDGMKQAEYHAKLEEIDAYTAPARAAKLLNGLGFSQEEHSRPVKSFSGGWRMRLNLAQALICRADLLLLDEPTNHLDLETVLWLENHLASLPCTQIIISHDRDFLNAATTQTIELSQQKLTQYGGNYDFYQNERAQRLAQQQAAYVKQQAQIKHLQSFIDRFKAKATKAVQAQSRMKALAKLERIAPAHLDSEFSFEFYHPDHLPNPLLKLEHADLGYEGKTVLHDITLSLESGARYGLLGVNGSGKSTFIKALAGKIDLLSGSIVRSEKLNIGYFAQHQLDTIRADQNPVWHIQQLSPEVREQEIRNFLGGFNFAGDMALQKTEPFSGGEKARLALAMIIWQKPNLLLLDEPTNHLDLDMRHALTLALQSFQGALIIVSHDRSLLEATTDSFLLIDKGRLKNFDGDLNDYRQWRLAQENAAAAPAASAQSQSRKDTKRIEAQIRQEKARRGKPIQQKIDRAEKEMAQLSEIQTACEAFLAQEDAYLEANKEKLQNTLSQLAKVKTQLAQIEEVWLACQEELERIETEIEKQFAER

SEQ ID NO: 31626 - protein, 239 aa, Neisseria meningitidis; identical to SEQ ID NO: 19502

SEQ ID NO: 31627 - protein, 333 aa, Neisseria meningitidis
MKRKIWLLPLLAVSAYLQAQTEVRLAVHKSFSLPKGLIARFERANDAKVSIIQAGGANEMLNKLILSRANPIADAVYGLDNANIGKAREMGILAAAQPESAPVAVGLPSALAVDYGYVAINYDKKWFEGKKLPLPQTLQDLTRPEYKNLLVVPSPATSSPGLGFLMANISGLGEEGAFKWWAQMRQNGVKVAKGWSEAYYTDFSHNGGAYPLVVGYAASPAAEVYFSKGKYSEPPTGNLFLKGGVFRQVEGAAVLKGAKQPKLAAKLVQWLQSREVQQAVPSEMWVYPAVKNTRLPDVFRFAQAPTHTTAPAQRDIDANQRGWVSRWIRTVLK

SEQ ID NO: 31628 - protein, 418 aa, Neisseria meningitidis
MKVLVLGAGVAGVSSAWYLAEAGHEVTVIDRAEGVAMETSFANAGQLSYGYTTPWAAPGIPTKALKWLFKSHPPLLFRPDGSLYQIEWLWRMLQNCTASRYQINKERMVRMSEYSREMFRRFEAQTGMNFEGRKKGTLQVFRQTKEVEAAKQDIAVLERYGVPYRRLKPEECAEFEPALARVTAKIAGGLHLPADATGDCHLFTENLYKLCQEKGVQFHFNQTISRIDHNGLRIKAVETETGRFEADAVVCALGCFSRTVLAQLDLDLPIYPVKGYSLTLPVTNSDGAPVSTVLDESYKVAITRFDNRIRVGGMAELSGYEIKLPEKRRETLALVVNDLFPEGGDLSQALFWSGLRPMTPDSTPLIGRTRFENLFLNTGHGTLGWTMSLGSAKLTADIVSGKDTEIRSDDLSLSRYQA

SEQ ID NO: 31629 - protein, 188 aa, Neisseria meningitidis; identical to SEQ ID NO: 1721

SEQ ID NO: 31630 - protein, 278 aa, Neisseria meningitidis
MSFEPTVIEHLGVKMYSHTVPAIAELIANAYDACATEVEVRLFDKPEHKIVIKDNGIGMSFDEINDFYLRIGRNRRKEKQASSCERIPTGKKGLGKLALFGLGNKIEISTIQGNERVTFTLDYADILKSKGVYQPEFRREFVEPNITSGTTITLTELTKKQGYPLDNYVEHLSRLFDFPAQDFKIKVSLNGSEPKIIDGNLKYDLVTPQFEWEYQDLATNISSLSSKFEQYEYSGLIQGKFITTEKPLKNRGLGSKNIKLGYFEASSLIFYLNLHAGG

SEQ ID NO: 31631 - protein, 351 aa, Neisseria meningitidis
MTILSDVKALGQQIWLDNLSRSLVQSGELAQMLKQGVCGVTSNPAIFQKAFAGDALYADEVAALKQQNLSPKQRYETMAVADVRAACGICLAEHESTGGKTGFVSLEVSPELSKDAQGTVEEARRLYAAIGCKNAMIKVPATDAGIDALETLVSDGISVNLTLLFSRAQTLKAYAAYARGIAKRLTAGQSVAHIHVVASFFISRVDGALDTTLPDHLKGKIAIALAKAAYQDWAQYFGSSEFAALEAQGANRVQLLWASTGVKNPAYPDTLYVDSLIGAHTVNTVPDATLKAFIDHGTAKATLTEGADEAQAQLAEIAALGIDVETLAARLQEDGLKQFEEAFEKLLAPLV

SEQ ID NO: 31632 - protein, 280 aa, Neisseria meningitidis; identical to SEQ ID NO: 4431

SEQ ID NO: 31633 - protein, 156 aa, Neisseria meningitidis; identical to SEQ ID NO: 22786

SEQ ID NO: 31634 - protein, 85 aa, Neisseria meningitidis; identical to SEQ ID NO: 726

SEQ ID NO: 31635 - protein, 266 aa, Neisseria meningitidis
MIDFDKPAEEDAIYQSRLKKIVSDDLVLYNENSLNVMRKILEKYPNGCFDMIFADPPYFLSNDGFSCQNGQMVSVNKGNWDKSKGMAADLEFYEEWLRLCYALLKPNGTIWVCGTFHNIYLIGYLMQTIGYHILNNITWEKPNPPPNLSCRFFTHSTETILWAKKNKKAKHTFHYEMMKAQTDGKQMKCVWTFPPPNKAEKTFGKHPTQKPLPLLERCILSASNIGDLIFDPFMGSGTTGVAALKHGRKFCGCELEEDFFELAKKG

SEQ ID NO: 31636 - protein, 43 aa, Neisseria meningitidis; identical to SEQ ID NO: 3165

SEQ ID NO: 31637 - protein, 369 aa, Neisseria meningitidis
MSNWKPDIPYNDLPPLPPKQDIESKTILKRCIAARASLARLKQAAELIPNQAMLINTLPVMEARASSEIENIVTTTDKLFQSLQMDTERQDPATKEALQYRTALFAGYESLTSRPLCTQTAIMVCNAIKHPYEMAIRKTGGTALKGGNSGNVVYTPPEGEETIRGKLANWERFIHESGDLDPLIIMAAAHYQFEAIHPFTDGNGRTGRILNSLLLIEKGLLDLPILYLSRYIIENRADYYRLLLGVTERQDWESWIIYILDGVADTADWTVSKIDAIRRLFEQTRQHIRTHAQGIYTHELVNLLFEQPYTRIANLEAAGIAKRQTASKYLKELSDIGVLQEIVIGRDKLFIHPRLMELLRGEGNSFTSF

SEQ ID NO: 31638 - protein, 382 aa, Neisseria meningitidis
MPLPLPSPEARQFSLKLQTLIAEKIGKHGNWIPFSRFMELVLYAPQYGYYTGGSHKIGNTGDFITAPTLTSLFAQTLARQLQELLPQTAGNIYEFGAGTGQLAADLLGSISDGISRYYIIEISPELAARQKNLIQARAPEASQKVVHLTALPEAFDGIIIGNEVLDAMPVEIVRKNEGGSFEHVGVCLDNDRFTYSARPLHDLQLSALASLYFPKITSPYTSELHPQQYAFIRTLASRLEHGCMIFIDYGFDAAQYYHPQRNQGTLIGHYRHHVIHNPFDFIGLADLTAHVNFTDIAQAGTDAGLDLTGYLPQSHFLLNLGITELLAQVGKTDSPAYIREAAAVQKLIDQHEMGELFKVIAFGKNIGVDWAGFRFGDICHKL

SEQ ID NO: 31639 - protein, 234 aa, Neisseria meningitidis
MLRSILAASLLAVSFPTAAEALNYNIVEFSESAGVEAVQDTMSARFQVAAEGRDKNAVNAEFVKKFNSFNRKSKNGSFKTELVSRSAMPRYQYTNGRRIQTGWEERAEFKVEGRDFDELNRFIADIQADAALEYTDFHVSRERRNEVIDQVSKDAVLRFKARADKLSGILGTSGYKIVKLNLGHIGSHIAGGGAAQAKMLRAMPMAASYGVEGTDSVAPGVEEISISVNGTVQF

SEQ ID NO: 31640 - protein, 59 aa, Neisseria meningitidis; identical to SEQ ID NO: 28214

SEQ ID NO: 31641 - protein, 518 aa, Neisseria meningitidis
MTLAEFWPLCLRRLHDMLPHGQFAQWIAPLTVGEEGGVWVVYGKNQFACNMLKSQFAGKIEAVREELAAGRSAFVFKPGEGVRYEMAAVEGAVEPAEPSLHAGSEEMPVQEVLLDELPSEEPVKPAASKTAADILAERMKNLPHEPRHTAEPASRPESEVLAKARTDAQRDAEEARYEQTNLSPDYTFDTLVEGKGNRLAAAAAQAIAESPGQSYNPFFLYGSTGLGKTHLVQAVGNELLKNRPDAKVRYMHSDDYIRSFMKAVRNNTYDVFKQQYKQYDLLIIDDIQFIKGKDRTMEEFFYLYNHFHNEKKQLILTCDVLPAKIEGMDDRLKSRFSWGLTLELEPPELEMRIAILQKKAEAAGISIEDEAALFIANLIRSNVRELEGAFNRVGASSRFMNRPVIDIDLARTALQDIIAEKHKVITADIIIDAVAKYYRIKISDVLGKKRTRNIARPRQVAMSLTKELTTLSLPSIGDSFGGRDHTTVMHGIRAVAKLREEDPELAQDYEKLLILIQN

SEQ ID NO: 31642 - protein, 414 aa, Neisseria meningitidis; identical to SEQ ID NO: 1660

SEQ ID NO: 31643 - protein, 668 aa, Neisseria meningitidis
MADMKKITPQNLRPLLSESLGHTDFVNVLNALIKFLRRGGKKCAGERFDLIIDTFKQDRELLSRFSRCFYIWLAQVHIYPALIKLGIFSRHSFAREMGIRIYERFSPSYKDFANLGEVFLYLFHSENDDKWLQTLNIRQWLVLYELIRSHAEPSKLQTAGIRLADARLRAIEMLSVWTASEAIEPDLIRIAPRLLEADSSFVALQRETAKLVEHYRNSTAPYDTAHLEVMFDQCFSQIDYLRRKGTGAGSGSSVKVAHLLERLRQTVDRLKLLTDIQTGAGNSNRLTIALMNSLIYAAVEQYSTRHLRRSSIRMLARSITENKSHHGEHYITRNRKEYFKMFYSAAGGGVIIALMALLKIRIGTLGLSPFLTSLSAGFNYGIGFMIIHMLHCTVATKQPAMTAASFAEQVDLNEGGKAVDNKLAKLLIDVCRSQSVAVFGNVSIAILLACAISFGYAHLYRQPILDAHTAAYQFKSIDIIAYPTLWYAAIAGLWLFCSGIIAGFFDNRADYLNLRQRLPFNPLLRKIMRPGPRRVLAAYIHKHYGSLVGNFIFGMLLGMTGYFGHLLGLPLDIRHVAFSSANLGYAAVSGNVGLGTFVLGIFSVLAIGLVNLCVSFSLALFVALRSRGTKIGSIRNLIKSFWNQIKSNPCILFLPPAKEQGHPPSDKP

SEQ ID NO: 31644 - protein, 900 aa, Neisseria meningitidis
MQLHILNNPKDAALAADAEFLKQSLFNLLHEEASPLVVETVKLLSTSDDSAALIEKVLPQLDEQQTHDLTLACGLFAQILNIAEDVHHERRRQIHEEAGRGGAEGSLTETVRRLKAGKADGKSVQRQLDNTSVTAVLTAHPTEVQRQTVLSFNRRIRALLPQRERCTNADALARLRREIDTILLGLWQTSETRRHKLSVNDEINNGVSIFPMSFFEALPKLYRNMEHDFQMVYPDVCVPNILKIGGWIGGDRDGNPFVSAETLRFAFRRHADAVFRFYRGELDKLYRELPLSIRRVKVNDDVMALAALSPDEELARTEEPYRRAIAYIMARAMGKARALGLGMGCKFGFLEPYASAQEFLDDLKKLQRSLIDNGSRLLAEGRLADLIRSVSVFGFHMMPLDLRQHAGKHADVVAELFQHAGLEDYNSLNEEQKQAALLRELSHQRPLYSPFITYSDHTRHELAIFNEARKIKDEFGEDAVTQSIISNCEQPSDLLALALLLKESGLLAVENGKPRSRINIVPLFETIEALENACPVMETMFRLDWYDALLESRGNIQEIMLGYSDSNKDGGYVTSSWCLYQAELGLVELFKKYDVRMRLFHGRGGSVGRGGGPSYQAILAQPAGSVAGQIRITEQGEVITAKYADPGNAQRNLETLVAATLEAGILPDKKDPDAKLMQALSDVSFKYYRELITHPDFIDYFLQTSPIQEIATLNLGSRPASRKTLARIQDLRAIPWVFSWMQNRLMLPAWYGFGSAVETLCEGNPETLAALREHAQSNPFFQAMLSNMEQVMAKTDITLAENYAGLSESPEKAKVIFGMIKEEYQRSRKALLDLLQTEELLRDNRSLARSLALRIPYLNALNGLQVAMLKRLRKEPDNPHALLMVHLTINGVAQGLRNTG

SEQ ID NO: 31645 - protein, 346 aa, Neisseria meningitidis; identical to SEQ ID NO: 8941

SEQ ID NO: 31646 - protein, 67 aa, Neisseria meningitidis; identical to SEQ ID NO: 3983

SEQ ID NO: 31647 - protein, 102 aa, Neisseria meningitidis; identical to SEQ ID NO: 254

SEQ ID NO: 31648 - protein, 91 aa, Neisseria meningitidis; identical to SEQ ID NO: 4054

SEQ ID NO: 31649 - protein, 642 aa, Neisseria meningitidis
LIECKNINRYFGSGENRVHILKDISLSIEKGDFVAIIGQSGSGKSTLMNILGCLDTAGSGSYRIDGIETAKMQPDELAALRRERFGFIFQRYNLLSSLTARDNVALPAVYMGAGGKERSARADKLLQDLGLASKEGNKPGELSGGQQQRVSIARALMNGGEIIFADEPTGALDTASGKNVMEIIRRLHEAGHTVIMVTHDPGIAANANRVIEIRDGEIISDTSKNPEIPASNVGRIREKASWSFYYDQFVEAFRMSVQAVLAHKMRSLLTMLGIIIGIASVVSVVALGNGSQKKILEDISSIGTNTISIFPGRGFGDRRSGRIKTLTIDDAKIIAKQSYVASATPMTSSGGTLTYRNTDLTASLYGVGEQYFDVRGLKLETGRLFDENDVKEDAQVVVIDQNVKDKLFADSDPLGKTILFRKRPLTVIGVMKKDENAFGNSDVLMLWSPYTTVMHQITGESHTNSITVKIKDNANTQVAEKGLTDLLKARHGTEDFFMNNSDSIRQIVESTTGTMKLLISSIALISLVVGGIGVMNIMLVSVTERTKEIGIRMAIGARRGNILQQFLIEAVLICVIGGLVGVGLSAAVSLVFNHFVTDFPMDISAMSVIGAVACSTGIGIAFGFMPANKAAKLNPIDTLAQD

SEQ ID NO: 31650 - protein, 465 aa, Neisseria meningitidis; identical to SEQ ID NO: 1096

SEQ ID NO: 31651 - protein, 213 aa, Neisseria meningitidis; identical to SEQ ID NO: 2136

SEQ ID NO: 31652 - protein, 348 aa, Neisseria meningitidis
MPSEAFRRHRAYRENKLQSLVSVLICAYNVEKYFAQSLAAVVNQTWRNLEILIVDDGSTDGTLAIAKDFQKRDSRIKILAQAQNSGLIPSLNIGLDELAKSGMGEYIARTDADDIAAPDWIEKIVGEMEKDRSIIAMGAWLEVLSEEKDGNRLARHHRHGKIWKKPTRHEDIADFFPFGNPIHNNTMIMRRSVIDGGLRYNTERDWAEDYQFWYDVSKLGRLAYYPEALVKYRLHANQVSSKYSIRQHEIAQGIQKTARNDFLQSMGFKTRFDSLEYRQIKAVAYELLEKHLPEEDFERARRFLYQCFKRTDTPPAGAWLDFAADGRMRRLFTLRQYFGILRRLLKNR

SEQ ID NO: 31653 - protein, 175 aa, Neisseria meningitidis
MKQKIWYTYDDIHRVIKALAEKIRNAGIKYDAMIAIGGGGFIPARMLRCFLEIPIYAVTTAYYDSDNEGQVTEEVKKVQWLDPVPEALRGKNVLVVDEVDDSRVTMEFCLTELLKEDFGTIGVAVLHEKIKAKAGKIPEGIPYFSGITVDDWWINYPWDALDIDEHNRLAEAGRG

SEQ ID NO: 31654 - protein, 269 aa, Neisseria meningitidis
MAEIGDFAVKSMIGIRSKRMITLPSLNNLPSKWDEIRHCLETRVFECGVMPHPNLTECEAGQFDRDFWDNIGCAPEEYVRIRRAIRLLEARYPDSLNELVCAAIATPLGEMLAVFGNKGLCLLEFVGQKHLEQEIAAVQKALRGRFVFREDERTQLLRQELDLYFKGRLKTFATPLEQIGTEFQKQAWDALLAIPYGETRSYKEQAQHLGNPKAVRAVAAANGQNKVSILIPCHRVIGSDGKLTGYAGGLNRKQFLLALERGEVQTALF

SEQ ID NO: 31655 - protein, 419 aa, Neisseria meningitidis
MSMALAQKLAADSIAAVAEGHNLQDVLVHIRAAHPDLTAQENGALQDIAYGCQRYLGSLKHMLAQMLKKPIDNPQLESLLLAALYQLHYTRNAPHAVVNEAVESIAKIGRGQYRSFANAILRRFLRERDKLAASCKKDDVAKHNLPLWWVAYLKNHYPKHWHNITAALQSHPPMTLRVNRRHGNAESYLEKLAAEGIPARALDEYAVTLEEAVPVNRLPGFSDGIVSVQDFGAQQAAYLLNPKDGERILDACAAPGGKTGHILELADCRVTALDIDAGRLKRVEDNIARLGFQTASAACADARDLAAWYDGKPFDAILADVPCTASGVARRNPDVKWLRRPTDALKTARQQEALLDALWQTLKQGGRMLLATCSVFVEENDGQLQKFLNRHADAEPIESRVLLPNKHQDGFYYALIQKH

SEQ ID NO: 31656 - protein, 187 aa, Neisseria meningitidis; identical to SEQ ID NO: 2230

SEQ ID NO: 31657 - protein, 196 aa, Neisseria meningitidis
MKKSSLISALGIGILSIGMAFAAPADAVSQIRQNATQVLSILKNGDANTARQKAEAYAIPYFDFQRMTALAVGNPWRTASDTQKQALAKEFQTLLIRTYSGTMLKLKNANVNVKDNPIVNKGGKEIIVRAEVGVPGQKPVNMDFTTYQSGGKYRTYNVAIEGASLVTVYRNQFGEIIKAKGVDGLIAELKAKNGGK

SEQ ID NO: 31658 - protein, 331 aa, Neisseria meningitidis; identical to SEQ ID NO: 25084

SEQ ID NO: 31659 - protein, 55 aa, Neisseria meningitidis; identical to SEQ ID NO: 3213

SEQ ID NO: 31660 - protein, 238 aa, Neisseria meningitidis
LLIHYTLCRYRNWLAQDDTLSELLKLINCQLTEKGLKIEKASAAVVDATIIQTAGSKQRQAIEVDEEGQISGQTTPSKDSDARWIKKNGLYKLGYKQHTRTDAEGYIEKLHITPANAHECKHLSPLLEGLPKGTTVYADKGYDSAENRQHLKEHQLPDGIMRKACRNRPLTEAQTKRNRYLSKTRYVVEQSFGTLHRKFRYARAAYFGLIKVSAQSHLKAMCLNLLKAANRLSAPAAA

SEQ ID NO: 31661 - protein, 330 aa, Neisseria meningitidis; identical to SEQ ID NO: 27704

SEQ ID NO: 31662 - protein, 318 aa, Neisseria meningitidis; identical to SEQ ID NO: 2723

SEQ ID NO: 31663 - protein, 207 aa, Neisseria meningitidis
MKKPTDTLPVNLQRRRLLCAAGALLLSPLAHAGAQREETLADDVASVMRSSVGSVNPPRLVFDNSKEGERWLSAMSARLARFVPEEEERRRLLVNIQYESSRAGLDTQIVLGLIEVESAFRQYAISGVGARGLMQVMPFWKNYIGKPAHNLFDIRTNLRYGCTILRHYRNLEKGNIVRALARFNGSLGSNKYPNAVLGAWRNRWQWR

SEQ ID NO: 31664 - protein, 238 aa, Neisseria meningitidis
  misc_feature 233, 234: 'Xaa' is any amino acid
MSYTQLTQGERYHIQYLSRHCTVTEIAKQLNRHKSTISREIRRHRTQGQQYSAEKAQRQSQTIKQRKRQPYKLDSQLIQHIDTLIRRKLSPEQVCAYLCKHHQITLHHSTIYRYLRQDKSNGSTLWQHLRICSKPYRKRYGSTWTRGKVPNRVGIENRPAIVDQKSRIGDWEADTIVGKGQKSALLTLVERVTRYTIICKLDSLKAEDTARAAVRALKAHKDRVHTITMDNGXXHTLN

SEQ ID NO: 31665 - protein, 115 aa, Neisseria meningitidis; identical to SEQ ID NO: 7399

SEQ ID NO: 31666 - protein, 737 aa, Neisseria meningitidis
MKTPLLKPLLITSLPVFASVFTAASIVWQLGEPKLAMPFVLGIIAGGLVDLDNRLTGRLKNIIATVALFTLSSLTAQSTLGTGLPFILAMTLMTFGFTILGAVGLKYRTFAFGALAVATYTTLTYTPETYWLTNPFMILCGTVLYSTAILLFQIVLPHRPVQESVANAYDALGGYLEAKADFFDPDEAAWIGNRHIDLAMSNTGVITAFNQCRSALFYRLRGKHRHPRTAKMLRYYFAAQDIHERISSAHVDYQEMSEKFKNTDIIFRIHRLLEMQGQACRNTAQALRASKDYVYSKRLGRAIEGCRQSLRLLSDSNDNPDIRHLRRLLDNLGSVDQQFRQLQHNGLQAENDRMGDTRIAALETGSLKNTWQAIRPQLNLESGVFRHAVRLSLVVAAACTIVEALNLNLGYWILLTALFVCQPNYTATKSRVRQRIAGTVLGVIVGSLVPYFTPSVETKLWIVIASTTLFFMTRTYKYSFSTFFITIQALTSLSLAGLDVYAAMPVRIIDTIIGASLAWAAVSYLWPDWKYLTLERTAALAVCSNGAYLEKITERPQKRRNRRRRRIPRHPPPRPRTHRRPQQHPFRHEQRTRKIRRQPATRLYPAQNRLRPDRLHLRPRRIPQRNARRMQPRLYRTVPPRRRTHRPHLPTPARNRTRRLSDSTGYTARRTRHPPHPQQRNTKPHPPPTAPTHRPAARTLLPRLPPNSAQAAPKRSLKKFRHFVRESRLSDRLQDSG

SEQ ID NO: 31667 - protein, 107 aa, Neisseria meningitidis; identical to SEQ ID NO: 9670

SEQ ID NO: 31668 - protein, 122 aa, Neisseria meningitidis; identical to SEQ ID NO: 2377

SEQ ID NO: 31669 - protein, 343 aa, Neisseria meningitidis
MLQTDNLTAAQPQRIVAAQTASAQEELLERALRPKTLDDYIGQDKAKEQLAIFIQAAKKRGEALDHVLLFGPPGLGKTTLAHIIAKELGVNLRQTSGPVLERAGDLAALLTNLDPHDVLFIDEIHRLSPVVEEILYPALEDYRLDIMIGEGPAARSVKINLPPFTLIGATTRAGMLTNPLRDRFGIVSRLEFYENRDLTTIVSRSAQLLQLDMSEEGAEEIAKRSRGTPRIANRLLRRVRDFADVKNNGTIDGGIADAALSMLDVDAQGLDVMDRKFLEAVLHKFGGGPVGLDNVAAAIGESTDTIEDVIEPYLIQQGFLQRTPRGRMATERAYLHFGLPVEK

SEQ ID NO: 31670 - protein, 418 aa, Neisseria meningitidis
VANKLRNYTINFGPQHPAAHGVLRMILELDGEQIVRADPHIGLLHRGTEKLAETKTYLQALPYMDRLDYVSMMVNEQAYCLAVEKLAGIDVPIRAQYIRVMFAEVTRILNHLMGIGSHAFDIGAMTAILYAFRDREELMDLYEAVSGARMHAAYFRPGGVYRDLPDFMPKYESSKFRNAKVLKQLNESREGTMLDFIDAFCERFPKNIDTLETLLNDNRIWKQRTVGIGVVSPERAMQKGFTGVMLRGSGVEWDVRKTQPYEVYDKMDFDIPVGVNGDCYDRYLCRMEEMRQSVRIIKQCSEWLRVNPGPVITTNHKFAPPKRTEMKTGMEDLIHHFKLFTEGMHVPEGETYTAVEHPKGEFGVYIISDGANKPYRLKIRAPGFAHLQGMDEMAKGHMLADVVAIIGTQDIVFGEVDR

SEQ ID NO: 31671 - protein, 252 aa, Neisseria meningitidis; identical to SEQ ID NO: 3275

SEQ ID NO: 31672 - protein, 419 aa, Neisseria meningitidis; identical to SEQ ID NO: 1258

SEQ ID NO: 31673 - protein, 110 aa, Neisseria meningitidis; identical to SEQ ID NO: 8460

SEQ ID NO: 31674 - protein, 113 aa, Neisseria meningitidis
LLEGIAEGTTVYADKGYDSAENRQHLKEHQLPDGIMRKACRNRPLSEVQTKRNRYLSKTRYVVEQSFGTLHRKFRYARAAYFGLIKVSAQSHLKAMCLNLLKAANRLSAPAAA

SEQ ID NO: 31675 - protein, 81 aa, Neisseria meningitidis; identical to SEQ ID NO: 1361

SEQ ID NO: 31676 - protein, 459 aa, Neisseria meningitidis
MAKTLKTLYQCTECGGTSPKWQGKCPHCGEWNTLQESLAAPEPKNARFQSWAADTSTVQSLSAVTATEVPRNPTGMGELDRVLGGGLVDGAVILLGGDPGIGKSTLLLQTIAKMAQSRKVLYVSGEESAQQVALRAQRLELPTEGVNLLAEIRMEAIQAALKQHQPEVVVIDSIQTMYSDQITSAPGSVSQVRECAAQLTRMAKQMGIAMILVGHVTKDGAIAGPRVLEHMVDTVLYFEGDQHSNYRMIRAIKNRFGAANELGVFAMTENGLKGVSNPSAIFLASYRDDTPGSCVLVTQEGSRPLLVEIQALVDDAHGFTPKRLTVGLEQNRLAMLLAVLNRHGGIACFDQDVFLNAVGGVKIGEPAADLAVILAMLSSFRNRPLPEKMVAFGEIGLSGEVRPVARGQERLKEAEKLGFKRAIVPKANMPRNAKEFPNLKIYGVSSLQEAIDICRDSRE

SEQ ID NO: 31677 - protein, 735 aa, Neisseria meningitidis
MFPDQSAPNLLQGLNPEQLSAVTWPPQSALVLAGAGSGKTRVLTTRIAWLLQSGQASVHSIMAVTFTNKAAKEMQTRLGAMIPVNVRAMWLGTFHGLCHRFLRLHHRDAGLPSSFQILDGGDQLSLIKRLLKSLNIAEEIIAPRSLQGFINAQKESGLRASVLSAPDPHTSRMIECYAEYDKICQREGVVDFAELMLRSYEMLQSNEILRQHYQNRFNHILVDEFQDTNKLQYAWLKLMAGGNAAVFAVGDDDQSIYRFRGANVGNMTALMEEFHIDAPVKLEQNYRSVGNILAAANAVIENNDERLGKNLRTDAEAGDKIRYYSAFTDLEEARFIVDETKALEREGWDLDEIAVLYRSNAQSRVIEQSLFRSGIPYKIYGGLRFYERQEIKHALAYLRLAVNPDDDNALLRVINFPPRGIGARTVENLQTASNEQGITLWQAACNAGAKAAKVVAFVRLIEALRNQVGQLSLSEIIVGILKDSGLTEHYRTQKGDNQDRLDNLDELVNAAIEFKPEDSNFEILPENISDDPAFPILAFLSNATLESGENQAGVGEKAVQLMTVHAAKGLEFNAVFLTGMEEGRFPSEMSLAERGGLEEERRLMYVAITRARKRLYITMAQQRMLHGQTQFGIVSRFVEEIPPEVLHYLSVKKPAYDSYGNTRQTAASKDKIIDDYKQPQTYAGFRIGQNVRHAKFGTGVIIDAADKGESARLTINFGKQGVKELDTKFAKLEEM

SEQ ID NO: 31678 - protein, 93 aa, Neisseria meningitidis
  misc_feature 2, 3, 4: 'Xaa' is any amino acid
VXXXLIACGYADGYPRRAPSNSPVAVDGKLTRVIGRVSMDMMTIELDASQEGLGHEVELWGDTVNINTVAEAAGTIPYELMCNIKRAKFTYIE

SEQ ID NO: 31679 - protein, 374 aa, Neisseria meningitidis
MQNTSFDNESDYSDDSDFASASETENRIGLTVPLELAGGRLDAVLAKLLPDYSRSRLTSWIKEGAVIVNDKPSQPKDKMIGGEQICVTVRPSEENLAFVPEPMALDIVYEDDTVIVVNKPAGLVVHPAAGNWTGTLLNGLLAHCPELSQVPRAGIVHRLDKETSGLMVVAKTLPAQNSLVRQLQERTVKRIYRAVANGIVPFDGKIETQIGRDPHNRLKMAVVKFGGKPAVTHVKVLERYLTHSYIECSLETGRTHQIRVHMREANHPLAGDPVYGNPRHPCGDTVKEAVKSLGARQALHAYRLSFTHPESGETVSFEAPIPDDIYHLLSVLRLEAGLDSSLSNEEEWQDKFGADDDDDWNEDDYDVEVVYVRE

SEQ ID NO: 31680 - protein, 362 aa, Neisseria meningitidis; identical to SEQ ID NO: 23210

SEQ ID NO: 31681 - protein, 185 aa, Neisseria meningitidis
LGFGCREGKEFCKGLSLPEIIRDLLEMPSETAVADIARTYSAHYLNPNNRNMTLFPDALPCLDTLKAQGYWLAVATGKGRAGLDNAISQTATGGYWLATACAGEYPSKPSPEMVFGLCGELGLDPKEALVVGDTAHDLHMATNAGAAAVGVATGAHSREQLLSAPHLAVLDGLSELPGFLAQHYA

SEQ ID NO: 31682 - protein, 100 aa, Neisseria meningitidis
LSAVFIAPYLTAFHEQEKTLEYAELTVTAPNRSGRAIKLDADGQHYRLSCYGFDSLCTGGNIGRTIRAEQVRAVLSETVGKGFLNGVLLEYRNSGSVYKQ

SEQ ID NO: 31683 - protein, 385 aa, Neisseria meningitidis
MKFATKAIHSSYDCDEHNRALMPPIYQNSMFTLHEIGENVPYRYSRLSNPTRQVLEDTVADLEHGAAGFAFSSGMAGIDAVWRTFLRPGDTIVAVADIYGGAYDLLVDVYQKWGVNVVFADLGNPDNLDELLKAHNVKLVWLETPSNPLLRLVDIKALAAKAKAAGALVGIDNTFATPYLQQPLDMGCDFVFHSATKYLCGHSDVLMGIVVAKTKELAQPLHDMMVHTGAVAGPLDCWLVLRGIKTLALRMNAHCQNALEIARRLEAHPAIEKVFHPGLPSHEHYALAQAQMPKGIGGVVTVYLKNDTREAANSVIKNMKLVKMASSLGGVESLVNHCYSQSHSGVPHNVKMEMGIKVGLLRFSIGIEDADDIWNDISAALDTTL

SEQ ID NO: 31684 - protein, 428 aa, Neisseria meningitidis; identical to SEQ ID NO: 239

SEQ ID NO: 31685 - protein, 547 aa, Neisseria meningitidis
  misc_feature 541, 542: 'Xaa' is any amino acid
MRFAVALLSLLGIASVIGTVLQQNQPQTDYLVKFGSFWAQIFGFLGLYDVYASAWFVVIMMFLVVSTSLCLIRNVPPFWREMKSFREKVKEKSLAAMRHSSLLDVKIAPEVAKRYLEVQGFQGKTINREDGSVLIAAKKGTMNKWGYIFAHVALIVICLGGLIDSNLLLKLGMLTGRIVPDNQAVYAKDFKPESILGASNLSFRGNVNISEGQSADVVFLNADNGILVQDLPFEVKLKKFHIDFYNTGMPRDFASDIEVTDKATGEKLERTIRVNHPLTLHGITIYQASFADGGSDLTFKAWNLGDASREPVVLKATSIHQFPLEIGKHKYRLEFDQFTSMNVEDMSEGAEREKSLKSTLNDVRAVTQEGKKYTNIGPSIVYRIRDAAGQAVEYKNYMLPVLQEQDYFWITGTRSGLQQQYRWLRIPLDKQLKADTFMALREFLKDGEGRKRLVADATKGAPAEIREQFMLAAENTLNIFAQKGYLGLDEFITSNIPKEQQDKMQGYFYEMLYGVMNAALDETIRRYGLPEWQQDEARNRXXTHLIN

SEQ ID NO: 31686 - protein, 218 aa, Neisseria meningitidis
MTIKIILIDDHTLFRSGIKSLLSRQHDFEVIGEAADGLSGIKMINRLQPDVVLLDLDMPGMNGREALSQIISINPQQAVIMLTVSEDNDDLTECMRIGARGYLLKNINADFLLESIRKAAEGDNVFSPEMTAKLVKSLISPQPAQGTQALSSLTPRELEILGYLAAGHSNKIIARHLDLAESTVKVHVQNLLRKLNLSSRVQAAVYAIRHNVPQPVLE

SEQ ID NO: 31687 - protein, 206 aa, Neisseria meningitidis
  misc_feature 201, 202: 'Xaa' is any amino acid
MSYTQLTQGERYHIQYLSRHCTVTEIAKQLNRHKSTISREIRRHRTQGQQYSAEKAQRQSQTIKQRKRQPYKLDSQLIQHIDTLIRRKLSPEQVCAYLCKHHQITLHHSTIYRYLRQDKSNGSTLWQHLRICSKPYRKRYGSTWTRGKVPNRVGIENRPAIVDQKSRIGDWEADTIVGKGQKSALLTLVERVTRYTIICKXXHTLN

SEQ ID NO: 31688 - protein, 91 aa, Neisseria meningitidis
MNEGEVVLTPEQIQTLYGYAFRGDTYGGWRYLANLGDRYADDAAAIVGKDANLNGLNLWMKKGVENLWDDTVGKKIRLMCISVFWIVVFNL

SEQ ID NO: 31689 - protein, 320 aa, Neisseria meningitidis; identical to SEQ ID NO: 913

SEQ ID NO: 31690 - protein, 692 aa, Neisseria meningitidis
VVSRQNPRRLVEKRLPQIFRQTINALNFSKVKIFVDGQEVDLAKNGVAGFSVELDMQHGVLRRLFTVFGVRFDVCKFLSVAQKELAVIRWEAVSVDGKTHQVRIDSIIDADVKNEDSNYEEKFWQVLDKGVSDGLSYIAAQTVANPFGVEQFIVNAEQTFAGSFKALGSSQTDWQVSNSFESEVGGTPETFEKRVIVTTSRDYQGLEAVKAAGRALSEKVAGVAFETLLDAHKAGWLHRWEIADVVIEGSDEAQQGIRFNLFQLFSTYYGEDARLNIGPKGFTGEKYGGATYWDTEAYAVPLYLALAEPEVTRNLLQYRRNQLPQAQHNAREQGLAGALYPMVTFTGIECHNEWEITFEEIHRNGAIPYAIYNYTNYTGDESYLAKEGLEVLVEVSRFWADRVHFSKRSGKYMIHGVTGPNEYENNINNNWYTNTLAAWVLDYTREALAKYPRPDLNVSAAELEKWADISANMYRPHDEELGVFVQHDGFLDKDIRPVSALSPDDLPLNQKWSWDKILRSPFIKQADVLQGIYFFGDRFNIDEKRRNFDFYEPMTVHESSLSPCIHSILAAELGKEEKAVEMYRRTARLDLDNYNNDTEDGLHITSMTGSWLAIVQGFAQMKTWGGKLSFAPFLPGAWTGYAFHINYRGRLIKVAVGKENVVFTLLKGEPLDLQVYGKDITLNGSHTAALEK

SEQ ID NO: 31691 - protein, 459 aa, Neisseria meningitidis
MFAFKSLLDMPRGEALAVVVALIAAMGYTIISLEWLPHMSIIAAIVVLILYGLARGLKYNDMQQGMIGALNQGMGAIYLFFFIGLMVSALMMSGAIPTLMYYGFGLISPTYFYFSAFALCSVIGVSIGSSLTTCATVGVAFMGMAAAFQADMAMTAGAIVSGAFFGDKMSPLSDTTGISASIVGIDLFEHIKNMMYTTIPAWLISAALMLWLLPSVAAQDLNSVESFRSQLEATGLVHGYSLIPFALLVILALMRVNAVVAMLFTVMVAVAVTYLHSTPDLRQLGAWFYGGYKLEGEAFKDVVKLISRGGLESMFFTQTIVILGMSLGGLLFALGAIPSLLDAVRSFLTNAGRATFSVAMTSVGVNFLIGEQYLSILLSGETFKPVYDKLGLHSRNLSRTLEDAGTVINPLVPWSVCGVFISHALGVPVWEYLPYAFFCYLSLALTLLFGWTGLTLSKK

SEQ ID NO: 31692 - protein, 503 aa, Neisseria meningitidis
MSEQNHPQTEPQLDENQIIALRREKLHNIRQQRNAYPNDFKRDSFAADLHTQYGEIGKEELDPQGIPVKIAGRMMLKRQMGKASFATIQDVSGQIQLYLNNKGVSQEVLDDFNHWDLGDIVGAEGTLFKTNHGELTVRVSDIRLLSKSLRPLPDKHKGLSDQETKYRQRYVDLIANEESRNTFIKRSQIIQSVRNFMVGEHYLEVETPMMHPIPGGATAKPFVTHHNALDIPLYLRIAPELYLKRLVVGGLERVFEINRSFRNEGMSVRHNPEFTMIEFYEAFSDYERMMQMAEDIIRNASRTVNGTANITYNGKEVDLESPFERLTILEAIKKYNPHYTDEQLNDAEWLKKEIVKHGESLPPSPGIGSLQLALFEGCAEGKLWNPTFIIDYPVEVSPLARASDTKQGLTERFELFVVGRELANGYSELNDPEDQAERFKSQVAQKDAGDDEAMHYDADYIRAMEFGLPPTGGCGIGIDRLVMLLTDSQTIRDVILFPQMRPE

SEQ ID NO: 31693 - protein, 56 aa, Neisseria meningitidis; identical to SEQ ID NO: 1209

SEQ ID NO: 31694 - protein, 520 aa, Neisseria meningitidis
MAKQSNAAPKKRGFFARLFGRREAVPKTARRNFAGARPVGSLASWQPQNWSADALARSDLDRLRARARSLARDNDYMRKFLNMVESNVIGRDGFALQMRVLLDNADKPDALANKAIEAAFSRWARRGVCDVTGQMSFTDLQRLLIRSVARDGEVLIRHISGFDNDYGYALQVLDIDRLDTGYNVPQQNGRNAVRMGVELNSYSRPVAYWLRTAHPGESYGQTNTGNLRERVPAEQISHIFLHDRPEQRRGFPWVASAIIGLQNLSGYQEAAIIAARVGASKMGFFKQTEDADNFMPPIDGQEVDNGRGSIDLIDSVEPGTFHELPQGYDFTPFDPDYPHANYDAFVKASLRGIASGLNVAYHSLANDLEGVNFSSIRSGTLEERDTWMTLQNWFADAFLYDVFDRWIEAALLMGAIKMPSGKSLPAGKLDKFKACNWQGRRWSWVDPLKDINAHKEAVALAVKSRRDICAEMGLDFEDVITQIEQENQMLAGKGIIADVKPAASAAEPESEDNPNEENEA

SEQ ID NO: 31695 - protein, 111 aa, Neisseria meningitidis; identical to SEQ ID NO: 233

SEQ ID NO: 31696 - protein, 198 aa, Neisseria meningitidis; identical to SEQ ID NO: 1998

SEQ ID NO: 31697 - protein, 114 aa, Neisseria meningitidis
MNIIRALLIILGCLAAGETAIFLAGIKLPGSIVGMGVLFALLQAGWVKTSWLQQLTDALMANLTLFLVPPCVAVISYLDLIADDWFSILVSASASTLCVLLVTGKVHRWIRSII

SEQ ID NO: 31698 - protein, 336 aa, Neisseria meningitidis
MSIKILIISPSWIGDCVMTQPLFRRLKELHPGCTIDVFAPKWSMAVFERMPEVNEILENPFGHGALELKRRWRVGRDLGRRGYDQVIVLPGSLKSAVIALATGIGKRTGYVGESRYFLLNDIRRLDKERLPLMVDRYTALAHPSQEDFDGHSGFPEFSIDERRREISVETFGLDIGKPVLAFCPGAEFGPAKRWPTKHFAELGKHYSAAGWQVWLFGSQKDDEIAEEINRLSDGICVNLCGKTDLSQAMDLLSLADTVVCNDSGLMHLAAALGRKVVAVYGSSSPTHTPPLSDRAKIVSLHLECSPCFKRECPLGHTDCLNRLYPEKIVQAVEEAV

SEQ ID NO: 31699 - protein, 134 aa, Neisseria meningitidis; identical to SEQ ID NO: 4298

SEQ ID NO: 31700 - protein, 380 aa, Neisseria meningitidis
MKVFKQQLEQLGAQNQYRSIPDLIHQGRYITRENRKMLNMSSNDYLGLASDENLRRSFLQQYGGNFPSFTSSSSRLLTGNFPIYTDLEELVAQRFQRESALLFNSGYHANLGILPALTTTKSLILADKFVHASMIDGIRLSRCAFFRYRHNDYEHLKNLLEKNVGKFDRTFIVTESVFSMDGDVADLKQLVQLKKQFPNTYLYVDEAHAIGVYGQNGLGIAERDNLIAEIDLLVGTFGKALASVGAYAVCNQVLKECLINQMRPLIFSTALPPFNVAWTYFIFERLPQFSKERSHLEQLSAFLRREVAHRTQIMPSQTCIVPYILGGNEAALAKAEYLQRQGYYCLPIRPPTVPKNTSRIRLSLTADMTTDEVRQFAVYL

SEQ ID NO: 31701 - protein, 321 aa, Neisseria meningitidis; identical to SEQ ID NO: 6649

SEQ ID NO: 31702 - protein, 129 aa, Neisseria meningitidis
MNPHEKLLTTDNPILRQRAKAMRQEMSEAEAKLWQHLRAGRLNGYKFRRQQPMGNYIVDFMCVTPKLIVEADGGQHTEQAAYDHARTAYLNSLGFTVLRFWNHEILQQTNDVLTEILLVLQELEKQAAR

SEQ ID NO: 31703 - protein, 51 aa, Neisseria meningitidis; identical to SEQ ID NO: 1536

SEQ ID NO: 31704 - protein, 141 aa, Neisseria meningitidis
MKTARRRSRELAVQAVYQSLINRTAAPEIAKNIREMSDFAKADEELFNKLFFGTQTNAAEYIQQIRPLLDRDEKDLNPIERAVLLTACHELSAMPETPYPVIINEAIEVTKTFGGTDGHKFVNGILDKLAAQIRPDEPKRR

SEQ ID NO: 31705 - protein, 85 aa, Neisseria meningitidis
MVFCVKLNKEAEGMKFPPLPNELGKRIFENVSQEAWMAWTRHQTMLINENRLSLADPRAREYLAQQMEQYFFGDGADAVQGYVPQ

SEQ ID NO: 31706 - protein, 287 aa, Neisseria meningitidis; identical to SEQ ID NO: 2812

SEQ ID NO: 31707 - protein, 114 aa, Neisseria meningitidis
LIGSRSSKGTTIYADKGYDSAENRQHLKEHQLPDGIMRKACRNRPLTETQTKRNRYLSKTRYVVEQSFGTLHRKFRYARAAYFGLIKVSAQSHLKAMCLNLLKAANRLSVPVAA

SEQ ID NO: 31708 - protein, 344 aa, Neisseria meningitidis
MQTLTIIRPDDMHLHLRDGDALKAVAPYTARQMGRAVIMPNLKPPVVSVADALAYKARIMAALPEGSAFEPLMTLYLTDQATPALVREAKAAGIVAFKLYPAGATTNSDSGVTDLFKLIPVLEEMAKQGILFLVHGEVTDPEIDIFDREAAFIGRVMKPVLAQVPNLKVVFEHITTAEAARLVLEAGDNVAATVTPQHLLLNRNDLLVGGVRPHHFCLPVLKRETHRQALVAAVTGEKAHKFFLGTDSAPHAKSAKENACGCAGMFSAMTAVELYAEVFEKAGALDKLEAFASKNGARFYGIPENAGTITLVKQSQTVPASVPYGDGELVPMRAGGEIGWTVQY

SEQ ID NO: 31709 - protein, 470 aa, Neisseria meningitidis
VKPLRRLTNLLAACAVAAAAFGQPALAADLAQDPFITDNAQRQHYEPGGKYHLFGDPRGSVSDRTGKINVIYTHQMGNLLIQQANINGTIGYHTRFSGHGHEEHAPFDNHAADSASKEQGNVDDGFTVYRLNWEGHEHHPADAYDGPKGGNYPKPTGARDEYTYHVNGTARSIKLNPTDTRSIRQRISDNYNNLGSNFSDRADEANRKMFEHNAKLDRWGNSMEFINGVAAGALNPFISAGEALGIGDILYGTRYAIDKAAMRNIAPLPAEGKFAAIGGLGSVAGFEKNTREAVDRWIQENPNAAETVEALVNVLPFAKVKNLTKAAKPGKAAVSGDFSDSYKHNTASRLSQSVDGEMFQTRNVDFKAKSIGTKIHDGAQGKHISGHRNYIEGKSTLNQNINPQELLNGIHSGAYPVISKGARGNPVVDFGYPIGSDGKSGLSTNFGTIHSGKNGVHIVPANPKTIKKVQ

SEQ ID NO: 31710 - protein, 159 aa, Neisseria meningitidis
MKHILPLIAASALCISTASAHPASEPSTQNETAMTTHTLTSKYSFDETVSRLETAIKSKGMDIFAVIDHQEAARRNGLTMQPAKVIVFGTPKAGTPLMVKDPAFALQLPLRVLVTKTDGKVRAAYTDTRALIAGSRIGFDEVANTLANAEKLIQKTVGE

SEQ ID NO: 31711 - protein, 93 aa, Neisseria meningitidis; identical to SEQ ID NO: 7643

SEQ ID NO: 31712 - protein, 193 aa, Neisseria meningitidis; identical to SEQ ID NO: 1600

SEQ ID NO: 31713 - protein, 278 aa, Neisseria meningitidis
MIDLHCHSTVSDGMLSPTEVVRLAHQNGCTLLALTDHDHTGGIAEARAEADRLGLRLINGVEISVTWRGRTIHVVGLDFDEQDENLQNLLAKVRQGRLKRLEAIAAKLEKKGIGGAYDGALELAANKEMVSRTHVAEFLIKNGHVKNKQQAFTKYLGDGKSCAVRHEWATLEDCVSAVNGAGGMAVIAHPMRYDLSATAKRNLFEEFKNLGGAGIEVHSGNCCKNDRLNYALLAERFGMLASAGSDFHRLNDFSGGILGACPELPENCRPVWAHFSRH

SEQ ID NO: 31714 - protein, 171 aa, Neisseria meningitidis; identical to SEQ ID NO: 2424

SEQ ID NO: 31715 - protein, 169 aa, Neisseria meningitidis
MYTCTSCGEKHEDMPAIGFTAPDPYNQLSEEERIAYQAECDSDFCIIRYPDQTDRFIRAVLPIPIIGHEETLEYGVWVSVSEKSFNDYQSHFHDNPENAVYFGMICNRLPPYETDTFGLHCNVVTRSNNQRPLLQLHQSGEHPLVRDFYQGIEYAEAQARVDAVFGSDY

SEQ ID NO: 31716 - protein, 212 aa, Neisseria meningitidis; identical to SEQ ID NO: 19072

SEQ ID NO: 31717 - protein, 97 aa, Neisseria meningitidis
MSNIKIVALVTVKPEYTETLVAQFKELVKASRAEEGNISYDLHQEIGKPNRFVFVENWKSQAAIDEHNASAHFQAFVQSVDGKTEALEIVLMNEVAD

SEQ ID NO: 31718 - protein, 232 aa, Neisseria meningitidis
MKSRHLALGVAALFALAACDSKVQTSVPADSAPAASAAAAPAGLVEGQNYTVLSNPIPQQQAGKVEVLEFFGYFCPHCAHLEPVLSKHAKSFKDDMYLRTEHVVWQKEMLPLARLAAAVDMAAADSKDVANSHIFDAMVNQRIKLQEPEVLKKWLGEQTAFDGKKVLAAYESPESQARADKMQELTETFQIDGTPTVIVGGKYKVEFADWESGMNTIDLLADKVREEQKAAQ

SEQ ID NO: 31719 - protein, 313 aa, Neisseria meningitidis
MKTLLLLIPLVLTACGTLTGIPAHGGGKRFAVEQELVAASSRAAVKEMDLSALKGRKAALYVSVMGDQGSGNISGGRYSIDALIRGGYHNNPESATQYSYPAYDTTATTKSDALSSVTTSTSLLNAPAAALTKNSGRKGERSAGLSVNGTGDYRNETLLANPRDVSFLTNLIQTVFYLRGIEVVPPEYADTDVFVTVDVFGTVRSRTELHLYNAETLKAQTKLEYFAVDRDSRKLLIAPETAAYESQYQEQYALWMGPYSVGKTVKASDRLMVDFSDITPYGDTTAQNRPDFKQNNGKNPDVGNEVIRRRKGG

SEQ ID NO: 31720 - protein, 384 aa, Neisseria meningitidis; identical to SEQ ID NO: 7460

SEQ ID NO: 31721 - protein, 288 aa, Neisseria meningitidis; identical to SEQ ID NO: 2832

SEQ ID NO: 31722 - protein, 180 aa, Neisseria meningitidis
VQSWKERRDFNIVKQDLDFSCGAASVATLLNNFYGQTLTEEEVLKKLDKEQMRASFEDMRRIMPDLGFEAKGYALSFEQLAQLKIPVIVYLKYRKDDHFSVLRGIDGNTVLLADPSLGHVSMSRAQFLDAWQTREGNLAGKILAVVPKGRDAGGDKAFFTRSPKRQTEFAVGQVKWWRAY

SEQ ID NO: 31723 - protein, 280 aa, Neisseria meningitidis
MDKERILTPAVVFSVALLHLAMVALLWQAHKLPVIESGNVIEFVDLGDFGGGDGAPEGAGAPAAPEPQPEPEPPKPVEPPKPVLKPVVTKKADADIQQPKEEPKPEEKPKPEEKPKPEPKPEAKPVPKPAEKPVEKPSEKPAEHPSNASAKADSEQGNGEDKGTGIKGDGTGRGEGSGKGSGGVKGEHGEGAGSSKGNPLRANGSIPRPAYPTLSMENDEQGTVVLSVLVSPGGHVESVKIVKSSGFSRLDNAARKAAQNGHFQANAWTEFKVPVKFELN

SEQ ID NO: 31724 - protein, 119 aa, Neisseria meningitidis; identical to SEQ ID NO: 3183

SEQ ID NO: 31725 - protein, 330 aa, Neisseria meningitidis
  misc_feature 325, 326: 'Xaa' is any amino acid
MSTFFQQTAQAMIAKHIDRFPLLKLDQVIDWQPIEQYLNRQKTRYLRDHRGRPAYPLLSMFKAVLLGQWHSLSDPELEHSLITRIDFNLFCRFDELSIPDYSTLCRYRNRLAQDNTLSELLELINRQLTEKGLKIEKASAAVVDATIIQTAGSKQRQAIEVDEEGQISGQTTPSKDSDARWIKKNGLYKLGYKQHTRTDEEGYIEKLHITPANAHECTHLSPLLEGIAEGTTVYADKGYDSAENRQHLKEHQLPDGIMRKACRNRPLSEVQTKRNRYLSKTRYVVEQSFGTLHRKFRYARAAYFGLIKVSAQSHLKAMCLNLLKXXHTLN

SEQ ID NO: 31726 - protein, 96 aa, Neisseria meningitidis; identical to SEQ ID NO: 2317

SEQ ID NO: 31727 - protein, 144 aa, Neisseria meningitidis; identical to SEQ ID NO: 4464

SEQ ID NO: 31728 - protein, 246 aa, Neisseria meningitidis; identical to SEQ ID NO: 2993

SEQ ID NO: 31729 - protein, 79 aa, Neisseria meningitidis; identical to SEQ ID NO: 831

SEQ ID NO: 31730 - protein, 1081 aa, Neisseria meningitidis
MAAFKPNPINYILGLDIGIASVGWAMVEIDEEENPIRLIDLGVRVFERAEVPKTGDSLAMARRLARSVRRLTRRRAHRLLRARRLLKREGVLQAADFDENGLIKSLPNTPWQLRAAALDRKLTPLEWSAVLLHLIKHRGYLSQRKNEGETADKELGALLKGVADNAHALQTGDFRTPAELALNKFEKECGHIRNQRGDYSHTFSRKDLQAELNLLFEKQKEFGNPHVSGGLKEGIETLLMTQRPALSGDAVQKMLGHCTFEPAEPKAAKNTYTAERFIWLTKLNNLRILEQGSERPLTDTERATLMDEPYRKSKLTYAQARKLLSLEDTAFFKGLRYGKDNAEASTLMEMKAYHTISRALEKEGLKDKKSPLNLSPELQDEIGTAFSLFKTDEDITGRLKDRIQPEILEALLKHISFDKFVQISLKALRRIVPLMEQGKRYDEACAEIYGDHYGKKNTEEKIYLPPIPADEIRNPVVLRALSQARKVINGVVRRYGSPARIHIETAREVGKSFKDRKEIEKRQEENRKDREKAAAKFREYFPNFVGEPKSKDILKLRLYEQQHGKCLYSGKEINLGRLNEKGYVEIDHALPFSRTWDDSFNNKVLVLGSENQNKGNQTPYEYFNGKDNSREWQEFKARVETSRFPRSKKQRILLQKFDEDGFKERNLNDTRYVNRFLCQFVADRMRLTGKGKKRVFASNGQITNLLRGFWGLRKVRAENDRHHALDAVVVACSTVAMQQKITRFVRYKEMNAFDGKTIDKETGEVLHQKTHFPQPWEFFAQEVMIRVFGKPDGKPEFEEADTPEKLRTLLAEKLSSRPEAVHEYVTPLFVSRAPNRKMSGQGHMETVKSAKRLDEGVSVLRVPLTQLKLKDLEKMVNREREPKLYEALKARLEAHKDDPAKAFAEPFYKYDKAGNRTQQVKAVRVEQVQKTGVWVRNHNGIADNATMVRVDVFEKGDKYYLVPIYSWQVAKGILPDRAVVAYADEEDWTVIDESFRFKFVLYSNDLIKVQLKKDSFLGYFSGLDRATGAISLREHDLEKSKGKDGMHRIGVKTALSFQKYQIDEMGKEIRPCRLKKRPPVR

SEQ ID NO: 31731 - protein, 85 aa, Neisseria meningitidis
  misc_feature 79, 80: 'Xaa' is any amino acid
MKTLLLLIPLVLTACGTLTGIPAHGGGKRFAVEQELVAASSRAAVKEMDLSALKGRKAALYVSVMGDQGSGNISGGRYXXTHLIN

SEQ ID NO: 31732 - protein, 201 aa, Neisseria meningitidis
MTIYFKNGFYDDTLGSIPEGAVAVRAEEYAALLAGQAQGGQIAADSDGRPVLTPPRPSEYHEWDGKKWEIGEAAAAARFAEQKTATAFRLAAKADELKNSLLAGYPQVEIDSFYRQEKEALARQADNNAPTPMLAQIAAARGVELDVLIEKVVEKSARLAVAAGAIIGKRQQLEDKLNAIETAPGLDALEKEIEEWTLNIG

SEQ ID NO: 31733 - protein, 128 aa, Neisseria meningitidis; identical to SEQ ID NO: 7600

SEQ ID NO: 31734 - protein, 163 aa, Neisseria meningitidis; identical to SEQ ID NO: 3672

SEQ ID NO: 31735 - protein, 190 aa, Neisseria meningitidis; identical to SEQ ID NO: 8959

SEQ ID NO: 31736 - protein, 306 aa, Neisseria meningitidis
MKIRLGRHNAPDFPHGAAVTIGNFDGVHLGHKHILQKLRFEADTRGLPVVVVIFEPQPKEFFALRTGRMPPCRISPLRTKLELLEGTGCVDAVWVLRFDQNFSEISAQGFIDRLLRQTLNTRYLLVGDDFRFGAGREGCFELLAQQPDMQTERTPSVIVEDIRTSSTAVRQALSDGNLAYAKKLLGHDYVLGGRVVHGRKLGRTLNAPTANIRLPGHRYALGGVFVVEADGAFGTRRGVASFGFNPTVDSGCSQKLEVHLFDFQGDLYGQRLNVRFLHKLRDEEKFDGMEELKRQIEADMEAAKCW

SEQ ID NO: 31737 - protein, 513 aa, Neisseria meningitidis
MKIGIPRESLSGETRVACTPATVALLGKLGFETVVESGAGLAASLDDAAYQTAGATVADKAAVWACPLIYKVNAPSEDELPLLKEGQTIVSFLWPRQNEALVEALRAKKVNALAMDMVPRISRAQALDALSSMANISGYRAVIEAANAFGRFFTGQITAAGKVPPAQVLVIGAGVAGLAAIGTANSLGAVVRAFDTRLEVAEQIESMGGKFLKLDFPQESGGSGDGYAKVMSDEFIAAEMKLFAEQAKEVDIIITTAAIPGKPAPKLITKEMVESMKSGSVIVDLAAATGGNCELTRPGELSVTGNGVKIIGYTDMANRLAGQSSQLYATNLVNLTKLLSPNKDGEITLDFEDVIIRNMTVTHDGEITFPPPPIQVSAQPQQTPSEKAAPAAKPEPKPVSLWKKLAPAVIAAVLVLWVGAVAPAAFLKHFIVFVLACVIGYYVVWNVSHSLHTPLMSVTNAISGIIVVGALLQISQGNGFVTLLAFIAILIASINIFGGFFVTRRMLNMFRKG

SEQ ID NO: 31738 - protein, 796 aa, Neisseria meningitidis
MTEQKHEEYGADSIQVLEGLEAVRKRPGMYIGDTQDGSGLHHMVFEVLDNAIDEALAGHCDKITVTIHADHSVSVADNGRGMPTGIHPKEGRSAAEVIMTVLHAGGKFDNNSYKISGGLHGVGVSVVNALSDWVTLTIYRDGKEHFVRFVRGETEEPLKVVGDSDKKGTTVRFLASAETFGNVEYSFDILAKRIRELSFLNNGVDIELTDERDGKHESFALSGGVAGFVQYMNRKKTPLHEKIFYAFGEKDGMSVECAMQWNDSYQESVQCFTNNIPQRDGGTHLTALRQVMTRTINNYIEANEVAKKAKVETAGDDMREGLTCVLSVKLPDPKFSSQTKDKLVSSEIGPVVNEVISQALTDFLEENPNEAKIITGKIVDAARAREAARKAREITRRKGVMDGLGLPGKLADCQEKDPALSELYLVEGDSAGGSAMQGRDRKFQAILPLKGKILNVEKARFEKMLASQEVAALITALGAGIGKEEFNAEKLRYHRIIIMTDADVDGAHIRTLLLTFFYRQMPELVERGYIYIAQPPLYKAKYGKQERYLKDELEKDQWLLGLALEKAKIVSDGKVLEGKDLESAAKQFLLAKTVIGQESRIIDDLVLKAMLYAEPVDLSSADSTDRAIANLSALLDEKEVVLERVEGHEGNRFIKITRKLHGNVMTSYLESKFLNSKAYQTIVQTATVLKGLVAAGSTLFKGETEYPVGSFEEALDILLQNVQKGMSIQRYKGLGEMNPEQLWETTMDPSVRRLLKVRIEDAIAADEVFVTLMGDEVEPRRAFIENNALIAQNIDA

SEQ ID NO: 31739 - protein, 107 aa, Neisseria meningitidis; identical to SEQ ID NO: 1793

SEQ ID NO: 31740 - protein, 143 aa, Neisseria meningitidis
LLPRPLVFTNGCFDILHRGHVTYLAQARSMGDALVLALNTDASVRRLGKGGDRPVNPLENRAAVAAALESVDLVTWFDGDTPAALIEAVKPEILVKGGDWAADKIVGAAETLARGGQVFSIPFLHQTSTTKTLAKIRAAEGGK

SEQ ID NO: 31741 - protein, 202 aa, Neisseria meningitidis
MKPKPHTVRTLIAAIFSLALSGCVSAVIGSAAVGAKSAVDRRTTGAQTDDNVMALRIETTARSYLRQNNQTKGYTPQISVVGYNRHLLLLGQVATEGEKQFVGQIARSEQATEGVYNYITVASLPRTAGDIAGDTWNTSKVRATLLGISPATQARVKIVTYGNVTYVMGILTPEEQAQITQKVSTTVGVQKVITLYQNYVQR

SEQ ID NO: 31742 - protein, 280 aa, Neisseria meningitidis; identical to SEQ ID NO: 25294

SEQ ID NO: 31743 - protein, 69 aa, Neisseria meningitidis; identical to SEQ ID NO: 3638

SEQ ID NO: 31744 - protein, 174 aa, Neisseria meningitidis; identical to SEQ ID NO: 9477

SEQ ID NO: 31745 - protein, 102 aa, Neisseria meningitidis
MSVKELFKVILDGNKDFPIRTIHRTPMGILPKPVALSIVQYEDDQGFYLFYLNETGQEQTDTYHETLDSAFEQAEFEFGISKEEWMQSPYVASVENNNQKVI

SEQ ID NO: 31746 - protein, 239 aa, Neisseria meningitidis; identical to SEQ ID NO: 5111

SEQ ID NO: 31747 - protein, 108 aa, Neisseria meningitidis
MKKSLFAAALLSLVLAACGGEKAAEAPATEAPAAEAPATEAPAAEAPATEAPAAEAPATEAPAAEAPAAEAAATEAPAAEAAATEAPAAEAAATEAPAAEAPAAEAAK

SEQ ID NO: 31748 - protein, 336 aa, Neisseria meningitidis
MNDNTQTLPPRRLSVAPMLDWTDRHYRYMARQITRNTWLHSEMVNAGAIVYGDKDRFLMFNEGEQPVALQLGGSDPSDLAKAAKAAEEYGYNEVNLNCGCPSPRVQKGAFGACLMNEVGLVADCLNAMQDAVKIPVTVKHRIGVDRQTEYQTVADFVGTLRDKTACKTFIVHARNAWLDGLSPKENRDVPPLKYDYVYRLKQEFPGLEIIINGGITTNEEIAQHLQHVDGVMVGREAYHNPMVMREWDRLFYGDTRSPIEYADLVQRLYTYSQAQIQAGRGTILRHIVRHSLGLMHGLKNARTWRRMLSDATLLKDNDGGLILEAWKEVERANMRE

SEQ ID NO: 31749 - protein, 127 aa, Neisseria meningitidis
MTFAYWCILIACLLPLFCAAYAKKTGGFRFKDNHNPRDFLARTQGTAARAHAAQQNGFEAFAPFAAAVLTAHATGNAEQSTINTLAGLFILFRLAFIWCYIADKAALRSLMWAGGFACTVGLFVAAA

SEQ ID NO: 31750 - protein, 189 aa, Neisseria meningitidis; identical to SEQ ID NO: 9128

SEQ ID NO: 31751 - protein, 197 aa, Neisseria meningitidis; identical to SEQ ID NO: 1551

SEQ ID NO: 31752 - protein, 231 aa, Neisseria meningitidis; identical to SEQ ID NO: 2520

SEQ ID NO: 31753 - protein, 220 aa, Neisseria meningitidis; identical to SEQ ID NO: 5505

SEQ ID NO: 31754 - protein, 242 aa, Neisseria meningitidis
MWDNAEAMERLTRWLLVMMAMLLAASGLVWFYNSNHLPVKQVSLKGNLVYSDKKTLGSLAKEYIHGNILRTDINGAQEAYRRYPWIASVMVRRRFPDTVEVVLTERKPVARWGDHALVDGEGNIFEARLDRPGMPVFRGAEGTSAEMLRRYDEFSTVLAKQGLGIKEMTYTARSAWIVVLDNGITVRLGRENEMKRLRLFTEAWQHLLRKNKNRLSYVDMRYKDGFSVRYASDGLPEKESEE

SEQ ID NO: 31755 - protein, 417 aa, Neisseria meningitidis
MQTYLVGGAVRDYLLGLPVKDRDWVVVGADAQTMLAQGFQPVGKDFPVFLHPETHEEYALARTERKTAKGYVGFSFHADKDVTLEQDLMRRDLTINAMAQDADGKIIDPFGGQRDLAAGILRHVSPAFAEDPVRILRTARFTARYRFEIAEETIKLMRQMVENGEADALVAERVWQEFAKGLMEKNPRKMIEVLRECGALKVLLPEVNALFGVPQRADYHPEIDSGIHTLMTLQRAADMGLSLPERYAALLHDLGKAKTPSDILPRHHGHDLAGVEPVREVNQRLRAPKHCAELAELVCRWHIIFHQVGQLKSQTILNVLKKTDAFRRPERFQTALNVCIADTQGRLNREHTPYPQRAHWFALLEAANQADSGKIAAECRAQGKAHLIAEQIDRARLAQIAPLQKTFRAAQDKTEKH

SEQ ID NO: 31756 - protein, 78 aa, Neisseria meningitidis; identical to SEQ ID NO: 1246

SEQ ID NO: 31757 - protein, 41 aa, Neisseria meningitidis; identical to SEQ ID NO: 2201

SEQ ID NO: 31758 - protein, 125 aa, Neisseria meningitidis
VNKTLILALSALLGLAACSAERVSLFPSYKLKIIQGNELEPRAVAALRPGMTKDQVLLLLGSPILRDAFPTDRWDYTFNTSRNGIIKERSNLTVYFENGVLVRTEGDVLQNAAEALKDRQNTDKP

SEQ ID NO: 31759 - protein, 106 aa, Neisseria meningitidis; identical to SEQ ID NO: 2510

SEQ ID NO: 31760 - protein, 553 aa, Neisseria meningitidis
MTDNSPPPNGHAQARVRKNNTLLSAVWLVPLIALIAGGWLWVKEIRNRGPVVTLLMDSAEGIEVNNTVIKVLSIDVGRVTRIKLRDDQKGVEVTAQLNADVSGLIRSDTQFWVVKPRIDQSGVTGLGTLLSGSYIAFTPGKSDEAKDVFQVQDIPPVTAIGQSGLRLNLIGKNDRILNVNSPVLYENFMVGQVESAHFDPSDQSVHYTIFIQSPNDKLIHSASRFWLESGINIETTGSGIKLNSAPLPALLSGAISFDSPKTKNSKNVKSEDSFTLYDSRSEVANLPDDRSLYYTAFFKQSVRGLTVGSPVEYKGLNVGVVSDVPYFDRNDSLHLFENGWIPVRIRIEPSRLEINADEQSKEHWKQQFQTALNKGLTATISSNNLLTGSKMIELNDQPSSSPKLRPHTVYAGDTVIATRGGGLDDLQAKVVDLLDKFGKLPLDKTVAELNGSLAELKSALKSANTALSSIDKLIGKPQTQNIPNELNQTLKELRQTLQGVSPQSPIYGDVQNTLQSLDKTLKDVQPVINTLKEKPNALIFNSSSKDPIPKGSR

SEQ ID NO: 31761 - protein, 162 aa, Neisseria meningitidis
MLKITLIAACAENLCIGAGNAMPWHIPEDFAFFKAYTLGKPVIMGRKTWESLPVKPLPGRRNIVISRQADYCAAGAETAASLEAALALCAGAEEAVIMGGAQIYGQAMPLATDLRITEVDLSVEGDAFFPAIDRTHWKEAERTERRVSSKGTSYAFVHYLRY

SEQ ID NO: 31762 - protein, 133 aa, Neisseria meningitidis; identical to SEQ ID NO: 2156

SEQ ID NO: 31763 - protein, 704 aa, Neisseria meningitidis
MDLLSVFHKYRLKYAVAVLTILLLAAVGLHASVYRIFTPENIRSRLQQSIAHTHRKISFDADIQRRLLPRPTVILKNLTITEPGGDRTAVSVQETKIGLSWKNLWSDQIQIEKWVVSSAELALTRDGKGVWNIQDLIDSQKRQASVNRIIVENSTVRLNFLQEQLILKEINLNLQSPDSSGQPFESSGILVWGKLSVPWKSRGLFLSNGIGPPEISPFHFEASTSLDGHGITISTTGSPSVRFNAGGADAAGLGLRADTSFRNLHLTAQIPTLALRNNSIKIETVNGAFTIGGEYARWDGSFKLDKANLHSGIANIGNAEISGSFKTPRHQTNFSLNSPLVWTENKGLEAPRLYVSTLQDTVNRLPQPRFISRLDGSLSVPNLQNWNAELNSTFDRQTVAAKFRYTHEDAPHLEAAVALQKLNLTPYLDDVRQQNGKIFPDTLAKLSGDIEAHLKIGKVQLPGLQLDDMETYLHADKGHIALSRFKSGLYGGHTEGGISIANTRPATYRLQQNASNIQIQPLLQDLFGFHSFSGNGDAVIDLTAGGETRKELIRSLQGSLSLNISNGAWHGIDMDNILKNGISGKTADNAAPSTPFHRFTLNSEISDGISRHIDTELFSDSLYVTSNGYTNLDTQELSEDVLIRNAVHPKNKPIPLKITGTVDKPSITVDYGRLTGGINSRKEKQKILEDTLLEQWQWLKPKEP

SEQ ID NO: 31764 - protein, 197 aa, Neisseria meningitidis
MVRTVKSYNGEADDLAGQIHTLPAVWVTYGGSKVEPASTGGVCGRYQDTAEFVVMVAARNLRNEQAQRQGGIDSREIGSNDLIRAVRRLLDGQRLGFADSRGLVPKAVRAIANHVLVQNAAVSIYAVEYAIRFNTCGLENDRYPEHTDNPDDPNHIFTKYQGTLSEPWPDFEGLDGKIYDPQSADEIPVNLTLKDKQ

SEQ ID NO: 31765 - protein, 103 aa, Neisseria meningitidis
  misc_feature 99, 100, 101: 'Xaa' is any amino acid
MSTFFQQTAQAMIAKHIDRFPLLKLDQVIDWQPIEQYLNRQRTRYLRDHRGRPAYPLLSMFKAVLLGQWHSLSDPELEHSLITRIDFNLFCRFDELSIXXXHT

SEQ ID NO: 31766 - protein, 435 aa, Neisseria meningitidis
MKPVNIGLLGLGTVGGGTAAVLRDNAEEISRRLGREIRISAVCDLSEEKARQTCPSAAFVKDPFELVAREDVDVVVELFGGTGIAKDAVLKAIENGKHIVTANKKLLAEYGNEIFPLAEEKNVMVQFEAAVAGGIPIIKALREGLAANRIKSIAGIINGTSNFILSEMREKGSAFADVLKEAQALGYAEADPTFDIEGNDAGHKITIMSALAFGTPMNFSACYLEGISKLDSRDIKYAEELGYRIKLLGITRKTGKGIELRVHPTLIPESRLLANVNGVMNAVRVNADMVGETLYYGAGAGALPTASAVVADIIDIARLVEADTAHRVPHLAFQPAQVQAQTILPMDEITSSYYLRVQAKDEPGTLGQIAALLAQENVSIEALIQKGVIDQTTAEIVILTHSTVEKHIKSAIAAIEALDCVEKPITMIRMESLHD

SEQ ID NO: 31767 - protein, 258 aa, Neisseria meningitidis; identical to SEQ ID NO: 9376

SEQ ID NO: 31768 - protein, 313 aa, Neisseria meningitidis; identical to SEQ ID NO: 1650

SEQ ID NO: 31769 - protein, 225 aa, Neisseria meningitidis
MPAALIKDFLLTQGLKLPPDEVRTAYLTAKTVMDMGMASIDRSVLWRNHEGWKLADYLPCDDGREDSLKRLFMALDSVFSRSTGVRSAAVYALMPSENQAFQLICLSRQGEVLENLWDLDEAAGKVSLACRSAQSGWMNVASDVRRWLDLGELSGERNHASAAQISIPVCTESGGVLGVVHVEFECAECADEAAQAEWVALALALSEPLKLLLGMSAGKDGSEDV

SEQ ID NO: 31770 - protein, 68 aa, Neisseria meningitidis; identical to SEQ ID NO: 3041

SEQ ID NO: 31771 - protein, 269 aa, Neisseria meningitidis; identical to SEQ ID NO: 23425

SEQ ID NO: 31772 - protein, 630 aa, Neisseria meningitidis
MKKMKPDKAQMQQMSRFAVFQRESVDVEKRTVEVAFSSEESVRRWFGDEVLSHAQGAVDLSRLNDGGAVLFNHDWDDQIGIIERAWIDADKRGRALVRFGNGTKATEKFQDVQDGILRHISVGYRVEDMVLDNPDTDDEGYRYIVTRWMPYEISFVTVPADPTVGVGRSVEPFIENPVNPTPEKGNRNMDKNQTPTTVETSAAAIPAAAATDTNNTAERGMQNERARVSELLAIGRSYAAHGGIEAAEKVIKEGGSEAQLRAAIMANMQTKPTVTAGEIGMTDKEQREFSLLRAMSAAATGKWDKAGLEREVSEELEKRHGRAAAGFFVPTDLIARAYSKGNAANGGNVIENDFREDLFIELLRNRLAVAQLGATVLDGLVGDITIPKHLTGNTVQWVDENGSATESNATFGQMSLKPKTVTANTELSRKFILQSSLSAEQFARSELLKAMMLGIDLAAINGKGTGNEPTGILNTAGIGAVEIGANGGAPEWKHIVALESAIAAANADIGDLAYITNARVRGLLKTKLKADGVSGYIWQDGATPLNGYRCAVSNQIPSNLTKGTAANKCSPLIFGNWSDLMIAHWGVLDVIVDPYTKSTTGAVRITTLQDVDIAVRHVESFAAIKDIVAA

SEQ ID NO: 31773 - protein, 255 aa, Neisseria meningitidis
  misc_feature 251, 252, 253: 'Xaa' is any amino acid
MQAVVVNKNVAGDVEVVEREVRPLEYGEALVEVEYCGVCHTDLHVAAGDYGDKPGRVLGHEGIGLVKEVADGVKNLKVGDRVSIAWLFQSCGSCEYCNTGRETLCRSVLNAGYTADGGMATHCIVNADYAVKVPDGLDPAQASSITCAGVTCYKAVKVSGVRPGQWIAIYGAGGLGNLGVQYAKKVFGAHVAAIDINDEKLAFAKETGADLIVNAAKEDAAKVIQEKTGGAHAAVVTAVSAAAFNSAVDCXXXHT

SEQ ID NO: 31774 - protein, 559 aa, Neisseria meningitidis
MENFAQLLEESFTLQEMNPGEVITAEVVAIDQNFVTVNAGLKSESLIDVAEFKNAQGEIEVKVGDFVTVTIESVENGFGETKLSREKAKRAADWIALEEAMENGNILSGIINGKVKGGLTVMISSIRAFLPGSLVDVRPVKDTSHFEGKEIEFKVIKLDKKRNNVVVSRRAVLEATLGEERKALLENLQEGSVIKGIVKNITDYGAFVDLGGIDGLLHITDLAWRRVKHPSEVLEVGQEVEAKVLKFDQEKQRVSLGMKQLGEDPWSGLTRRYPQGTRLFGKVSNLTDYGAFVEIEQGIEGLVHVSEMDWTNKNVHPSKVVQLGDEVEVMILEIDEGRRRISLGMKQCQANPWEEFAANHNKGDKISGAVKSITDFGVFVGLPGGIDGLVHLSDLSWTESGEEAVRKYKKGEEVEAVVLAIDVEKERISLGIKQLEGDPFGNFISVNDKGSLVKGSVKSVDAKGAVIALSDEVEGYLPASEFAADRVEDLTTKLKEGDEVEAVIVTVDRKNRSIKLSVKAKDAKESREALNSVNAAANANAGTTSLGDLLKAKLSGEQE

SEQ ID NO: 31775 - protein, 395 aa, Neisseria meningitidis
MNTLLKQLKPYPFARLHEAMQGISAPEGMEAVPLHIGEPKHPTPKVITDALTASLHELEKYPLTAGLPELRQACANWLKRRYDGLTLNSDTEILPVLGSREALFSFVQTVLNPVSDGLKPAIVSPNPFYQIYEGATLLGGGEIHFANCPAPSFNPDWRSISEEVWKRTKLVFVCSPNNPSGSVLDLDGWKEVFDLQDKYGFIIASDECYSEIYFDGNKPLGCLQAAAQLGRSRQKLLMFTSLSKRSNVPGLRSGFVAGDAELLKNFLLYRTYHGSAMSIPVQRASIAAWNDEQHVIDNRRLYQEKFEWVIPILQQVFDVKLPDASFYIWLKVPDGDDLAFARNLWQKAAIQVLPGRFLARDTEQGNPGEGYVRIALVTDVATCVKAAETIVSLYR

SEQ ID NO: 31776 - protein, 133 aa, Neisseria meningitidis
MPSDVGIRLQTAFKRKLKMKKIFYFLMVVFSTSVWAGDAEDNLLSIQSGYRALLQKQNNLDGKIIGMQSDLEDARRRLQTAQADIARLEAEIPAAMAQKARQAEELRQIGVRLDHAWNAVYGAGERRRRGIDR

SEQ ID NO: 31777 - protein, 106 aa, Neisseria meningitidis; identical to SEQ ID NO: 2449

SEQ ID NO: 31778 - protein, 153 aa, Neisseria meningitidis
MSDFPPVSRFLADEAATLDLGAAWSSRLNAPLVIYLEGDLGAGKTTLTRGILRGLGHQGAVKSPTYAIVESYPLERFTLHHFDLYRFSFPEEWEDAGLDELFAANSVCLIEWPQQGGEFTPPADITATLTHDGDGRKCLLTAHTERGRESLPL

SEQ ID NO: 31779 - protein, 82 aa, Neisseria meningitidis
MLTPEQVKAMIEGVAKCEHIEVEGDGHHFFAVIVSSEFEGKARLARHRLIKDGLKAQLESNELHALSISVAATPAEWNAKAQ

SEQ ID NO: 31780 - protein, 487 aa, Neisseria meningitidis; identical to SEQ ID NO: 9402

SEQ ID NO: 31781 - protein, 157 aa, Neisseria meningitidis; identical to SEQ ID NO: 5447

SEQ ID NO: 31782 - protein, 215 aa, Neisseria meningitidis
MKTKFYNHQGGHLILYFAGWGTPPDAVNHLILPENHDLLICYDYQDLNLDFDFSAYRHIRLVAWSMGVWAAERALQGIRLKSATAVNGTGLPCDDNFGIPCAVFKGTLENLTENTRLKFERRMCGDKASFEDYQQFSARPFDEIHQELIALFAMIGQDRRADFIRWTNALVGSGDKIFMPANQHRYWTPRCTVREIDGGHYLFSRFTHWSALWNH

SEQ ID NO: 31783 - protein, 207 aa, Neisseria meningitidis
VLRRDNDNKTLFLTDYKRSDGSGNKGWVVKLKDGQRVTVKPTVVLRTAFVTIHKYTGTDKCGAETAILGINTADGGKLTKKSARPIVPEANTAVAQYSGHKKGTNGKSIPIGCMQKSNEIVCPNGYVYDKPVNVRYLDEKKTDGFSTTADGDAGGSGIDPDGKRSGKNNRCFSQKGVRTLLMNDLDSLDITGPTCGMKRISWREVFY

SEQ ID NO: 31784 - protein, 434 aa, Neisseria meningitidis; identical to SEQ ID NO: 26513

SEQ ID NO: 31785 - protein, 230 aa, Neisseria meningitidis; identical to SEQ ID NO: 675

SEQ ID NO: 31786 - protein, 287 aa, Neisseria meningitidis; identical to SEQ ID NO: 1804

SEQ ID NO: 31787 - protein, 125 aa, Neisseria meningitidis; identical to SEQ ID NO: 1050

SEQ ID NO: 31788 - protein, 43 aa, Neisseria meningitidis; identical to SEQ ID NO: 2340

SEQ ID NO: 31789 - protein, 313 aa, Neisseria meningitidis; identical to SEQ ID NO: 2333

SEQ ID NO: 31790 - protein, 765 aa, Neisseria meningitidis; identical to SEQ ID NO: 28462

SEQ ID NO: 31791 - protein, 40 aa, Neisseria meningitidis; identical to SEQ ID NO: 1884

SEQ ID NO: 31792 - protein, 126 aa, Neisseria meningitidis
MNIRFFALTVPVLSLAACAVPEAYDDGGRGHMPSVQNQARPADFRAFSCENGLSVRVRHLDSGKVALRLDGRRAVLSSDVAASGERYTAEHGLFGNATEWHQKGGEAFFGFTDAYGNSVETSCRAR

SEQ ID NO: 31793 - protein, 485 aa, Neisseria meningitidis
MSRHPAPTGEKTFFGHPFQLSTLFHIELWERFSFYGMQGILLIYLYYTADKGGLGIDKTLAGGIVGAYSGSVYLSTILGAWFADRVWGAEKTLFLSGIVVMLGHIVLAAAPGLYGLLIGLIFIALGSGGVKSTASSMVGALYEQDEMRPLRDAGFSIFYIAINIGGFLGPLLTGLLQENIGFHYGFGAAAVGMAFGLWRYSLGRKNLPHPIVPHPLSKGQGKTAAAVGIALIAALATAIKTGLVNLDNFSGILLSTVILAVIAYFARLLTNPRVSSDNKRHIIAYIPLFLTICMFWAVWFQIYTVATVYFDETVNRTIGSFTVPVAWKDSMQSLWVILFSGLMAAMWTKMGRKQPKTPLKFAMAVFVTGASFLGFVPFISAGTPMPIAVFALIVLAITIGELMISPIALSISTKIAPPLFKTQMVALNFLAFSLGFTLGGVLFEKCYQAGDEIGFYRLLFYIGAATGFLLLLLVPKLNKMLEGTD

SEQ ID NO: 31794 - protein, 604 aa, Neisseria meningitidis
MSEHDMQNTNPPLPPLPPEITQLLSGLDAAQWAWLSGYAWAKAGNGASAGLPALQTALPTAEPFSVTVLSASQTGNAKSVADKAADSLEAAGIQVSRAELKDYKAKNIAGERRLLLVTSTQGEGEPPEEAVVLHKLLNGKKAPKLDKLQFAVLGLGDSSYPNFCRAGKDFDKRFEELGAKRLLERVDADLDFTASANAWTDNIAALLKEEAAKNRATPAPQATPPAGLQTASEGRYCKADPFPAALLANQKITARQSDKDVRHIEIDLSGSDLHYLPGDALGVWFDNDPALVREILDLLGIDPATEIQAGGKTLPVASALLSHFELTQNTPAFVKGYAPFADDDELDRIAADNAVLQGFVQSTPIADVLHRFPAKLTAEQFAGLLRPLAPRLYSISSSQAEVGDEVHLTVGAVRFEHEGRARAGGASGFLADRLKEDGTVRVFVERNDGFRLPEDSRKPIVMIGSGTGVAPFRAFVQQRAAENAEGKNWLIFGNPHFAADFLYQTEWQQFAKDGFLHRYDFAWSRDQEEKIYVQDKIREQAEGLWQWLQEGAHIYVCGDAAKMAKDVEAALLDVIIGAGHLDEEGAEEYLDMLREEKRYQRDVY

SEQ ID NO: 31795 - protein, 102 aa, Neisseria meningitidis
MEYCEPEEASDPYATYRRANLMAGLPLFVVILVLLNIVFPLPAYPLAWLVPAGFMVLGGGFPLSLPLAVLLVLTCCILARCPPLSRLLCCPCPNHPMSKNSA

SEQ ID NO: 31796 - protein, 283 aa, Neisseria meningitidis
MARHGWQAGRFEIGLDKPKIMGIVNLTPDSFSDGGAYSQNAKTALAHAERLLKEGADILDIGGESTRPGADYVSSEEEWARVEPVLAEVAGWGVPVSLDTRRTVIMEKALALGGIDIINDVAALSDEGAVELLARQTDTGICLMHMRGLPETMQDNPKYQDVVGEVARYLKTRSEACVAAGIAPQRITLDPGFGFGKTLQHNIALMRHLPELMAETGFPLLIGVSRKRMIGELTGETDTAARVHGSVAAALASVARGAQIVRVHDVKATADALKAWEALGINL

SEQ ID NO: 31797 - protein, 245 aa, Neisseria meningitidis
MLSARYLHLHEALGLGPMWLKQTAVVLPPKNTPAPSAQARPQTVRAAPIRPSQPHNGQARLETMKALETAAVHTRKPAPETETPLPGLSDGIAPVPAASGITKLAVVSLCPPIEDAVYGQLFHGKAGVLLDNILKAVGLDAAYVHKTCWVKTAAVGNPMPSEAAIETATVSVMQELDGCRAPAVLFLGQAFVNPERQAMIETLCGSRPFFIIDHPARLLRQPELKARAWQVLKQLKRALRQGGGS

SEQ ID NO: 31798 - protein, 407 aa, Neisseria meningitidis
MSGNASSPSSSSAIGLIWFGAAVSIAEISTGTLLAPLGWQRGLAALLLGHAVGGALFFAAAYIGALTGRSSMESVRLSFGKRGSVLFSVANMLQLAGWTAVMIYAGATVSSALGKVLWDGESFVWWALANGALIVLWLVFGARKTGGLKTVSMLLMLLAVLWLSAEVFSTAGSTAAQVSDGMSFGTAVELSAVMPLSWLPLAADYTRHARRPFAATLTATLAYTLTGCWMYALGLAAALFTGETDVAKILLGAGLGAAGILAVVLSTVTTTFLDAYSAGASANNISARFAETPVAVGVTLIGTVLAVMLPVTEYENFLLLIGSVFAPMAAVLIADFFVLKQREEIEGFDFAGLVLWLAGFILYRFLLSSGWESSIGLTAPVMSAVAIATVSVRLFFKKTQSLQRNPS

SEQ ID NO: 31799 - protein, 68 aa, Neisseria meningitidis; identical to SEQ ID NO: 7052

SEQ ID NO: 31800 - protein, 269 aa, Neisseria meningitidis; identical to SEQ ID NO: 15142

SEQ ID NO: 31801 - protein, 175 aa, Neisseria meningitidis
  misc_feature 169, 170: 'Xaa' is any amino acid
LDLYKLGYKQHTRTDAEGYIEKLHITPANAHECKHLSPLLEGIAEGTTVYADKGYDSAENRQHLEEHQLLDGIMRKACRNRPLTETQTKRNRYLSKTRYSGLNLNQDKATKPQTVQIVRQGEATPYWFKFNPLYVVEQSFGTLHRKFRYARAAYFGLIKVSAQSHLKAXXTHLIN

SEQ ID NO: 31802 - protein, 628 aa, Neisseria meningitidis
MIYPKTYDVIVVGGGHAGTEAALAAARMGAQTLLLTHNIETLGQMSCNPSIGGIGKGHLVRELDALGGAMALATDKSGIQFRRLNASKGAAVRATRAQADRILYKAAIREMLENQENLDLFQQAVEDVTLDGDRISGVITAMGVEFKARAVVLTAGTFLSGKIHIGLENYEGGRAGDPAAKSLGGRLRELNLPQGRLKTGTPPRIDGRTIDFSQLTEQPGDTPVPVMSVRGNAEMHPRQVSCWITHTNTQTHDIIRSGFDRSPMFTGKIEGVGPRYCPSIEDKINRFADKDSHQIFLEPEGLTTHEYYPNGISTSLPFDIQIALVRSMKGLENAHILRPGYAIEYDYFDPRNLKASLETKTIEGLFFAGQINGTTGYEEAAAQGLLAGANAVQYVREQDPLLLRREQAYLGVLVDDLITKGVNEPYRMFTSRAEYRLQLREDNADMRLTEDGYKIGLVGEEQWRMFNEKREAVEREIQRLKTTWYTPQKLAEDEQIRVFGQKLSREANLHDLLRRPNLDYGALMTLEGAMPSERLSAEVVEQVEIQVKYQGYIDRQNEEIDSRRDIETLKLPDDIDYSKVKGLSAEVQQKLNQHKPETVGQASRISGVTPAAVALLMVHLKRGFKDAK

SEQ ID NO: 31803 - protein, 85 aa, Neisseria meningitidis; identical to SEQ ID NO: 5543

SEQ ID NO: 31804 - protein, 171 aa, Neisseria meningitidis
LVTREVCEPRSWTVKTRIIQANVFRRHLNAMPSEHAAYADLTASSAKRLLCAKAILFSSAVRTGAAVGNIFFDGFADGGDFGDGAQYGFATFNAVDAASDSAGGIAGAAVLEIVEDEDFEGDLGSWADSVKMVRSSDGITVVPMPSETAAVQAFVPDGKIGYNIGHQCPTY

SEQ ID NO: 31805 - protein, 94 aa, Neisseria meningitidis; identical to SEQ ID NO: 27488

SEQ ID NO: 31806 - protein, 516 aa, Neisseria meningitidis
MKKPLISVAAALLGVALGTPYYLGVKAEESLTQQQKILQEAGFLTVESHQYERGWFTSTETTVIRLKPELLNNARKYLPDNLKTVLEQPVTLVNHITHGPFAGGFGTQAYIETEFKYAPETEKVLERFFGKQVPVSLANTVYFNGSGKMEVSVPAFDYEELSGIRLHWEGLTGKTVYQKGFKSYRNSYDAPLFKIKLADKGDAAFEKAHFDSETSDGINPLALGSSNLTLEKFSLEWKEGVDYNVKLNELVNLVTDLQIGAFINPNGSIAPSKIEVGKLAFSTKTGESGAFINSEGQFRFGTLVYGDEKYGPLDIHIAAEHLDASALTVLKRKFAQISAKKMTEEQIRNDLIAAVKGEASGLFTNNPVLDIKTFRFTLPSGKIDVGGKIMFKDLKKEDLNQLGLMLKKTEADIRMSIPQKMLEDLAVSQAGNIFSVNAEDEAEGRASLDDINETLRLMVDSTVQSMAREKYLTLNGDQIDTAISLKNNQLKLNGKTLQNEPEPDFDEGGMVSEPQQ

SEQ ID NO: 31807 - protein, 177 aa, Neisseria meningitidis; identical to SEQ ID NO: 3663

SEQ ID NO: 31808 - protein, 145 aa, Neisseria meningitidis; identical to SEQ ID NO: 2729

SEQ ID NO: 31809 - protein, 87 aa, Neisseria meningitidis; identical to SEQ ID NO: 932

SEQ ID NO: 31810 - protein, 481 aa, Neisseria meningitidis; identical to SEQ ID NO: 9781

SEQ ID NO: 31811 - protein, 223 aa, Neisseria meningitidis
MMKTFKNIFSAAILSAALPCAYAAGLPQSAVLHYSGSYGIPATMTFERSGNAYKIVSTIKVPLYNIRFESGGTVVGNTLHPTYYRDIRRGKLYAEAKFADGSVTYGKAGESKTEQSPKAMDLFTLAWQLAANDAKLPPGLKITNGKKLYSVGGLNKTGTGTYSIGGVETEVVKYRVRRGDDTVTYFFAPSLNNIPAQIGYNDDGKTYTLKLKSVQINGRAAKP

SEQ ID NO: 31812 - protein, 138 aa, Neisseria meningitidis; identical to SEQ ID NO: 774

SEQ ID NO: 31813 - protein, 820 aa, Neisseria meningitidis; identical to SEQ ID NO: 3719

SEQ ID NO: 31814 - protein, 144 aa, Neisseria meningitidis; identical to SEQ ID NO: 6

SEQ ID NO: 31815 - protein, 301 aa, Neisseria meningitidis
VARDFYKEYNPLFIKTYQSEHPGTSVSIQQSHGGSSKQALSVANGLQADVVTMNQSSDIDLLEKKGLVEKGWQQALPDHAAPYTSTMVFLVRKNNPKQIRDWNDLAKDGVNIVIANPKTSGNGRYAFLGAYGYGLKTTNGNEQEAQKLVASILKNTPVFENGGRAATTTFTQRNIGDVLITFENEANYVSKKLTQGQFEIVYPSYTISTESPVAVVNSVVAKKGTQKTARAYLEYLWSEPAQELAASLYLRPRNPEVLARHKADFPDLDTFSPEKKFGGWDNIMKTYFADGGIFDRLTAQK

SEQ ID NO: 31816 - protein, 92 aa, Neisseria meningitidis; identical to SEQ ID NO: 752

SEQ ID NO: 31817 - protein, 591 aa, Neisseria meningitidis
VAKTYLLTALIMSMTIFGCQVIHANQGKVNTHSAVITGADAHTPEHATGLTEQKQVIASDFMVASANPLATQAGYDILKQGGSAADAMVAVQTTLSLVEPQSSGLGGGAFVLYWDNTAKTLTTFDGRETAPMRATPELFLDKDGQPLKFMEAVVGGRSVGTPAIPKLMETIHQRYGVLPWGKLFDTPIRLAKQGFEVSPRLAISVEQNQQHLARYPKTAAYFLPNGVPLQAGSLLKNLEFADSVQALAAQGAKALHTGKYAQNIVSVVQNAKDNPGQLSLQDLSDYQVVERPPVCVTYRIYEVCGMGAPSSGGIAVGQILGILNEFSPNQVGYDAEGLRLLGDASRLAFADRDVYLGDPDFVPVPIRQLISKDYLKHRSQLLEQSDKALPSVSAGDFIHEWVSSQAIELPSTSHISIVDKAGNVLSMTTSIENAFGSTLMANGYLLNNELTDFSFEPIKQGKQVANRVEPGKRPRSSMAPTIVFKAGKPYMAIGSPGGSRIIGYVAKTIVAHSDWNMDIQDAISAPNLLNRFGSYELETGTTALQWQQALNDLGYKTDVRELNSGVQAIIIEPSRLVGGADPRREGRVMGD

SEQ ID NO: 31818 - protein, 369 aa, Neisseria meningitidis
MFSDTDISMMENALRLAALGRFSTSPNPRVGCVIAHGSQIVGQGFHVKAGEPHAEVHALRQAGEMAQGATAFVTLEPCSHYGRTPPCAEALVRAGVSRVVAAMRDPNPLVAGKGLALLEAAGIKTECGLLEHQARELNRGFLSRIERRRPFVRLKCAVSLDGKTALSDGSSFWITGEDARADVQVLRAESCAVLTGIGTVLADNPRLNVRAFPTLRQPARIVLDSRLRLPPNSHLVTDGQSPTYIATLERNEDRLHPYREHAHVRILMPSETADSKIDLHHLMRLLADEGFGEIMVEAGSELTSAFLAENLADEIVLYRSPKILGSGKDLLSLPENRAALSAPPLWTPVSSEILGHDIKTVFRKNDNAF

SEQ ID NO: 31819 - protein, 415 aa, Neisseria meningitidis; identical to SEQ ID NO: 15479

SEQ ID NO: 31820 - protein, 163 aa, Neisseria meningitidis; identical to SEQ ID NO: 26039

SEQ ID NO: 31821 - protein, 638 aa, Neisseria meningitidis
MAKVIGIDLGTTNSCLAISENGQTKVIENAEGARTTPSVIAYLDGGEILVGAPAKRQAVTNAKNTIYAAKRLIGHKFEDKEVQRDIESMPFEIIKANNGDAWVKAQGKELSPPQISAEVLRKMKEAAEAYLGEKVTEAVITVPAYFNDSQRQATKDAGRIAGLDVKRIINEPTAAALAFGMDKGDNKDRKVAVYDLGGGTFDISIIEIANLDGDKQFEVLATNGDTFLGGEDFDQRLIDHIIAEFKKEQGIDLKQDVMALQRLKEAAEKAKIELSSGQQTEINLPYITMDATGPKHLAMKITRAKFESLVEDLIARSIEPCRTALKDAGLSTGDIDDVILVGGQSRMPKVQEAVKDFFGKEPRKDVNPDEAVAVGAAIQGEVLSGGRSDVLLLDVTPLSLGIETMGGVMTKLIQKNTTIPTKASQVFSTAEDNQSAVTIHVLQGERERASANKSLGQFNLGDIAPAPRGMPQIEVTFDIDANGILHVSAKDKGTGKAANITIQGSSGLSEEEIERMVKDAEANAEEDKKLTELVASRNQAEALIHSVKKSLADYGDKLDAAEKEKIEAALKEAEEAVKGDDKAAIDAKAEALGTASQKLGEMVYAEAQAGESEQANASAKKDDDVVDADFEEVKDDKK

SEQ ID NO: 31822 - protein, 84 aa, Neisseria meningitidis
MKTLEKRMKALDKRMMKLGKSLEGRLDARLIESALDYIHYSERFLAFEILCTYIEDFDIRLTEQESQEISFIDKEFRTESMLDY

SEQ ID NO: 31823 - protein, 77 aa, Neisseria meningitidis; identical to SEQ ID NO: 760

SEQ ID NO: 31824 - protein, 221 aa, Neisseria meningitidis; identical to SEQ ID NO: 9745

SEQ ID NO: 31825 - protein, 179 aa, Neisseria meningitidis
MARLREFYKETVVPELVKQFGYKSVMEVPRIEKITLNMGVGEAVADKKVMEYAVSDLEKIAGQKPVVTVARKSIAGFKIRDNYPVGCKVTLRRDQMFEFLDRLITIALPRVRDFRGVSGKSFDGRGNYNMGVREQIIFPEIEYDKIDALRGLNITITTTAKTDEEAKALLSLFKFPFKG

SEQ ID NO: 31826 - protein, 303 aa, Neisseria meningitidis
MVHIMFNQAAQELTTIRDILRFAVSRFNEAGLFFGHGTDNAHDEAAYLILHTLNLPLDMLAPYLDAKLLEAEKEEVLTVIERRAVEHIPAAYLTHQAWQGEFDFYVDERVIIPRSFIYELLGDGLRPWIEYDELVHNALDLCTGSGCLAIQMAHHYPDAQIDAVDVSLDALEVAGINVEDYGLEERIRLIHTDLFEGLEGTYDLIVSNPPYVDAESVELLPEEYLHEPELALGSGADGLDATRQILLNAAKFLNPKGVLLVEIGHNRDVLEAAYPELPFTWLETSGGDGFVFLLTREQLLGEE

SEQ ID NO: 31827 - protein, 96 aa, Neisseria meningitidis
MDDLILYFLSGIFGNQVAEYIIKNNRDIKVPFIVLYAIFFTLIYTVTLLFLSLIYWVNGAEIAWKGIGIFSMSVSFCIVFCLYLIDKAGRCKDKKQ

SEQ ID NO: 31828 - protein, 133 aa, Neisseria meningitidis
MRTIKYLAMALLLMFTVAGCQLAGWYPCPSLSGWCKPRKPAAIDFWDIGGESPPSLEDYEIPLSDGNRSIRVNEYESAQQSYFYRKIGKFEACGLDWRTRDGKPLIETFKQEGFNCLKKQGLRRNGLSERVRW

SEQ ID NO: 31829 - protein, 101 aa, Neisseria meningitidis; identical to SEQ ID NO: 705

SEQ ID NO: 31830 - protein, 426 aa, Neisseria meningitidis
MTASKSGFIGQIFSRNMLVCIFTGFTSGLPLYFLINLIPAWLRSEQVDLKSIGLMALIGLPFTWKFLWSPLMDAVRVPILGRRRGWMLLTQAGLLAALAAYAFLNPRNHLPLIAGLSVLVAFFSASQDIVLDAFRREILSDEELGLGNSVHVNAYRIAALIPGSLSLVLADRMPWSEVFVITSLFMLPGLLMTLFLAREPVLPPAVPKTLKQTVVEPFKEFFTRKGIASAVCVLLFIFLYKLGDSMATALATPFYLDMGFSKTDIGLIAKNAGLWPAVAAGILGGVWMLKIGVNKALWLFGAVQAVTVLGFVWLAGFGHFDTVGTGERLMLAAVIGAEAVGVGLGTAAFVSYMARETNPAFTATQLALFTSLSAVPRTVINSFAGYLIEWLGYVPFFQLCFALALPGMLLLKVAPWNGEKTQDAGR

SEQ ID NO: 31831 - protein, 216 aa, Neisseria meningitidis
MPVTRPAKINTYTRIIDASLALFNEEGERNISTNHIAAHLGISPGNLYYHFRNKDEIIVQLFKRYSEALLEYLNEAVLPSDVEDSINYMAGIYDVMWEYRFLFSDVNTLLARSAELLGEHNTFTQAKVSPLLVNLLTQLNGLNIIQADQTAMNDLAVNMWMITKYWFDFDSSLRGRTKLTEDSKARGIRRTLSLLRPYLLPEHRKKYDRKIGNGNP

SEQ ID NO: 31832 - protein, 217 aa, Neisseria meningitidis; identical to SEQ ID NO: 3771

SEQ ID NO: 31833 - protein, 251 aa, Neisseria meningitidis
MGRLLLGSIRMSIIVENLTVSYRRRPAVHHVDITFEEHSMWAVFGPNGAGKSTFLKSLMGLQPIDTGSIRLDGLTRQNIAYLPQQSDIDRSQPMTVFDLAAMGLWYEIGFFKGINTAQKQRVHEALERVGMRQFARRQIAHLSNGQFQRVLFARMLVQNAKFLLLDEPFNAVDARTTYELLDVLQKCHCGGHAIIAVLHDYEQVRAYFPNTLLLAREKIAAGATETILTEPYLAQANAKMQQQESPEWCAS

SEQ ID NO: 31834 - protein, 375 aa, Neisseria meningitidis
MYTFRPFPKLHTETHIMNIQNIRTLLDTVAVPNTARTLGGEKAVRSVEQRSDGIHIALHFGFPVAHIASETADRIQEILMPLTGDTHIHLSMDTEIGTHKVQPGVTTIKGVKNIIAVASGKGGVGKSTTTANLAAAMARMGARVGVLDADLYGPSQPTMLGVDDRKPDQKNQKLIPVESSDGIQVMSIGFLVDTDQAVVWRGPMVSQALQQLMFQSEWDEVDYLFIDLPPGTGDIQLTLSQRIPVTGSVIVTTPQDIALIDARKAVDMFRKVNIPILGVLENMSVHICTNCGHSEALFGTDGGKDLAARLNVPLLGQLPLSLPVREAMDGGTPAQLFDEHPGIAKIYTDAAFQIALGIADKGKDFSSRFPKIVVE

SEQ ID NO: 31835 - protein, 348 aa, Neisseria meningitidis
MEARPPRANEAQAPRADEMKKESRPAFDAAAVFDAAAVPVSDSGFAANANVRRFVDDEVGKGDFSRAEWQDFFDKAAYKADIVKIMHRPSTSRPWYVFRTGNSGKAKFRGARRFYAENRALIDDVAQKYGVPAELIVAVIGIETNYGKNTGSFRVADALATLGFDYPRRAGFFQKELVELLKLAKEEGGDVFAFKGSYAGAMGMPQFMPSSYRKWAVDYDGDGHRDIWGNVGDVAASVANYMKQHGWRTGGKILVSATLAPGADVQAIIGEKTALTRTVADLKAYGIIPGEELADDEKAVLFKLETAPGVFEYYLGLNNFYTVWQYNHSRMYVTAVRDIANSLGGSGL

SEQ ID NO: 31836 - protein, 704 aa, Neisseria meningitidis
MFLFSDGLQSINNNNRRKRIVKNAYIPSRGIRKIPHLSTLLPEFHIYKDGKGAEAVVGWGLRPTTHKARAFATEHQLPFIALEDGFLRSLGLGVAGYPPYSIVYDDIGIYYDTTRPSRLEQLILAADTMPSETLAQARQAMDFILQHHLSKYNHAPELSDDHPLRSPSKPETVLIIDQTFGDMAIQYGGADASTFELMFQTALNENPQADIWVKTHPDVLCGKKQGYLTQLAQQHRVHLLAEDINPISLLQNVDKVYCVTSQMGFEALLCGKPLTTFGLPWYAGWGVSDDRHPEINRLVQTQRRATRNLLQLFAAAYLQYSRYLNPNTGEAGSLFDVIDYLATVKRKNDKLRGELYCVGMSLWKRAVAKPFFNVPSCRLKFISSTQKLARVKLSDDARILAWGNGKEAIVRFAEQHHIPLLRMEDGFIRSVGLGSNLVPPLSLVTDDMSIYFNAETPSRLEYILQNQNFDDQDFQTALKLQKMLTENHISKYNVGSSDFTAPSTDKTVILVPGQVEDDASIRYGSPQIYRNLDLLRTVRERNPNAYIIYKPHPDVVSGNRIGHISPEDAARYADQTAEQADILTCLQYADEIHTMTSLTGFEALLRGKKVSCYGLPFYAGWGLTQDLLPIPRRSRRLELWQLIAGTLIHYPDYIHPETHQAINAETAAQILIRQKNMQKNNNGLHRGYFAKKLGKIKQLYRSFK

SEQ ID NO: 31837 - protein, 97 aa, Neisseria meningitidis; identical to SEQ ID NO: 1875

SEQ ID NO: 31838 - protein, 121 aa, Neisseria meningitidis; identical to SEQ ID NO: 1070

SEQ ID NO: 31839 - protein, 144 aa, Neisseria meningitidis; identical to SEQ ID NO: 14860

SEQ ID NO: 31840 - protein, 275 aa, Neisseria meningitidis
LRCFMERIDLALNLVKERSRLGYSRKNFAEQTGCSAESLRLYESGQVNIPADFLLAAVQLGVDIQFVFTGIHSANLNAVSDDLNKKLDDAIGKSNVENQINGNVSNAVIASSGSVVHQINTQNHVIRTRVDSKPGKEHITLEQASKLQQLVKQVAAAEEIAKRSPKSIRAIWASLNAHCKVPSYKLIALSDYDKAETYLRKWLGRLSNTATSKNNDPDWRKKKYAYIKLNVKQLELEDWLKSYLEKNFSVESLTELSDEDLQKTYAAVSTKKRKK

SEQ ID NO: 31841 - protein, 655 aa, Neisseria meningitidis; identical to SEQ ID NO: 15146

SEQ ID NO: 31842 - protein, 182 aa, Neisseria meningitidis
VSQNTPIKPWYKHVWPWILMAGPIFVVIASVAMFFVAQQHATDLVTDDYYKDGKHIDIQLHRDEEAVRRHIGVQVLISPDMNAAKVFVGGEFDGKQPLNLLLMHPTRKADDQTVALKPVGSAQNGRAEYEAVFKTLPPTNHWYVRVEDAAGVWRVENKWITSQGNAVDLTPMDKLFNNTESK

SEQ ID NO: 31843 - protein, 61 aa, Neisseria meningitidis; identical to SEQ ID NO: 965

SEQ ID NO: 31844 - protein, 78 aa, Neisseria meningitidis; identical to SEQ ID NO: 3909

SEQ ID NO: 31845 - protein, 506 aa, Neisseria meningitidis
MQLIDYSHSFFSVVPPFLALALAVITRRVLLSLGIGILVGVAFLVGGNPVDGLTHLKDMVVGLAWSDGDWSLGKPKILVFLILLGIFTSLLTYSGSNQAFADWAKRHIKNRRGAKMLTACLVFVTFIDDYFHSLAVGAIARPVTDKFKVSRTKLAYILDSTAAPMCVLMPVSSWGASIIATLAGLLVTYKITEYTPMGTFVAMSLMNYYALFALIMVFVVAWFSFDIGSMARFEQAALNEAHDETAVSDGSWGRVYALIIPVLALIASTVSAMIYTGAQASETFSILGAFENTDVNTSLVFGGTCGVLAVVLCTLGTIKTADYPKAVWQGAKSMFGAIAILILAWLISTVVGEMHTGDYLSTLVAGNIHPGFLPVILFLLASVMAFATGTSWGTFGIMLPIAAAMAVKVEPALIIPCMSAVMAGAVCGDHCSPISDTTILSSTGARCNHIDHVTSQLPYALTVAAAAASGYLALGLTKSALLGFGTTGIVLAVLIFLLKDKKRANA

SEQ ID NO: 31846 - protein, 469 aa, Neisseria meningitidis
MMKNRVTNIHFVGIGGVGMSGIAEVLHNLGFKVSGSDQARNAATEHLGSLGIQVYPGHTAEHVNGADVVVTSTAVKKENPEVVAALEQQIPVIPRALMLAELMRFRDGIAIAGTHGKTTTTSLTASILGAAGLDPTFVIGGKLNAAGTNARLGKGEYIVAEADESDASFLHLTPIMSVITNIDEDHMDTYGHSVEKLHQAFIDFIHRMPFYGKAFLCIDSEHVRAILPKVSKPYATYGLDDTADIYATDIENVGAQMKFTVHVQMKGHEQGSFEVVLNMPGRHNVLNALAAIGVALEVGASVEAIQKGLLGFEGVGRRFQKYGDIKLPNGGTALLVDDYGHHPVEMAATLSAARGAYPEKRLVLAFQPHRYTRTRDLFEDFTKVLNTVDALVLTEVYAAGEEPIAAADSRALARAIRVLGKLEPIYCENVADLPEMLLNVLQDGDIVLNMGAGSINRVPAALLELSKQI

SEQ ID NO: 31847 - protein, 448 aa, Neisseria meningitidis
MSDNVPTIAAVATAPGRGGVGVIRISGKNLLPMAEALCGKTPKPRTATYADFTDADGQAIDSGLLLFFAAPASFTGEDVIELQGHGGPVVMDMLLNRCLELGARLAEPGEFTKRAFLNDKLDLAQAEGVADLIDASSRSAARLALRSLKGDFSRRIHGLVEDLITLRMLVEATLDFPEEDIDFLEAADARGKLDGLRRAVDDVLANAQQGAILREGLNVVLVGAPNVGKSSLLNALAGDEVAIVTDIAGTTRDAVRERILIDGVPVHIVDTAGLRETDDVVERIGIERSRKAVSEADVALVLVDPREGLNEKTRAILDALPPELKRIEIHSKSDLHAHAAGGFGTGAETVIALSAKTGDGLDALKRTLLREAGWQGEGEGLFLARTRHVNALKAAQEELSLAALCGNHQIELFAEHLRLAQVACGEITGEFTADDLLGVIFSRFCIGK

SEQ ID NO: 31848 - protein, 237 aa, Neisseria meningitidis; identical to SEQ ID NO: 5135

SEQ ID NO: 31849 - protein, 166 aa, Neisseria meningitidis
LPQCRLKPFRRHYPAKCSNNMPKATFYTHVAQVPIFTCRLIARAIRDGGRILVWSDSFGQLQELDKMLWQYEAESFIPHEIWETEEAMPSEPSVLLACGGNLPRIPEGMTVLNLSDGFWNTAPVLPARVLEIVGNSLEDLADARERFTAYRRSGFAIEHHGMEGKA

SEQ ID NO: 31850 - protein, 94 aa, Neisseria meningitidis; identical to SEQ ID NO: 387

SEQ ID NO: 31851 - protein, 487 aa, Neisseria meningitidis
MVIFYFCGKTFMPARNRWMLLPLLASAAYAEETPREPDLRSRPEFRLHEAEVKPIDREKVPGQVREKGKVLQIDGETLLKNPELLSRAMYSAVVSNNIAGIRVILPIYLQQAQQDKMLALYAQGILAQTDGRVKEAISHYRELIAAQPDAPAVRMRLAAALFDNRQNEAAADQFDRLKAENLPPQLMEQVELYRKALRERDAWKVNGGFSVTREHNINQAPKRQQYGKWTFPKQVDGTAVNYRLGAEKKWSLKNGWYTTAGGDVSGRVYPGNKKFNDMTAGVSGGIGFADRRKDAGLAVFHERRTYGNDAYSYTNGARLYFNRWQTPKWQTLSSAEWGRLKNTRRARSDNTHLQISNSLVFYRNARQYWMGGLDFYRERNPADRGDNFNRYGLRFAWGQEWGGSGLSSLLRLGAAKRHYEKPGFFSGFKGERRRDKELNTSLSLWHRALHFKGITPRLTLSHRETRSNDVFNEYEKNRAFVEFNKTF

SEQ ID NO: 31852 - protein, 281 aa, Neisseria meningitidis; identical to SEQ ID NO: 23847

SEQ ID NO: 31853 - protein, 1069 aa, Neisseria meningitidis
MFYLYQSNHLETLAALFARIQKVKPLKSALQPEQIIVQSQGMRRYLNTCLARDLGVAANLSFSLPAGLTWKLMKKLIPGIPELSPFAPEVMRWRLLDLFRSEAFRNTAEFEDVRNVLQDYLGSGESADYQLAGQLADIFDQYLVYRPQWIDAWQQGRRLGLGDDEIWQSKLWRYLDDGRQSAPHRVALWEKLLAALDKDKLPERYFVFGISTMAPMYLQLLHKLSEHCDVFVFALNPSGMYWGNVIEAAQILKGGGDPDLTQAGHPLLASLGKQGRDFFDFLNEMEIEGETPVFEEGGRDTLLHALQTDIQNLKMPSENVGSVNTGDGSIRIVSAHSPLRELQILKDKLLKILHEHPDWQPHDIAVLTPNIESYTPFIEAVFGQAQPGAQALPYSVSDVKISRRQPLFHALSCLFDLLESRFEVDKVLVLLETAPVLRRFGLTEDDLPLLHDMVADLNVRWGLDGEMRGGTDQLFTWKQAVERMILGWMLPEGGNPMWQDVSAWYADVNQTALFGRFAALLETLSDIVRIWQQPATVGEWVARCRDLLETLFQTEADDQKAVQNLENEWVKWQAETELAQFSGQLPPHTVIRHIRRFLDSESEAGFLRGGITFCSMVPMRSLPFKVICLLGLNDGDFPRNTKAAVFDLIAKHPAKGDRARRDDDRYLFLEALISAREILYLSYIGRDIRKDEELAPSSLLGELIDTVAAMAGIGSRQLAQNLIEQHPLQAFSRRYFQEGGRSDGIFGTRTDYAAALGQTPEPPQPFFDQSVENAEPVAEIGQDEFIRFWRNPVKVWLQQQLAWSEPHIGEAWEPAEPFEPQHADQIAETYIEARREGRDFAQTAARIGAESLLPSGELGRLWQQDFQTAAKQIDTAVLNSPKLPPLSYAIPSDGQILKGSLGNLYRCGQVFYAYGKPNAPQRIAFLLEHLIFCAVMPSEAETRQTFIVQSGETEILAEIAQDRALQLLLEWIAFFNIGQNRPLPFFAKTSLAAAEAFAQKQDWEAALKKAQTAYYGSKVSKGQKDYTEVALVFGNASQNPLEQPLFENLVRLLADTFAAAEKKEEAGAA

SEQ ID NO: 31854 - protein, 182 aa, Neisseria meningitidis; identical to SEQ ID NO: 125

SEQ ID NO: 31855 - protein, 452 aa, Neisseria meningitidis
MKPLDLNFICQALKLPMPSESKLVSRIVTDSRDSRAGDVFFALAGGRFDAHDFVEDVLAAGAAAVVVSREDCVAMDGALKVDDTLTALQMLAKAWRDNVNPFVFGITGSGGKTTVKEMLAAVLRRRFGDDAVLATAGNFNNHIGLPLTLLKLNEKHRYAVIEMGMNHFGELAVLTQIAKPNAALVNNAMRAHVGCGFDGVGDIAKAKSEIYQGLCSDGIALIPQEDANMAVFKTATLNLNTRTFGIDSGDVHAENIVLKPLSCEFDLVCGDERAAVVLPVPGRHNVHNAAAAAALALAAGLSLNDVAEGLKGFSNIKGRLNVKAGIKGATLIDDTYNANPDSMKAAIDVLARMPAPRIFVMGDMGELGEDEAAAMHAEVGAYARDQGIEAAYFVGDNSVEAAEKFGADGLWFAAKDPLIQVLRHDLPERATVLVKGSRFMQMEEVVEALEDK

SEQ ID NO: 31856 - protein, 739 aa, Neisseria meningitidis
MCKPNYGGIVLLPLLLASCIGGNFGVQPVVESTPTAYPVTFKSKDVPTSPPAGPSVETTPVNRPAVGAAMRLLRRNIATSDKDGNDFPNSRQAEEKLSFKEGDVLFLYGSKKDQRQQLEDEIRQRNPNVQIRTSENENKKYGYNFVDAGYVYVKGEDEIERTSNYKYFTHRFGYDGFVYYSGEHPSQSLPSAGTVKYFGNWQYMTDAIRHRTGKAGDPSEDLGYLVYYGQNVGATSYAATADDREGEGKHPAEYTVDFDKKILEGKLIKNQYVQRKTDQKKPLTIYNITAKLDGNRFTGSASVNPDLAKNHANKEHLFFHTNADQRLEGGFFGDNGEELAGRFISNDKSVFGVFAGKQKTETANASDTNPALPSGKHTKILDSLKISVDEASDKNPREFAISSMPDFGHPDKLLVEGREISLVKDTQTIDLADGRKMTVSACCDFLTYVKLGRIKTDRPAAKPKAQDEEDSGINNGEESEDEDEVVEEEAEEEADEAEADEAEDEEAEEIEEEAEEEETEEKSPAEGNGGSGSILPAPEAPKGRDIDLFLKGIRTAETNIPQTGKAHYTGTWEARIGTPIQWDNQADKEAAKAKFTVDFGGKSISGTLTEENGVEPAFYIEKGVIDGNGFHATAHTRDTGINLSGTGSTNPQRFKASNLRVEGGFYGPQAEELGGIIFNNDGKSLGITEGTENKVDVDAEVDAEVDAEVDVDVEQLKPEAKPQFGVVFGAKKDNKEVEK

SEQ ID NO: 31857 - protein, 138 aa, Neisseria meningitidis; identical to SEQ ID NO: 489

SEQ ID NO: 31858 - protein, 165 aa, Neisseria meningitidis
MRKSRLSRYKQNKLIELFVAGVTARKAAELVGVNKNTAAYYFHRLRLLIYQNSPHLEMFDGEVEVDESYFGGQRKGKRGRGAADKVAVFGLLKRNGKVYTVTVPNTQTATLFPIIREQVKPDSIVYTDCYRSYDVLDVREFSHFSFAETSFSYQSQPPFCTTKPY

SEQ ID NO: 31859 - protein, 165 aa, Neisseria meningitidis
MRKSRLSRYKQNKLIELFVAGVTARKAAELVGVNKNTAAYYFHRLRLLIYQNSPHLEMFDGEVEVDESYFGGQRKGKRGRGAADKVAVFGLLKRNGKVYTVTVPNTQTATLFPIIREQVKPDSIVYTDCYRSYDVLDVREFSHFSFAETSFSYQSQHTFCTTKPY

SEQ ID NO: 31860 - protein, 751 aa, Neisseria meningitidis
MGQYKKLWYLLFAVLAVCFTILGYMGSEVYKKAPPYPEQVVSASGKVLMTKDDILAGQSAWQTTGGMEVGSILGHGAYQAPDWTADWLHRELSAWLDLTAQQTYGKKFDEVSPEEQAVLKTRLADEYRNQSRVKEDGSVVISDTRVKAIESILPYYHGVYGDDPKLQTTREHFAMKNNTLPSQEAREKLFDFFFWTSWSASTNRPDETFTYTNNWPHEPLINNVPTTENYMWSFTSVVLLLMGIGLLMWGYSFLTKHEEVEVPSEDPISKIQLTPSQKALGKYVFLTVALFVVQVLLGGLTAHYTVEGQGFYGIDEALGFEMSDWFPYALTRTWHIQSAIFWIATGFLTAGLFLAPIVNGGKDPKFQRAGVNFLYIALFIVVGGSYAGNFFALTHILPPEFNFWFGHQGYEYLDLGRFWQLLLMVGLLLWLFLMLRCTVSAFKEKGVDKNLLAIFVASMVGVGVFYAPGLFYGEKSPIAVMEYWRWWVVHLWVEGFFEVFATAAFAFVFYNMGFVRRSTATASTLAAAAIFMLGGVPGTLHHLYFSGSTSASMAIGACFSALEVVPLVLLGREAYEHWSYQHLSDWAKRLRWPLMCFVAVAFWNMIGAGVFGFLINPPISLFYIQGLNTSAVHAHAALFGVYGFLALGFVLLVARYLKPNAQFDDKLMTWGFWLLNGGLVGMIAISLLPVGAIQAYASITHGLWYARSEEFLQMEILDTLRWVRTAADLVFIGGAICVAIQATKIVFGRDK

SEQ ID NO: 31861 - protein, 150 aa, Neisseria meningitidis; identical to SEQ ID NO: 3757

SEQ ID NO: 31862 - protein, 168 aa, Neisseria meningitidis; identical to SEQ ID NO: 5003

SEQ ID NO: 31863 - protein, 328 aa, Neisseria meningitidis
VSGAESYRHITVLLNEAVDALAVREDGVYVDGTFGRGGHSRLILSRLGDAGRLIVFDKDPQAIAVAEELARSDKRVGVVHGGFASFQTALDGLGIGKVDGALFDLGISSPQIDDGSRGFSFRFDAPLDMRMDTTRGMSAAEWIAVVSEQDLHEVIKNYGEERFSRQIARAIVAQRAESPIDTTRKLAQIVAQNVRTRERGQDPATRTFQAVRIFINRELEEVGAVLPQVMCRLKEGGRLAVIAFHSLEDRIVKQFVKKYSQHAPLPRWAAVREADLPELPLKIVGRALKPGEAEIAANPRARSAVLRVAERTAGPIPEQSQRKTSEWQ

SEQ ID NO: 31864 - protein, 129 aa, Neisseria meningitidis
MLYKCKIKKLDNTIEEAVLIEINGYELHCFISYCPFKIFENQFYEVELSYEIFNDYILDKSTSNIGFRKIDDSFKYEITAELKNNHLTLQNIQFEEDEYLVNYSYLDNCLVTLTADRISVSFIREIQAA

SEQ ID NO: 31865 - protein, 264 aa, Neisseria meningitidis
MMSEHRVNHEPVFLLASSPWRESSLRVEAFSRRYGRVALLARSARKRQSELRGVLVPFVPVSASWYGSQELKTLHRAEWGGGWRQPQGRALFSGLYVNELVLKLTAREDPMPELYDALAKVMEAVCREANHIADLRRFEWKLLNALGVAPDLHADGTGGDILADKTYRLMPEEAVMPVCEDADALSHEAGAIVEGQSLIDLREGSFRTAESLQQALKITRLFIRHLLPEGLKSRQVLEQIRQFDRKETARETVPTSDGTASNAV

SEQ ID NO: 31866 - protein, 172 aa, Neisseria meningitidis; identical to SEQ ID NO: 601

SEQ ID NO: 31867 - protein, 163 aa, Neisseria meningitidis
LKNHPPVAAFPSQEEMEHFMREALRQAEQSAADGEIPVGAVIVSDGKIIASAHNTCIADCNVSRHAEINALAQAGREIQNYRLDGCDIYITLEPCAMCASALIQARIRRVIYGAAEPKTGAAGSIVNLFADKRLNTHTAIRGGILQEECRAVLSRFFQNKRKG

SEQ ID NO: 31868 - protein, 262 aa, Neisseria meningitidis
MNHQDARWQVYRHLAEHTDQRLTLVRNAPKYILLAGADADISRSLLAKRYPQAVFEEYDSRADFLAAAAAARKGGFWQRFTGKGVVQHCQSPIAPLPEACADMLWSNLGLLAAEQILPVLHNWARALKTDGLLFFTCFGRDTFTELKCRLKENGIESRSVMFPDMHDLGDMLAENGFYDPVTDTAKLVLDYKKAETFWADMDTLGVWRAMAWNDENAARSCVGTIFEREGGLGITLETVYGHAVKKLMLPQGENVVQFFPKR

SEQ ID NO: 31869 - protein, 344 aa, Neisseria meningitidis
MSTSLSYRDAGVDIDAGDQLVENIKPFAKRTMRPEVLGDLGGFGALVEIGKKYQNPVLVSGTDGVGTKLKLAFDWDKHDTVGIDLVAMSVNDILVQGAEPLFFLDYFACGKLDVPRATDVIKGIAQGCEESGCALIGGETAEMPGMYPVGEYDLAGFAVGVVEKENVITGRSIGAGDVVLGLASNGAHSNGYSLIRKIIERDNPDLDAEFDNGKTLREAVIAPTRLYVKPILAALEKFTIKGMAHITGGGITENVPRVLPENTVAQIDAESWELPKLFQWLQKAGNVETQEMYRTFNCGIGMVVIVAAEDADAVQGLLGEQGETVYRLGLIRERQGDEHQTQVA

SEQ ID NO: 31870 - protein, 105 aa, Neisseria meningitidis; identical to SEQ ID NO: 7739

SEQ ID NO: 31871 - protein, 305 aa, Neisseria meningitidis
VKKTKVHLISGFLGTGKTTALKSLMAQKDPNEKWVIIVNEFGEIGIDGAVLSDNGIPVAEIAGGCLCCTAGPQMGVTVQKMLRDAKPDRLMIEASGLAHAASVIDELKAKPLDSLLEIGAVFTVVDPRQFINPDYAQQALYKDQIGICDILVASKTDLCTPEQLVEFHDKAAKLFPPKAKVVEVRNAQLDIQWLDIPVIEKSRYRLKALPDNTMGFQSQGFTFPAGRDFDGEKLTNFFNDLPKMTEGLVRAKGVFQVLGTWVWLNWVDGQWGANQVSWRRDSRFELIAKSFDADLIEQKLKDALE

SEQ ID NO: 31872 - protein, 128 aa, Neisseria meningitidis; identical to SEQ ID NO: 723

SEQ ID NO: 31873 - protein, 109 aa, Neisseria meningitidis
MFDGEVEADESYFGGQRKGKRGGGAAGKVAVFGLLKRNGKVYTVTVPNTQTATLFPIIREQVKPDSIVYTDCYRSYDVLDVSEFSHFSFAETSFSYQSQHTFCRTTKPY

SEQ ID NO: 31874 - protein, 161 aa, Neisseria meningitidis; identical to SEQ ID NO: 1189

SEQ ID NO: 31875 - protein, 57 aa, Neisseria meningitidis; identical to SEQ ID NO: 735

SEQ ID NO: 31876 - protein, 131 aa, Neisseria meningitidis; identical to SEQ ID NO: 1281

SEQ ID NO: 31877 - protein, 436 aa, Neisseria meningitidis; identical to SEQ ID NO: 1523

SEQ ID NO: 31878 - protein, 201 aa, Neisseria meningitidis; identical to SEQ ID NO: 3703

SEQ ID NO: 31879 - protein, 573 aa, Neisseria meningitidis
MPSEAICSKKTMLNKDQFADNHFIRTIIEDDLKSGKHEAVQTRFPPEPNGYLHIGHAKSICLNFGLAYIYDGLCNLRFDDTNPEKENDEYVNAIKEDVEWLGFHWAGEPRFASNYFDQLYDYAVGLVKDGKAYVDDLTPEEMREYRGTLTEAGKNSPYRDRSIEENLDLFTRMKNGEFPDGSKTLRLKIDMASGNINMRDPVIYRIRRAHHHNTGDKWCIYPMYDYTHCISDAIEGITHSLCTLEFEAHRPLYDWVLDNIPAPHATRPRQYEFSRLELLYTITSKRKLNQLVVEKHVSGWDDPRMPTISGMRRRGYTPEGLRLFAKRAGISKSENIVDMSVLEGAIREELENSAPRLMAVLNPLKVTLTNFEAGKTQSRRAPFHPNHEEMGDREIPVSQTIYIEADDFAENPPKGFKRLIPGGEVRLRHGYVIKCDEVVKDEAGNVVELKCSIDHDTLGKNPEGRKVKGVIHWVSAEHAAEIKVRLYDRLFTVERPDAVRGEDGEYLPFTDFLNPESVKEITAYAEPAAKDLPAESRWQFERIGYFVTDRKDHGKDTPVFNRTVTLKDSWQPK

SEQ ID NO: 31880 - protein, 134 aa, Neisseria meningitidis
MRKSRLSRYKQNKLIELFVAGVTARTAAELVGVNKSTAAYYFHRLRLLIYQNSPHLEMFDGEVEADESYFAERQNHINGIENFWNRAKRHLRKFNGIPKAHFELYLKGYERRFNNSEIKVQISILKQLVKSSLS

SEQ ID NO: 31881 - protein, 581 aa, Neisseria meningitidis; identical to SEQ ID NO: 1839

SEQ ID NO: 31882 - protein, 56 aa, Neisseria meningitidis; identical to SEQ ID NO: 3693

SEQ ID NO: 31883 - protein, 122 aa, Neisseria meningitidis; identical to SEQ ID NO: 3754

SEQ ID NO: 31884 - protein, 160 aa, Neisseria meningitidis; identical to SEQ ID NO: 1377

SEQ ID NO: 31885 - protein, 613 aa, Neisseria meningitidis
MRTNYLSETDSIMKKLICLFAVFLMLCGRAFALDANDLLPPEKAFVPELAVADDGVNVRFRIADGYYMYQAKIVGKTDPADLLGQPSFSKGEEKEDEFFGRQTVYHHEAQVAFPYAKAVGEPYKLVLTYQGCAEVGVCYPPVDTEFDISGNGTYHPQTDEPASAKDRFLQPSSQNGSGALPPPKGDEGGDSRFKLSWDTLNANLLAFFLAGLGLSFTACMYPLLPIVSSIVVGDKKAGKARAFVLSVVYVQGLALTYTLVGIVAGLTGALLTVWLQQAWVVLAASALMVVLALSMFGLFNIQLPNAVQSYFQNQSSRLSGGKIVSVFIMGILSALIVGPCVAPPLAFALGYIGQTGDAVLGGLALYTLALGTGVPLIAIGTFGGHILPKAGDWMNAVKYAFGFILLAVAVYLATPHLPYYLVVALYTLLMLVPACMLLVNGRRQKRRPKAVAFVLGGILLIGGAWFGWQGANGKTTALHHFLTLNPPAEAGKSSEHGKMFADTAALKAAMDTALKEHPDKPVVLDFYADWCISCKEMAAYTLNQPEVHQAVDMERFFQIDVTANMPEHQALLKEYGLFGPPGVFVVRSDGSRSEPLLGFVKADKFIEWYEQNR

SEQ ID NO: 31886 - protein, 289 aa, Neisseria meningitidis
MKERIVGQSGELFCFGQMPVWKVENLPEILLSGYSSEEGEWVCLNVLQGDVEVRAPDGAAEVWSAESGDCVFAPQQVFSVKPKTDDAEIRLSLYCAAADYFHKKYGMSATHSAVAAAQDTVPAGRALDMGCGQGRNALFLGLKGFEVTAVDHNPAALANVAELAEAEGLNVRTLEYDLNAAALQGEFDYIVATVVLMFLMPQRVPDVIADMQAHTAAGGYNLIVSAMDTADFPCPMPFPFKFKEGELKDYYRDWELVEYKEELGAMHAKDENGNPIRFKFVTMLAKKPE

SEQ ID NO: 31887 - protein, 96 aa, Neisseria meningitidis; identical to SEQ ID NO: 5466

SEQ ID NO: 31888 - protein, 37 aa, Neisseria meningitidis; identical to SEQ ID NO: 3678

SEQ ID NO: 31889 - protein, 358 aa, Neisseria meningitidis; identical to SEQ ID NO: 9712

SEQ ID NO: 31890 - protein, 174 aa, Neisseria meningitidis
MEMKQMLLAVGVVAVLAGCGKDAGGYEGYWREKSDKKEGMIAVKKEKGNYFLNKINVFTGKEESMLLSEKDGALSINTGIGEIPIKLSDDGKELYVERRQYVKTDAAMKDKIIAHQKKCGQTAQAYLDARKALPSNQTYQQRQAAIEQLKRRFEAEFDELEKEIKCNGKPTLLL

SEQ ID NO: 31891 - protein, 460 aa, Neisseria meningitidis; identical to SEQ ID NO: 9764

SEQ ID NO: 31892 - protein, 68 aa, Neisseria meningitidis; identical to SEQ ID NO: 5814

SEQ ID NO: 31893 - protein, 97 aa, Neisseria meningitidis; identical to SEQ ID NO: 2609

SEQ ID NO: 31894 - protein, 193 aa, Neisseria meningitidis; identical to SEQ ID NO: 640

SEQ ID NO: 31895 - protein, 98 aa, Neisseria meningitidis; identical to SEQ ID NO: 1735

SEQ ID NO: 31896 - protein, 169 aa, Neisseria meningitidis; identical to SEQ ID NO: 3746

SEQ ID NO: 31897 - protein, 177 aa, Neisseria meningitidis; identical to SEQ ID NO: 5671

SEQ ID NO: 31898 - protein, 242 aa, Neisseria meningitidis; identical to SEQ ID NO: 9676

SEQ ID NO: 31899 - protein, 185 aa, Neisseria meningitidis
MKPKFKTVLTALLLAASLPSMAATHVLMETDMGNIRLVLDESKAPKTVANFVRYARKGFYDNTIFHRVIDGFVIQGGGFTEDLVQKATDKAVANESGNGLKNTAGIIAMARTADPDSATSQFFINLADNDSLNYKNGQYGYTVFGRVESGMNTVSKIARVKTATRGFYQNVPVQPVKIRRVVVGQ

SEQ ID NO: 31900 - protein, 250 aa, Neisseria meningitidis
MANQRPIYGFHAVNARLWQNPKSIVELYIQEGKSDARTREVLEKAANENIRVYFVDTTRLDAISKGARHQGVAGFIDASKNHVHLEDVLENLSEPPLLLILDGITDPHNLGACLRTADAMGVHAVISPKDKSAGLNATVSKVACGAAETVPYITVTNLARTLRELKEYGIWIIGTDMGGESDLYHCDLPDSAAWVMGNEGDGMRRLTREHCDMLVSIPMFGTVESMNVSVSAGMVLSETRRQRVLKNEKA

SEQ ID NO: 31901 - protein, 187 aa, Neisseria meningitidis
MPWNLPIFLTWLRVLLIPVMTALFYLPFPWFAEETINLAAAVIFAVAALTDWFDGFLARLWKQTSDFGAFLDPVADKLMVAVSLLLLVKLDRTYVLFAMIIIGREITISALREWMAQMGKRNSVAVATVGKFKTAAQMLAIFLLLLNIPDFYGFNLVVIGNILMFIASLLTVWSMLYYLKMAWKEIA

SEQ ID NO: 31902 - protein, 133 aa, Neisseria meningitidis; identical to SEQ ID NO: 6682

SEQ ID NO: 31903 - protein, 107 aa, Neisseria meningitidis
MNKIIKGDRVVVIAGKDKGKQGQVVRVLGDKVVVEGVNVVKRHQKPNPMRGIEGGIITKEMPLDISNIAILNPETNKADRVGIKLIENEGKVKRVRFFKSNGSIIGV

SEQ ID NO: 31904 - protein, 120 aa, Neisseria meningitidis; identical to SEQ ID NO: 1496

SEQ ID NO: 31905 - protein, 478 aa, Neisseria meningitidis; identical to SEQ ID NO: 13942

SEQ ID NO: 31906 - protein, 461 aa, Neisseria meningitidis
MMARDNRIQMFPHEWRASTTLSGVYALRMLGMFLVLPVLAVYAASLPGAEGNKTLVGLAMGIYGLTQALLQLPLGIASDKFGRKKTIYVGLIVFAAGSFLAAAADTLPMLVAARAIQGAGAVSAAVTALLADLTRDGVRTRAMAMIGLSIGLTFSVSLVVAPVIADAVGVRGLFLLTGILTVASIGVVAWMTPDPEVSKLHEDTQAQPSRIGEVLKNRRLLTLDFGIFALHAAQMALFTALPFAMTQLGLEKIQHWKVYLPSTITGLVVMVPLIIVGETRNKLKQVFILGIACIAAAQLGLLSGMRSVGLITAYLVVYFIGFNVLEASLPSMVSKIAPSDLKGTAMGVYNTMQSLGLFAGGVAGGLLFQKYGFSGVFAFCSILMLLWLVIAVLSPAPKPVKNLSYPVGGVWQVNQEVLYRALSELEGVEDIGFSFDGQTVYLKVLQKGFDQAAAEKIITGV

SEQ ID NO: 31907 - protein, 187 aa, Neisseria meningitidis; identical to SEQ ID NO: 784

SEQ ID NO: 31908 - protein, 206 aa, Neisseria meningitidis; identical to SEQ ID NO: 1193

SEQ ID NO: 31909 - protein, 436 aa, Neisseria meningitidis
MSVTVETLENLERKVVLSLPWSEINAETDKKLKQTQRRAKIDGFRPGKAPLKMIAQMYGASAQNDVINELVQRRFYDVAVAQELKVAGFPRFEGVEEQDDKESFKVAAIFEVFPEVVIGDLSAQEVEKVTASVGDAEVDQTVEILRKQRTRFNHVEREARNGDRVIIDFEGKIDGEPFAGGASKNYAFVLGASQMLPEFEAGVVGMKAGESKDVTVNFPEDYHGKDVAGKTAVFTITLNNVSEATLPEVDADFAKALGIADGDVAKMREEVQKNVSREVERRVNEQTKESVMNALLKAVELKAPVALVNEEAARLANEMKQNFVNQGMADAANLDLPLDMFKEQAERRVSLGLILAKLVDENKLEPTEEQIKAVVANFAESYEDPQEVIDWYYAEPSRLQAPTSLAIESNVVDFVLGKAKVNEKALSFDEVMGAQA

SEQ ID NO: 31910 - protein, 63 aa, Neisseria meningitidis
LPKFGECPLPNPPPRGRGQVAADFAVAGGLRKNARNINSGNFSGSLYRKADVTNAASVFSDDL

SEQ ID NO: 31911 - protein, 382 aa, Neisseria meningitidis; identical to SEQ ID NO: 9777

SEQ ID NO: 31912 - protein, 94 aa, Neisseria meningitidis; identical to SEQ ID NO: 3728

SEQ ID NO: 31913 - protein, 225 aa, Neisseria meningitidis
MKLKNKYQKFSKISEQKFREIIRCFALDLTASDTAKMTGISVRSINPIFLKIRHRIAALCEQSSPLSGVVELDESYFGARRIRGKRGRGASGKTIVFGILKRNGVVYTEIVPDASKASLIKVIRGHISADSEINTDGWKAYDGLVDMGYEKHYRVHHGSNEFARGKQHINGIESFWSYAKGRLAKFYGISKEMFYLHLKETEFRFNHRHEDLGKILMKMLRNNPI

SEQ ID NO: 31914 - protein, 118 aa, Neisseria meningitidis; identical to SEQ ID NO: 367

SEQ ID NO: 31915 - protein, 122 aa, Neisseria meningitidis; identical to SEQ ID NO: 848

SEQ ID NO: 31916 - protein, 728 aa, Neisseria meningitidis
LPRCLKQTVRHVMPSETGADAAKPSDGIACPLRPNNNHLWENLMPEQNRILCRELSLLAFNRRVLAQAEDKNVPLLERLRFLCIVSSNLDEFFEVRMAWLKRENKLHPRRRLDNGKMPSETIADVTEAARSLIRHQYDLFNNVLQPELAREGIHFYRRRNWTDTQKKWIEDYFDRELLPILTPIGLDPSHPFPRPLNKSLNFAVELDGTDAFGRPSGMAIVQAPRILPRVVPLPSELCGGGHGFVFLSSILHAHVGKLFPGMNVKGCHQFRLTRDSDLTVDEEDVQNLRAAIQNELHDREYGDGVRLEVADTCPAYIRDFLLAQFKLTAAELYQVKGPVNLVRLNAVPDLVDRPDLKFPPHTQGRLKALGKNGSIFKLIRRAPILLHHPYQSFNPVVEMMREAAADPAVLAVKMTIYRTGTRSELVRALMKAALAGKQVTVVVELMARFDEANNVNWAKQLEEAGAHVVYGVFGYKVHAKMALVIRREDGVLKRYAHLGTGNYHQGTSRIYTDFGIITADEQITADVNTLFMEITGLGKPGRLNKLYQSPFTLHKMVIDRIARETEHAKAGKPARITAKMNSLIEPTVIEALYRASAAGVQIDLIVRGMCTLRPGVKGLSENIRVRSIIGRQLEHARVYCFHNNGADDTFISSADWMGRNFFRRIETAAPITAPELKKRVIREGLEMALADNTHAWLMQPDGGYIRAAPAEGESEADLQNDLWTLLGG

SEQ ID NO: 31917 - protein, 275 aa, Neisseria meningitidis
MDGEGMSVGHYENFPVGSLILPRRLRKPVHAVYAFARTADDMADEGSMPSEARLAGLDALRRELDVLASGGRSAHPLIARLDAEAVVPFGLDLQPFYDLLSAFSQDVVKTRYAHFGELADYCRRSANPVGRIMLALYGKTDAVCVAQSDGICTALQLVNFWQDVAVDWQKGRVYIPQDDLLKFGVSEEQIAAGRADAAFQRLMAYECRRAFRMLKAGSPLARELNGRIGLELRMIVLGAQLILQKLDACRYDVFAQRPVLDKKDWLIMLKKALWK

SEQ ID NO: 31918 - protein, 124 aa, Neisseria meningitidis; identical to SEQ ID NO: 961

SEQ ID NO: 31919 - protein, 292 aa, Neisseria meningitidis; identical to SEQ ID NO: 3715

SEQ ID NO: 31920 - protein, 186 aa, Neisseria meningitidis; identical to SEQ ID NO: 9740

SEQ ID NO: 31921 - protein, 360 aa, Neisseria meningitidis
MPSEAASDGILPLYPTRTIFQKPIMLPFFPEPSLSYTQQNRTAVLLLNLGTPDAPTAQAVRPYLKSFLTDRRVVELPKWLWYPILHGLVLTLRPKKSAHAYEKIWFKEGSPLEVYTARQAAALAERMPDLIVRHAMTYGNPSVADVLSELKAQGAGRLLVIPMYPQYAASSSGAAVDKVCEQLLLQRNQMSVRTVSRFYDDTGYIDAMKNHILRYWAEHGRGKKLMLSFHGVPQKHYDLGDPYPDECRHTAKLLAEALELTEDQYVVSFQSQFGRAKWVTPSTQDLFGKLPKQGVTELDVFCPGFLADCLETMEEIALMGREQFYEAGGKSYRYIPCLNDNPDWIDALVALAEENLGGWR

SEQ ID NO: 31922 - protein, 384 aa, Neisseria meningitidis
LLEQDMSQNASVGIVTPQKIPFEVPLVLENGKTLPRFDLMIETYGELNAEKNNAVLICHALSGNHHVAGRHSAEDKYTGWWDNMVGPGKPIDTERFFVVGLNNLGGCDGSSGPLSINPETGREYGADFPVVTVKDWVKSQAALADYLGIGQWAAVVGGSLGGMQALQWAISYPERVRHALVIASAPKLSTQNIAFNDVARQAILTDPDFNEGHYRSHNTVPARGLRIARMMGHITYLAEDGLGKKFGRDLRSNGYQYGYGVEFEVESYLRYQGDKFVGRFDANTYLLMTKALDYFDPAADFGNSLTRAVQDVQAKFFVASFSTDWRFAPERSHELVKALIAAQKSVQYIEVKSAHGHDAFLMEDEAYMRAVAAYMNNVYKECQQ

SEQ ID NO: 31923 - protein, 489 aa, Neisseria meningitidis
LKAVIPHTGGYEMNEYSQLIKHPDISLSPISDGIGVGNPATGEILAYVRNTGSDKLKNLIQKAAAAQKLWAAKTALERADILWRWYFLVKENKEALARLMTMEQGKSLTESRGEIDYAASFVRWFAEEARRIDGDVLTSVKASQKLIVLKQPVGVTAAITPWNFPSAMIARKAAPALAVGCAMIVKPASLTPLSAYALVVLAYEAGVPQDLLPVVSGSASEIGHEFATNPIIRKISFTGSTEVGAKIFADSAADIKKLSLELGGNAPFIVFDDADLDKAVEGALASKFRNSGQTCVCTNRVYAQSAIYDEFCRKLSEKAAALKLGNGLEDGVNQGPLIEEKAVEKVEQHIADALAKGASCLTGGKRSALGGTFFEPTVLSGVTAQMAVAREETFGPLCPVFRFETEAEVIEAANNTEYGLAAYLFTADTARQWRVGEALEYGMVGINTGLISNEAAPFGGVKRSGLGREGSKYGADEYLELKYLCMDVG

SEQ ID NO: 31924 - protein, 514 aa, Neisseria meningitidis; identical to SEQ ID NO: 9767

SEQ ID NO: 31925 - protein, 117 aa, Neisseria meningitidis; identical to SEQ ID NO: 408

SEQ ID NO: 31926 - protein, 131 aa, Neisseria meningitidis
MMRRRGKKMLFEENPIDGHFTEYGHRSGEIRLAGQSFHKPVLVHKDSVCLSQCRTLSDLTPENLLSDIKPVDYPEILIIGTGAAQEFIHPKIMADFSRIGISVECMNTDSAFRTLVFLHSEGRRAWAWLQP

SEQ ID NO: 31927 - protein, 96 aa, Neisseria meningitidis; identical to SEQ ID NO: 4410

SEQ ID NO: 31928 - protein, 141 aa, Neisseria meningitidis; identical to SEQ ID NO: 3723

SEQ ID NO: 31929 - protein, 374 aa, Neisseria meningitidis
VCGLCHKTVSDPIAGASGDWKSCLKNVQWRTFLKRGSIMHIGGYFIDNPIALAPMAGITDKPFRRLCRDFGAGWAVCEMLTSDPTLRNTRKTLHRSDFADEGGIVAVQIAGSDPQQMADAARYNVSLGAQLIDINMGCPAKKVCNVQAGSALMQNEPLVAAILEAVVRAAGVPVTLKTRLGWHDDHQNLPVIAKIAEDCGIAALAVHGRTRTQMYKGEARYELIAETKCRLNIPVWVNGDITSPQKAQAVLKQTAADGIMIGRGAQGRPWFFRDLKHYAEHGVLPPALSLAECAAAILNHIRAIHAFYGDTAGVRIARKHIGWYIDEMPDGEQTRREINRLDSAAAQYDMLAGYLERLAEKTDSWACAYRPNAF

SEQ ID NO: 31930 - protein, 281 aa, Neisseria meningitidis
MNKFSQSGKGLSGFFFGLILATVIIAGILFYLNQSGQNAFKIPVPSKQPAETEILKPKNQPKEDIQPEPADQNALYEPDAATEAEQSDAEKAADKADEVEEKAGEPEREEPDGQAVRKKVLTEEREQTVGEKAQKKDAETVKKQAVKPSKETEKKASKEEKKAEKEKVAPKPTPEQILNSGSIEKARSAAAKEVQKMKTSDKAEATHYLQMGAYADRRSAEGQRAKLAILGISSKVVGYQAGHKTLYRVQSGNMSADAVKKMQDELKKHEVASLIRSIESK

SEQ ID NO: 31931 - protein, 480 aa, Neisseria meningitidis; identical to SEQ ID NO: 14474

SEQ ID NO: 31932 - protein, 317 aa, Neisseria meningitidis
MNHKKIVVLDADTLPGRAFHFDFPHELAVYGTTGADETAERVHDAHVVITNKVMISADIIAANPQLELIAVSATGVNNVDIGAAEAAGVAVCNVRAYGNESVAEHAFMLMIALMRNLPAYQRDVAAGLWEKSPFFCHYGAPIRDLNGKTLAVFGRGNIGRTLARYAQAFGMRVVFAEHKHAPDVREGYVSFEDAVRTADVLSLHCPLNAQTENMIGENELRQMKPCAVLINCGRGGLVDENALLAALKYGQIGGAGVDVLTEEPPRGGNPLLNARLPNLIVTPHTAWASREALDRLFDILLANIHAFVKGEAQNRVV

SEQ ID NO: 31933 - protein, 255 aa, Neisseria meningitidis; identical to SEQ ID NO: 23840

SEQ ID NO: 31934 - protein, 284 aa, Neisseria meningitidis
MSAQLINGKEVSQKRLQAVAEAVAQRQQDNLHTPCLAVVLVGGDPASAVYVRNKKTACQKCGIKSLSYELPESTSQEELLALVDRLNADSEVDGILVQLPLPKHLDSQAVLERISPDKDVDGFHPYNVGRLAVKMPLMRPCTPKGVMTLLEAYGIDPKGKKAVVVGASNIVGRPQALELLLARATVTVCHSATENLTDEVAGADILVVGVGIPNFVKGEWIKPGAVVIDVGINRLDDGSLCGDVEFETAKERAAMITPVPGGVGPMTIATLMENTLHAASLHDA

SEQ ID NO: 31935 - protein, 130 aa, Neisseria meningitidis; identical to SEQ ID NO: 1661

SEQ ID NO: 31936 - protein, 431 aa, Neisseria meningitidis
VIAMIYIVLFLAAVLAVVAYNMYQENQYRKKVRDQFGHSDKDALLNSKTSHVRDGKPSGGSVMMPKPQPAVKKTAKLQDPAMRNLQEQDAVYIAKQKQAKASPFKTEIETALEESGIIGNSAHTVSEPQTGHSAPKPADAPAKPVPVPQTPAKPLITLKELSKVELPWFDVRFDFISYIALTEAKELHALPRLSNRCRYQIVGCTMDDHFQIAEPIPGIRYQAFIVGIQAVSRNGLASQEELSAFNRQVDAFAQSMGGQTLHTDLAAFIEVASALDAFCARVDQTIAIHLVSPTSISGVELRSAVTGVGFVLEDDGAFHYTDTSGSTMFSICSLNNEPFTNALLDNQSYKGFSMLLDIPHSPAGEKTFDDLFMDLAVRLSGQLNLNLVNDKMEEVSTQWLKDVRTYVLARQSEMLKVGIEPGGKTALRLFS

SEQ ID NO: 31937 - protein, 72 aa, Neisseria meningitidis
MVKEDTIQMQGEILETLPNATFKVKLENDHIVLGHISGKMRMHYIRISPGDKVTVELTPYDLTRARIVFRAR

SEQ ID NO: 31938 - protein, 66 aa, Neisseria meningitidis; identical to SEQ ID NO: 587

SEQ ID NO: 31939 - protein, 122 aa, Neisseria meningitidis; identical to SEQ ID NO: 66

SEQ ID NO: 31940 - protein, 70 aa, Neisseria meningitidis; identical to SEQ ID NO: 5197

SEQ ID NO: 31941 - protein, 150 aa, Neisseria meningitidis; identical to SEQ ID NO: 13725

SEQ ID NO: 31942 - protein, 144 aa, Neisseria meningitidis; identical to SEQ ID NO: 3188

SEQ ID NO: 31943 - protein, 142 aa, Neisseria meningitidis
MAILKLDEHLYISPQLTKADAEQIAQLGIKTVICNRPDREEESQPDFAQIKQWLEQAGVTGFHHQPVTARDIQKHDVETFRQLIGQAESPVLAYCRTGTRCSLLWGFRRAAEGMPVDEIIRRAQAAGVNLENFRERLDNARV

SEQ ID NO: 31944 - protein, 104 aa, Neisseria meningitidis; identical to SEQ ID NO: 1772

SEQ ID NO: 31945 - protein, 105 aa, Neisseria meningitidis; identical to SEQ ID NO: 3792

SEQ ID NO: 31946 - protein, 248 aa, Neisseria meningitidis
MPDAVKKVYLIHGWGANRHVFDDLMPRLPATWPVSAVDLPGHGDAPFAQPFDIEAAADAVAAQIDTPADILGWSLGGLVALYLAARHPDKVRSLCLTASFARLTADEDYPEGLAAPALGKMVGAFRTDYAKHIKQFLQLQLLHTPDADGIIGRILPDLARCGTPSALQEALDAAERADARHLLDKIDVPVLLVFGGKDAITPPRMGEYLHRRLKGSRLVVMEKAAHAPFLSHAEAFAALYRDFVEGVL

SEQ ID NO: 31947 - protein, 119 aa, Neisseria meningitidis; identical to SEQ ID NO: 17866

SEQ ID NO: 31948 - protein, 442 aa, Neisseria meningitidis; identical to SEQ ID NO: 7737

SEQ ID NO: 31949 - protein, 124 aa, Neisseria meningitidis; identical to SEQ ID NO: 3797

SEQ ID NO: 31950 - protein, 392 aa, Neisseria meningitidis
MVMQIKCKFNWLVLMTATMVVGCSSLPTTGPSAKKVESLSQVSSETQIPEVELIDVNHAVAQSLYKAQVNQSFTQFGDGYASAGTLNIGDVLDIMIWEAPPAVLFGGGISSMGSGSAQQTKLPEQLVTARGTVSVPFVGDISVVGKTPGQVQEIIKGRLKKMANQPQVMVRLVQNNAANVSVIRAGNSVRMPLTAAGERVLDAVAAVGGSTANVQDTNVQLTRGNVVRTVALEDLVANPRQNILLRRGDVVTMITNPYTFTSMGAVGRTQEIGFSARGLSLSEAIGRMGGLQDRRSDARGVFVFRYTPLVELPAERQDKWIAQGYGSEAEIPTVYRVNMADAHSLFSMQRFPVKNKDVLYVSNAPLAEVQKFLSFVFSPVTSGANSINNLTN

SEQ ID NO: 31951 - protein, 405 aa, Neisseria meningitidis; identical to SEQ ID NO: 9801

SEQ ID NO: 31952 - protein, 308 aa, Neisseria meningitidis
MKVIFAGTPDFAAAALRAVAAAGFEIPLVLTQPDRPKGRGMQLTAPPVKQAALELGLRVEQPEKLRNNAEALQMLKEVEADVMVVAAYGLILPQDVLDAPKHGCLNIHASLLPRWRGAAPIQRAIEAGDAETGVCIMQMDIGLDTGDVVSEHRYAIRPTDTANEVHDALMEIGAAAVVADLQQLQSKGRLNAVKQPEEGVTYAQKLSKEEARIDWSESAAVIERKIRAFNPVPAAWVEYQGKPMKIRRAEVVAQQGAAGEVLSCSADGLVVACGENALKITELQPAGGRRMNIAAFAAGRHIEAGAKL

SEQ ID NO: 31953 - protein, 106 aa, Neisseria meningitidis; identical to SEQ ID NO: 19891

SEQ ID NO: 31954 - protein, 919 aa, Neisseria meningitidis
MKRMLFNATQAEELRVAIVDGQNLLDLDIETLGKEQRKGNIYKGIITRIEPSLEACFVDYGTDRHGFLPFKEVSRSYFRDYEGGRARIQDVLKEGMEVIVQVEKDERGNKGAALTTFISLAGRYLVLMPNNPRGGGVSRRIEGEERQELKAAMAELDIPNGMSIIARTAGIGRSAEELEWDLNYLKQLWQAIEEAGKAHHDPYLLFMESSLLIRAIRDYFRPDIGEILVDNQEVYDQVAEFMSYVMPSNVGRLKLYQDHTPLFSRFQIEHQIESAFSRSVSLPSGGAIVIDHTEALVSIDVNSARATRGADIEDTAFKTNMEAAEEVARQMRLRDLGGLVVIDFIDMENSKHQRDVENVLRDALKKDRARVQMGKLSRFGLLELSRQRLKPALGESSHVACPRCAGTGVIRGIESTALHVLRIIQEEAMKDNTGEVRAQVPVDVATFLLNEKRAELFAMEERLDVNVVLIPNIHLENPHYEINRIRTDDVEEDGEPSYKRVAEPEEDESAKPFGGEKAKAARPEPAVKGVRHTSPAPTAAPEKKTSWWDSFKAWLKRIFGGSETQAAPAAETSEKRSTANRSGSRANNRRQNPRRSKREGSKVEVREVAGKTAGQEARADKAETRNNGNRRRNERGDRAAGRADEAEIQDRNIQPAATVADAAPSETEVQTGKRRRNGSRSERGQTAPETATVAETTVQTAENTPSEPHTAEDKGSKPKSERNRRERDSRDAKERRERNNQRDRRQNGKKRNIPSAAKIEQYLNIHDTADKVRSAAAHVFGETDANAPITVSIADPVAERDLPTASPAVSNGDAPVYDAAEKIRRATAAILPEGATPKAEAQEMPSENATFTAAAEQARETAQTGGLVLIETDPAALKAWAAQPEVQAGRGLRRSEQPKPSEAATVPAEEMIQVETRQG

SEQ ID NO: 31955 - protein, 307 aa, Neisseria meningitidis; identical to SEQ ID NO: 3808

SEQ ID NO: 31956 - protein, 294 aa, Neisseria meningitidis
MEIWNMLDTWLDAVPIRAEAAESVAAVAALLLARALLLNIHFRRHPDFSIESKRRFLVASRNITLLLVLFSLAFIWSAQIQTLALSMFAVAAAVVVATKELIMCLSGSILRSATQQYSVGDYIEINGLRGRVVDINLLNTLMMQVGPNPLVGQLAGTTVSFPNSLLLSHPVRRDNILGDYVIHTVEIPVPIHLDSDEAVCRLKAVLEPLCAPLCAPYIPAIQRHLENVQAEKLFITPAARPRVTRVPYDDKAYRIIVRFASPVSKRLEIQQAVMDEFLRVQYRLLNHPAGSETL

SEQ ID NO: 31957 - protein, 483 aa, Neisseria meningitidis
MLSFLSGLLSLGIEVLWVRMFSFAAQSVPQAFSFTLACFLTGIAVGAYFGKRICRSRFVDIPFIGQCFLWAGIADFLILGAAWLLTGFSGFVHHAGIFITLSAVVRGLIFPLVHHVGTDGNKSGRQVSNVYFANVAGSALGPVLIGFVILDFLSTQQIYLLICLISAAVPLFCTLFQKSLRLNAVSVAVSLMFGILMFLLPDSVFQNIADRPDRLIENKHGIVAVYHRDGDKVVYGANVYDGAYNTDVFNSVNGIERAYLLPSLKSGIRRIFVVGLSTGSWARVLSAIPEMQSMIVAEINPAYRSLIADEPQIAPLLQDKRVEIVLDDGRKWLRRHPDEKFDLILMNTTWYWRAYSTNLLSAEFLKQVQSHLTPDGIVMFNTTHSPHAFATAVHSIPYAYRYGHMVVGSATPVVFPNKELLKQRLSWLIWPESGRHVFDSSTVDAAAQKVVSRMLIQMTEPSAGAEVITDDNMIVEYKYGRGI

SEQ ID NO: 31958 - protein, 674 aa, Neisseria meningitidis
MNDMTLYLIIALVPLAGSLIAGLFGNKIGRAGAHTVTILGVAVSAVLSAYVLWGFLNGSRAKFDENVYTWLTMGGLDFSVGFLVDTMTAMMMVVVTGVSLMVHIYTIGYMHDEKVGYQRFFSYISLFTFSMLMLIMSNNFIQLFFGWEAVGLVSYLLIGFYFKRPSATFANLKAFLINRVGDFGFLLGIGLVLAYFGGSLRYQDVFAYLPNVQNATIQLFPGVEWSLITVTCLLLFVGAMGKSAQFPLHVWLPDSMEGPTPISALIHAATMVTAGLFMVSRMSPIYEMSSTALSVIMVIGAITALFMGFLGVIQNDIKRVVAYSTLSQLGYMTVALGASAYSVAMFHVMTHAFFKALLFLAAGSAIIGMHHDQDMRHMGNLKKYMPITWLTMLIGNLSLIGTPFFSGFYSKDSIIEAAKYSTLPGSGFAYFAVLASVFVTAFYAFRQYFMVFHGEEKWRSLPEHHDDHHGEEHHSLGKNDNPHESPLVVTLPLILLAIPSVIIGYVAIEPMLYGDFFKDVIFVNADAHPTMHIMKEEFHGALAMVSHSLHSPVLYLAIAGVLSAWLLYVKLPHLPAKIAQTFRPVYVLFENKYYLDALYFNVFAKGTRALGTFFWKVGDTAIIDNGIVNGSAKLVGAIAAQVRKAQTGFIYTYAAAMVFGVLVLLGMTFWGLFR

SEQ ID NO: 31959 - protein, 390 aa, Neisseria meningitidis
MMKIKALMIAAALLAAADVHAAPQKAKTASAKAAKAAKAAKAAKAAKAAKVAKVAKVAKVAKVAKVAKVAKVAKVAKVAKVAKVAKVAKVAKVAATAQKEAAPAQQQGGIRFSDGIAAVADNEVITRRRLAEAVAEAKANLPKDAQISESELSRQVLMQLVNQSLIVQAGKRRNIQASEAEIDAVVAKNPALKNLSPAQRRDFADNIIAEKVRQQAVMQNSRVSEAEIDAFLEQAQKQGITLPEGAPLRQYRAQHILIKADSENAAVGAESTIRKIYGEARSGTDFSSLARQYSQDASAGNGGDLGWFADGVMVPAFEEAVHALKPGQVGAPVRTQFGWHIIKLNEVRDAGTPQERIRNSVRQYIFQQKAEQATVNLLRDLHSGAYVDIR

SEQ ID NO: 31960 - protein, 792 aa, Neisseria meningitidis
VLALGFCFGTHCAAADAVAAEETDNPTAGGSVRSVSEPIQPTSLSLGSTCLFCSNESGSPERTEAAVQGSGEASIPEDYTRIVADRMEGQSQVQVRAEGNVVVERNRTTLNADWADYDQSGGTVTAGDRFALQQDGTLIRGETLTYNLEQQTGEAHNVRMETEHGGRRLQSVSRTAEMLGEGHYKLTETQFNTCSAGDAGWYVKAASVEADREKGIGVAKHAAFVFGGVPLFYTPWADFPLDGNRKSGLLVPSLSAGSDGVSLSVPYYFNLAPNLDATFAPGVIGERGAVFDGQVRYLRPDYAGQSDLTWLPHDKKSGRNNRYQAKWQHRHDISDTLQAGVDFNQVSDSGYYRDFYGNKEIAGNVNLNRRVWLDYGGRAAGGSLNAGLSVLKYQTLANQSGYKDKPYALMPRLSADWRKNTGRAQIGVSAQFTRFSHDSRQDGSRLVVYPDIKWDFSNSWGYVRPKLGLHATYYSLNRFGSQEARRVSRTLPIVNIDSGMTFERNTRMFGGEVLQTLEPRLFYNYIPAKSQNDLPNFDSSESSFGYGQLFRENLYYGNDRINTANSLSAAVQSRILDGATGEERFRAGIGQKFYFKDDAVMLDGSVGKKPRNRSDWVAFASGSIGSRFILDSSIHYNQNDKRAENYAVGASYRPAQGKVLNARYKYGRNEKIYLKSDGSYFYDKLSQLDLSAQWPLTRNLSAVVRYNYGFEAKKPIEVLAGAEYKSSCGCWGAGVYAQRYVTGENTYKNAVFFSLQLKDLSSVGRNPADRMDVAVPGYIPAHSLSAGRNKRP

SEQ ID NO: 31961 - protein, 1201 aa, Neisseria meningitidis
MFHFAFPAQTALRQAITDAYRRNEIEAVQDMLQRAQMSDEERNAASELARRLVTQVRAGRTKAGGVDALMHEFSLSSEEGIALMCLAEALLRIPDNATRDRLIADKISDGNWKSHLNNSPSLFVNAAAWGLLITGKLTATNDKQMSSALSRLISKGGAPLIRQGVNYAMRLLGKQFVTGQTIEEALQNGKEREKMGYRFSFDMLGEAAYTQADADRYYRDYVEAIHAIGKDAAGQGVYEGNGISVKLSAIHPRYSRAQHGRVMGELLPRLKELFLLGKKYDIGINIDAEEANRLELSLDLMEALVSDPDLAGYKGIGFVVQAYQKRCPFVIDYLIDLARRNNQKLMIRLVKGAYWDSEIKWAQVDGLNGYPTYTRKVHTDISYLACARKLLSAQDAVFPQFATHNAYTLGAIYQMGKGKDFEHQCLHGMGETLYDQVVGPQNLGRRVRVYAPVGTHETLLAYLVRRLLENGANSSFVNQIVDENISIDTLIRSPFDTIAEQGIHLHNALPLPRDLYGKCRLNSQGVDLSNENVLQQLQEQMNKAAAQDFHATSIINGKACDVGEAQPIKNPADHDDIVGTVSFADAALAQEAIGAAVAAFPEWSATPAAERAACLRRFADLLEQHTPALMMLAVREAGKTLNNAIAEVREAVDFCRYYANEAEHTLPQDAKAVGAIVAISPWNFPLAIFTGEVVSALAAGNTVIAKPAEQTSLIAGYAVSLMHEAGIPTSALQLVLGAGDVGAALTNDARIGGVIFTGSTEVARLINKALAKRGDNPVLIAETGGQNAMIVDSTALAEQVCADVLNSAFDSAGQRCSALRILCVQEDVADRMLDMIKGAMDELVVGKPIQLTTDVGSVIDAEAQQNLLNHINKMKGVAKSYHEVKTAADVDSEKSTFVRPILFELNNLNELQREVFGPVLHVVRYRADELDSVIDQINSKGYALTHGVHSRIEGTVRHIRSRIEAGNVYVNRNIVGAVVGVQPFGGHGLSGTGPKAGGSFYLQKLTRAGEWVAPTLSQIGQADEAALKRLEALVHKLPFNAEEKKAAAAALGHARIRTLRRAETVLTGPTGERNSISWHAPKRVWIHGGSTVQAFAALTELAASGVQAVVEPDSPLASYTADLEGLLLVNGKPETVGISHVAALSPLDSARKQELAAHDGALIRVLPSENGLDILQVFEEISCSVNTTAAGGNASLMAVAD

SEQ ID NO: 31962 - protein, 367 aa, Neisseria meningitidis
  misc_feature 3, 4: 'Xaa' is any amino acid
VCXXVAALIYFNHYEHPLKKFFQWKITVAAGLISYSLYLWHWPILAFMRYIGPDNLPPYSSAAAIVLTLAFSLISYHCIEKPFKKWQGSFAQSVLWIYALPMLILGAGSFFAMRLPFMAQYDRLGLTRSNTSCHNNTGKQCLWGDTEKQPELLVLGDSHADHYKTFFDAVGKKEKWAATMVSADACAYVEGYASRVFQNWAACRAVYRYAEEHLPRYSKVVLAMRWGSQMPENSRSLAYDAGFFQKFDRMLHKLSSEKQAVYLMADNLASSYNVQRAYILSSRIPGYRQTLHPDDESTLKANARIRELAAKYPNVYIIDAAAYIPADFQIGGLPVYSDKDHINPYGGTELAKRFSEKQRFLDTRHNH

SEQ ID NO: 31963 - protein, 104 aa, Neisseria meningitidis
  misc_feature 3, 4: 'Xaa' is any amino acid
VCXXPMKKMFVLFCMLFSCAFSLAAVNINAASQQELEALPGIGPAKAKAIAEYRAQNGAFKSVDDLTKVKGIGPAVLAKLKDQASVGAPAPKGPAKPAIPAAKK

SEQ ID NO: 31964 - protein, 149 aa, Neisseria meningitidis
MTDNRGFTLVELISVVLILSVLALIVYPSYRNYVEKAKINAVRAALLENAHFMEKFYLQNGRFKQTSTKWPSLPIKEAEGFCIRLNGIARGALDSKFMLKAVAIDKDKNPFIIKMNENLVTFICKKSASSCSDGLDYFKGNDKDCKLFK

SEQ ID NO: 31965 - protein, 288 aa, Neisseria meningitidis
MKGIILAGGSGTRLYPITRGVSKQLLPVYDKPMIYYPLSVLMLAGVRDILVITAPEDNASFKRLLGDGSDFGISISYAVQPSPDGLAQAFIIGEEFIGNDNVCLVLGDNIFYGQSFTQTLKQAAAQTHGATVFAYQVKNPERFGVVEFNENFRAVSIEEKPQRPKSDWAVTGLYFYDNRAVEFAKQIKPSARGELEISDLNQMYLEDGSLSVQILGRGFAWLDTGTHESLHEAASFVQTVQNIQNLHIACLEEIAWRNGWLSDEKLEELARPMAKNQYGQYLLRLLKK

SEQ ID NO: 31966 - protein, 125 aa, Neisseria meningitidis; identical to SEQ ID NO: 9817

SEQ ID NO: 31967 - protein, 132 aa, Neisseria meningitidis; identical to SEQ ID NO: 10765

SEQ ID NO: 31968 - protein, 111 aa, Neisseria meningitidis
MMADKEQVEKMIYSENKQSVIDGMLGMTFSSEEDEIPWISEKLTELSKHKDLNIARLSLTCFGHLARMHENIGDCDKVIALLRSKQGNPDFQGFAEDALDDISFFIFKKHP

SEQ ID NO: 31969 - protein, 171 aa, Neisseria meningitidis
LRKQSKILQKMPIEKQKEKSMVDAVVKTPEFLPFTSVGIFRFGADITQYKNILGTFMYEPPDEFRTEYYESPDSNLLIAVKKNKIISIFCYQELYFMGVNIIGLNFEDFKQLFHHPKSYGVDKYYLSNESYPTYVYEFDEIGVQAWEAKGKIVTIIAGGKDNYSTEPYYDE

SEQ ID NO: 31970 - protein, 180 aa, Neisseria meningitidis
MRTHRKTCSAVCFAFQTASKPAVSIRHPSENIMSLKIRLTEDMKTAMRAKDQVSLGTIRLINAAVKQFEVDERTEADDAKITAILTKMVKQRKDSVKIYTEAGRQDLADKENAEIEVLHRYLPQMLSAGEIRTAVDAAVAETGAAGMADMGKVMGVLKTRLAGKADMGEVNKILKAVLTA

SEQ ID NO: 31971 - protein, 213 aa, Neisseria meningitidis
MRCFMIQNVVTSIILYSGTAVDLLIILMLFFAKRKSRKDIINIYLGQFLGSVSLILLSLLFAFVLDYIPSKEILGLLGLIPIFLGIKVLLLGDSDGEAIAKEGLRKDNKNLIFLVAMITFASCGADNIGVFIPYFTTLNLANLIVALLTFLVMIYLLVFSAQKLAQVPSVGETLEKYSRWFVAVVYLGLGVYILIENNSFDMLWTVSGQEKIL

SEQ ID NO: 31972 - protein, 307 aa, Neisseria meningitidis
MNTGKPQKRAVNGVLLLDKPEGLSSNTALQKARRLFRAEKAGHTGVLDPLATGLLPVCFGEATKFAQYLLDADKAYTATLKLGEASSTGDAEGEIIAAARADISLAEFQTACQALTGNIRQVPPMFSALKHEGKPLYEYARKGIVIERKPRDITVYAIDIAEFDSPKAVIDVRCSKGTYIRTLSEDIAKHIGTFAHLTALRRTETAGFTIAQSHTLEALANLDETERDSLLLPCDVLVAHFPQTVLNDYAVHMLQCGQRPRFDEDLTSDTPVRVYTENGRFVGLAEYQKEICRLKALRLMNTAVSAA

SEQ ID NO: 31973 - protein, 155 aa, Neisseria meningitidis; identical to SEQ ID NO: 24006

SEQ ID NO: 31974 - protein, 186 aa, Neisseria meningitidis; identical to SEQ ID NO: 104

SEQ ID NO: 31975 - protein, 273 aa, Neisseria meningitidis
LLIQYTLCRYRNRLAQDNTLSELLELINRQLTEKGLKIEKASAAVVDATIIQTAGSKQCQAIEVDEEGQISGQTTPSKDSDARWIKKNGLYKLGYKQHTRTDVEGYIEKLHIIPANTHECKHLPPLLEGLPEGTTVYADKGYDSAENRQHLEEHQLLDGIMRKACRNRPLSETQTKRNRYLSKTRYSGLNLNQDKATKPQTVQIVRQGEATPYWFKFNPLYVVEQSFGTLHRKFRYARAAYFGLIKVSAQSHLKAMCLNLLKAANRLSAPAAA

SEQ ID NO: 31976 - protein, 134 aa, Neisseria meningitidis
LESQMAKSFNQAASELTDIFPNISLTDFDGVNYPVTVNCPMHGNVRYSTFNALIKSKYGCPECAKMSKTQTPPNVGKPLLILDTTTNETLTFPSVTAAGAALGVHFQQINHRLKGRTSPDNLISNRYKVLGYDR

SEQ ID NO: 31977 - protein, 136 aa, Neisseria meningitidis; identical to SEQ ID NO: 1774

SEQ ID NO: 31978 - protein, 145 aa, Neisseria meningitidis
LKISIFWLYNAFILERFIMPKSLSLQDVQLRFSSKFPDKTVLKFTKNYEPVTIQCPLHGSVVYGNLQAAMKSSTGCPECTRNPEKPSPNAVAIRLEDTETEEIYEFASTLAASKFIGCSNSTLAVRLSGRTPFDRLIRYRYRLVK

SEQ ID NO: 31979 - protein, 130 aa, Neisseria meningitidis; identical to SEQ ID NO: 7797

SEQ ID NO: 31980 - protein, 186 aa, Neisseria meningitidis; identical to SEQ ID NO: 7798

SEQ ID NO: 31981 - protein, 86 aa, Neisseria meningitidis
LLMCVLLHRQLSHAGDESVYVAQSPLAASEGRGARERGGQVLSHWLSPYYLSNYGCIMRLCLLFVKHYTVKMCKDLVKTYTIFLYI

SEQ ID NO: 31982 - protein, 399 aa, Neisseria meningitidis; identical to SEQ ID NO: 7800

SEQ ID NO: 31983 - protein, 105 aa, Neisseria meningitidis
MNILPSWLRVGMNIAMLGMIHSDIRLITVDYEEGRRFLKIKNYLSREAFTEDHEDMEYLITELWSMCGEYFDEADFECIYSNHSSMELNQINGAVFRRKDLISQA

SEQ ID NO: 31984 - protein, 107 aa, Neisseria meningitidis
MIIDKKSTSDVLKQYQELGFDLTKPMIIEFFIGGSQKNLQSIESRLISYRQDFQISIEQDEFGEMWTCYCSVNIVPSLENILAIETTLFGIAQKNDCNYEGFGSYGN

SEQ ID NO: 31985 - protein, 126 aa, Neisseria meningitidis
LYCLRLRRLVLIFVNPLYKRKQIGGRPGKPAPNASGKYAYRWKTQPHPPPGVSDGTAAAGNVRRLRHRRTQNRMPAPATIRQIPLFFPNRLQVSPIRRVMPPPPFKGNARVNGFAVGKAAGYRYVS

SEQ ID NO: 31986 - protein, 154 aa, Neisseria meningitidis; identical to SEQ ID NO: 741

SEQ ID NO: 31987 - protein, 95 aa, Neisseria meningitidis; identical to SEQ ID NO: 589

SEQ ID NO: 31988 - protein, 144 aa, Neisseria meningitidis
MRRALIAKIKIAQKELGLDDGTYRAVLERVTDKRSCADMDVSELESVVADMRSHGFKPKAKGNPHGKPHLRRTSSAAMLDKVEALLTVGGKHWNYAHAMARRMFGKDKVEYLDDTQLHKLVAALQIAENRKTEKASGDDGVRKS

SEQ ID NO: 31989 - protein, 112 aa, Neisseria meningitidis
LLIHYIDIAKRNFVIAVSSLSKTKTETNNPKGIAHTIEYLKKHKVALVVTESTGGLEIPAAKAIRRAGIAVIIANPRQTHQFAQSQPLTKTDAKDAKMPAFFAQMTAQKEDS

SEQ ID NO: 31990 - protein, 74 aa, Neisseria meningitidis; identical to SEQ ID NO: 3842

SEQ ID NO: 31991 - protein, 511 aa, Neisseria meningitidis
VSDSKTKERATFGTRRAFMIAAIGSAVGLGNIWRFPYIAFENGGGAFILPYLVALLTAGIPLLLLDYAIGHRYRGSAPLAFRRLGRWFEPVGWWNVMTNIVICIYYAVIIGWAASYTYYSVNAAWGADPQGFFFKDFLQMAGPEALGLDFVGKVAGPLAGVWVFTAAIMALGVQKGVARASSFFMPLLLVMFLIMVGISLTLPGAAKGLDALFTPDWSKLADSKVWVAAYGQIFFSLSICFGIMVTYSSYLKKKTDLGGTGLVVGFANSSFELLSGIGVFAALGFMAQAGGKAVNEVASGGIGLAFIAFPTIINQAPMGWLIGILFFGSLVFAGVTSMISILEVIVAAIQDKLNIGRVNATLLVCIPMGIVSTLLFGTATGLPVLDVMDKFVNTYGIVAAGFVYVAAIIISGRLPELRKHLNALSSIRIGGLWTVCVVVTVVMLGYMLFKDTSGLMEKNYEGYPDGFLSIFGWGMSAALVVFGLLLSLLPWKHGQDFNVKDEHEHEQGDEK

SEQ ID NO: 31992 - protein, 287 aa, Neisseria meningitidis
MSEIGLVKIYSGKVRDLYEIDDKRMLMVASDRLSAFDVILDDPIPSKGEILTQISNFWFKKLAHIMPNHFTGQTVYDVLPENEAKALEKRAVVAKKLTPVKVEAIVRGYLAGSGWKDYQKTGSVCGIQLPEGMQEAQQLPEVIFTPSTKAAVGDHDENISFEECERIIGKELAAEVRAKAIQLYTEAAEYAKLRGIIICDTKFEFGLDTNGTLTLMDEVLTPDSSRFWPADQYEVGTNPPSFDKQFVRDWLEQSGWNKKAPVPKVPADVIQKTVEKYREALTLLTQD

SEQ ID NO: 31993 - protein, 65 aa, Neisseria meningitidis; identical to SEQ ID NO: 204

SEQ ID NO: 31994 - protein, 101 aa, Neisseria meningitidis; identical to SEQ ID NO: 1251

SEQ ID NO: 31995 - protein, 117 aa, Neisseria meningitidis; identical to SEQ ID NO: 9841

SEQ ID NO: 31996 - protein, 71 aa, Neisseria meningitidis; identical to SEQ ID NO: 1785

SEQ ID NO: 31997 - protein, 130 aa, Neisseria meningitidis; identical to SEQ ID NO: 4578

SEQ ID NO: 31998 - protein, 112 aa, Neisseria meningitidis; identical to SEQ ID NO: 3851

SEQ ID NO: 31999 - protein, 451 aa, Neisseria meningitidis
MSDFFHSDVLSVSELNAFAKSILENHLAGLWIAGEVSNLTRAASGHYYFSLKDSRAQVRCAMFKGAAARLAKPLKEGDHIEVSGKISIYETRGEFQITVNEVRLKGLGQLYEAYERLKAQLQAEGAFAAERKKPLPARPQCIGIVTSLAAAALRDVVTTLKRRAPEIPVIVYPTPVQGTGSEFQIAQAIKTASQRAECDVLIVCRGGGSIEDLWAFNEEPVVRAIEACTIPVVSGVGHETDFTLADFVADVRAPTPTGAAELVSPNRQESLHRLAQAQGRLKTVLEQRYFDASQKLDWLARQIRHPRQKLDEQRTYIHKLAQTLSYSMTQNLRAHAARFERQTQALQHYRPDISVYRQDIDRFQTTLSHAFRQLLARHRQSLAAQASLLEAVSPQHILERGFSVVKNTRGQVIRNADVLKQGQKLHIIFADGETDVRVSKEQGQQDLFDCI

SEQ ID NO: 32000 - protein, 117 aa, Neisseria meningitidis; identical to SEQ ID NO: 3854

SEQ ID NO: 32001 - protein, 216 aa, Neisseria meningitidis; identical to SEQ ID NO: 7775

SEQ ID NO: 32002 - protein, 231 aa, Neisseria meningitidis
  misc_feature 2, 3: 'Xaa' is any amino acid
VXXPYYVQADLAYAAERITHDYPKPTGTDKDKISTVSDYFRNIRAHSIHPRVSVGYDFGDWRIAADCASYRKWNNNKYSVNTKELENKNNNKRDLKTENQENGSFHAASSLGLSAIYDFKLNDKFKPYIGARVAYGHVRHSIDSTKKTTEVLTSSHAPGTAPTIYNQGSTQNAYHESHSIRRLGLGVIAGVGFDITPKLTLDTGYRYHNWGRLENTRFKTHEVSLGMRYHF

SEQ ID NO: 32003 - protein, 336 aa, Neisseria meningitidis
MMIGASLFSSAGIAETYLHNAGIKIIAANELVPERANLYKALYPESKMIIGDILHEEVFQNLIQSVPNRLDFLIASPPCQGMSVAGKNRNIQEMANDKRNHLIFRVIEFILLKRPTFVLIENVPFFKLSYLIRGHYKQKFCKIYLVANIIFKLIFLILPIMVLHNIVNELLFVINIQLFGECRKKLQKPFLFVMLLVFCLVLSLDKSLMNGILHVHMLRSTLYGKIRQQDDLLLIINIIQRKKMVKKLKVIIQLIAVWSGMLLPQLLLFVMTLSVHNMFILDGLCLMEHIQMQEFHHSCFHHYLLIGIFPTIHQNYFGNVLVNLFLHCLKKLREEN

SEQ ID NO: 32004 - protein, 94 aa, Neisseria meningitidis
MKLLAALIPLLMSVVGRILTALGLMAVTYSGVDRLVAHFQQAITHSITGAPQAMLQLFYISGGGTVLNILFGAIAFILSFKQMTKLATSIGKKK

SEQ ID NO: 32005 - protein, 81 aa, Neisseria meningitidis; identical to SEQ ID NO: 8766

SEQ ID NO: 32006 - protein, 37 aa, Neisseria meningitidis; identical to SEQ ID NO: 970

SEQ ID NO: 32007 - protein, 137 aa, Neisseria meningitidis
LTEEMMKKQRHILCVGCLYIILKVNVFPNTGWMEASKGMQGMSFSTFGYADAPGYTFSHIGHTLIFLLGKTTGTRTTVSDSSHNVYYVKLYICANNSKALSCCLMLCQFGRKLSICAIKRALRWRSSKWVSSWTTTY

SEQ ID NO: 32008 - protein, 699 aa, Neisseria meningitidis
MAWWEFRGFWGILQRSRAVLHACRSLPHYGEDYRNQRRLPSSTSVYDPTCGSGSLLLKAAAQAGSQISLYGQEKDVATASLARMNMILHNNETAEINTGNTLSDSSFRDENDGLKTFDFAVANPPYPARKKRRLRLFAASAQKPETKRQRCDYSSARCAVSRQCRSAYSHGIAPPYRHYRAACQPVLRHGHSCLHHRHRQRTRPNRPICRRGNKPSYQWRQRVYDRIARLHRRQQKPSAARHSQNHRHFHKPRYSRMVHLSEIAAQDYNLNLPRYIDSGEVEDLQNLAAYLYGGIPAHDMDALEAYWQVLGRMKNELFAEHDGRFTTIQRNRLQIFPTVLERMRISILRHTVSTANPAGLVWNLGLIYSPKFNPLNRKQPNQSPYIGAPRLRRLQSRTPGKVCRVAHSKRPCRHPTGQPAGQAYPEMERKPAGRVQTRQPDRIRFLPNPDGLLGGNPARRCLSHRPRWLEGGKPSRNHQRKRSREPDRRLGNRNRQKRQSQNQAHQQKIPQRSHRPRAGCPPLLFRRHRQAGRKTKRAGTPKPRIGKPHRRTRRRRGCAERRIGCKRQTFRQTSENRIGRKRHRRRRTGCFTNHPNTDDAGKSRERRSQNPNRSPEPCRIQTIRPTFRSRNQAACRSRQMACRFTKPNRKSLGKQYSAAYQPLEHAGRPLPQPDGRACPRSGKVAKQSQCPPKYGFWRL

SEQ ID NO: 32009 - protein, 104 aa, Neisseria meningitidis
MANRFRRRKSAYRRLSGKPLFSDGITGNLCGGRKTLSYNLSRFKISIRSEMQKISFNLLKPANSPKIGKRRPCLNGAPHIPMPSPRYLPASPEIPGNNIHPAKI

SEQ ID NO: 32010 - protein, 407 aa, Neisseria meningitidis; identical to SEQ ID NO: 5647

SEQ ID NO: 32011 - protein, 380 aa, Neisseria meningitidis
MSIHLDFGISPKTFRQTYLYQKPKLFKGAVRNLEAASWKDINEIYQRADPTAPLFHLRKKGAIVPKEEYVESFDDLGKTRYRFIKSVIYEHMKNGASLRYNHIIVDITSTALPRLAGAHTIVSGYLAFGSDESYKNHWDTRDVYAIQLFGKKRWQLTAPDFPMPLYMQQTKDTDISIPEHIDMDIILEAGDVLYIPRGWWHRPIPLGCETFHLAVGTFPPNGYNYLEWLMKKFPTIESLRHSFSDWEQDRTRINDTAAQIAAMIADPVNYEAFSEDFLGKERTDTAFHLEQFANPNAIPLSDDVRLRLNANNLDTLEKGYLIGNGMKISVDELGKKVLEHIGKNEPLLLKNLLVNFNQGKHEEVRKLIYQLIELDFLELL

SEQ ID NO: 32012 - protein, 122 aa, Neisseria meningitidis; identical to SEQ ID NO: 2373

SEQ ID NO: 32013 - protein, 1431 aa, Neisseria meningitidis
MKTTDKRTTETHRKAPKTGRIRFSPAYLAICLSFGILPQAWAGHTYFGINYQYYRDFAENKGKFAVGAKDIEVYNKKGELVGKSMTKAPMIDFSVVSRNGVAALVGDQYIVSVAHNGGYNNVDFGAEGSNPDQHRFSYQIVKRNNYQKDTKHYYHEDYHNPRLNKFVTDAAPVEMTINMNGNTYGNITDYPDRVRIGSGRQYWHKKNGNPQQIFGSYSYRIAGNTHNQVGGSDGHVSLNGDVKKPNNYGPLPTGVSFGDSGSPMFIYDAKKQKWLINGVLREGNPYQGTHNGYPIVRKAYLTKIQDGDTGASIYDMVGGASYLWEAKELGKSTISQENNPKFSQMSDIANPSLPKQNKYTPSLDHRKHITFGEYVEGGVGKLTLKSNIDQGAGGLYFEGDFIVSPTQNETWKGAGISISDESTIIWKVNGVANDRLSKIGKGTLHVQAKGENQGSISVGDGKVILDQQADENNKKQAFSEIGLVSGRGTVQLNADNQFNPDKLYFGFRGGRLDLNGHSLSFHRIQNTDEGAMIVNHNQDKESTVTITGNKDIATTGNNNSLDSKKEIAYNGWFGEKDTTKTNGRLNLVYQPAAEDRTLLLSGGTNLNGNITQTNGKLFFSGRPTPHAYNHLGSGWSKMEGIPQGEIVWDNDWINRTFKAENFHIQGGQAVISRNVAKVEGDWHLSNHAQAVFGVAPHQSHTICTRSDWTGLTNCVEKTITDDKVIASLTKTDISGNVSLADHAHLNLTGLATLNGNLSANGDTRYTVSHNATQNGDLSLVGNAQATFNQATLNGNTSASGNASFNLSNNAVQNGSLTLSGNAKANVSHSALNGNVSLADKAVFHFESSRFTGQISGSKDTALHLKDSEWTLPSGTELGNLNLDNATITLNSAYRHDAAGAQTGSVSDTPRRRSRRSLLSVTPPTSVESRFNTLTVNGKLNGQGTFRFMSELFGYRSDKLKLAESSEGTYTLAVNNTGNEPVSLDQLTVVEGKDNKPLSENLNFTLQNEHVDAGAWRYQLIRKDGEFRLHNPVKEQELSDKLGKAEAKKQAGKDNAQSLDALIAAGRDAVEKTESVAEPARQAGGENVGIMQAEEEKKRVQADKDTALAKQREAETRPATTAFPRARRARRDLPQPQPQPQPQPQRDLISRYANSGLSEFSATLNSVFAVQDELDRVFAEDRRNAVWTSGIRDTKHYRSQDFRAYRQQTDLRQIGMQKNLGSGRVGILFSHNRTENTFDDGIGNSARLAHGAVFGQYGIGRFDIGISTGAGFSSGSLSDGIGSKIRRRVLHYGIQARYRAGFGGFGIEPHIGATRYFVQKADYRYENVNIATPGLAFNRYRAGIKADYSFKPAQHISITPYLSLSYTDAASGKVRTRVNTAVLAQDFGKTRSAEWGVNAEIKGFTLSLHAAAAKGPQLEAQHSAGIKLGYRW

SEQ ID NO: 32014 - protein, 380 aa, Neisseria meningitidis
MQKWQTELYSTPLWLCLTPKSTVKVLLLITAMITLVLTEMRLNVLSTFMSKGLYDSMQDLNASAFWMFAAMNAGVVLIRAFNNVVNDFLNQGLAIKWSERLNEVLTARWLADKNYYRLQMRRHAPDNIDQRIQQDAQEFIASTIEFVRGMVNSVVTSLEFAVVLRGLAGILTVFGFDIPHGIVWFVYIFVILATFIAMWIGNPLIRYNYENEKLNGDYRYSLIRVRDHAESVAFYNGEKHEYDQLSDRFKAIIRNRWRIARQSVCLSGFNDMFINGIKLFPIILQAPRLFAGQIKIGDIQQTVQAFARLQNALSFFRMFYNKFTAYRARLERLYGFLLSTEEQHSARQPEISEVSDGIALECKAAAAFARIGGSFCTAEA

SEQ ID NO: 32015 - protein, 186 aa, Neisseria meningitidis
MNPLIHQAKESSMQTRILSAVLLAFSTAAFAEGAFTLQFDNPSEDGGFTQNQILSAPYGFGCSGGNASPALSWKNPPAGTKSFVLTVYDKDAPTGLGWMHWVVADIPADVRRRNAASLQLSRCASIADDQSAAISAVISLRICRIRLTPSYTAKPMPSCCNHANTPQSAASAALCGTSSSASTAAS

SEQ ID NO: 32016 - protein, 203 aa, Neisseria meningitidis; identical to SEQ ID NO: 3861

SEQ ID NO: 32017 - protein, 807 aa, Neisseria meningitidis
MSAQTDPGYFFMPNHIILIGASERPYSLGERVLSNLLSTPFQGKITPVNPRHHTIAGLPAYTSLNKIPGNADLIIAVTLPDSYDTLFKTCRKKQLRHIILIQDWDSLSAAELHTAETAIRKHHGNGLNITACTTAGIQLPSLGLNISTQDGYAAGHTAILTGNAAVSRQIDNILNKLRQGTSRHISLHPGISPITSADWLNRFGHSLHTKTAVLHHNPEEDQRKLFSAIRQFTRHTPLILHITCRTTETDRAVLHCLARHCNFLISFNADDLEAALRAQLSDLPPLSRLDILSDTPAEWLNAHAPKTLALHFPNLPHHIRNGHLTGTPTPSICHDIASRQLARPDTQAVLTILSPSGHEDYKKTARALIRLSEQTAKPLLVSSPFSDGITHFDTPTQAIRTLSYRNTAAALKQAQLDIAPPQPCRLKTPQPQNIKKALEAADPALIAEALHPPYRHTTHNAVQFQFGSHSLYGDILTARCNGQTTAVLPPFTTLDSRHLARFAELDGTQTLDQFLHTLTIIPEYRQHILGITLNLNGGQYSSDFILKTPETHDTPKRKNTGKAAQTLEHAAAKMQSAAAYLKHKNPTAAEFLRHTSEAAAELLGSKTETGAAVPNVLAPYPAAYPKTLSLRNNTTVTITPILPEDAEAKQQFVRSLGPEARYTRFMTHTNELPAATLARLCNPDYHCEAAWTAKDADSNIVAVVRHSRLNRNECEFGITLAEHMRGSGLAQKMMELIIQTAAQQGYRTMSADILKTNTPMIKLAEKSGFTLKESDTEKNLYRAYLNLAADKTTEKTNKNLRTDHKIT

SEQ ID NO: 32018 - protein, 421 aa, Neisseria meningitidis
MQQIKFIDLFSGMSGIRKGFEQACRKQSVACECVFTSEIKPAALEVLKQNYPDEVPYGDITKIETGDIPDFDILLAGFPCQAFSFAGKRLGFEDTRGTLFFDVARILKAKKPKGFILENVEGLVTHDRKDPTQKRTLTVILETLETLGYYVSWKVLNAKDFGIPQNRKRIYLTGSLKSKPDLSFETTLSPKLKNILESGLPTESSPFIKKLLKKFPPSELYGKSVKDKRGGKNNIHSWDIELKGTVTEEEKQLLNMLLKERRKKKWASEIGIDWMDGMPLTKAQISTFYKHPNLQNILDSLTDKGYLVLEHPKQKIGGRRIKDESLPKGYNIVSGKKSFEINKILDPNDVAPTLVAMDMEHLFVVDNGGLRTLTGKEGLRLFGYPDDYSFDIPKKDKYDLLGNTVAVPVIKAVSERLLHTL

SEQ ID NO: 32019 - protein, 333 aa, Neisseria meningitidis; identical to SEQ ID NO: 11823

SEQ ID NO: 32020 - protein, 255 aa, Neisseria meningitidis
MRPYATTIYQLFILFIGSVFTMTSCEPVNEQTSFNNPEPMTGFEHTVTFDFQGTKMVIPYGYLARYTQDNATKWLSDTPGQDAYSINLIEISVYYKNDQGWVLEPYNQQNKAHFIQFLRDGLDSVDDIVIRKDACSLSTTMGERLLTYGVKMPSAYPEYEAYEDKRHIPENPYFHEFYYIKKGENPAIITHWNNRVNQAEEDNYSTSVGSCINGFTVQYYPFIREKQQLTQQELVGYHQQVEQLVQSFVNNSSKK

SEQ ID NO: 32021 - protein, 754 aa, Neisseria meningitidis
MLAPELEQILQQLYREARKAHYEFISLEHLLLVLIEEDASVPNVLKLCGADLKVVSEQLAASVAENTPLIPEHLLDTVETRPTLGFQRVMQRAMVHTQSAGKAAVEPLDVLVALMSETDSHTVYFLKLQSVTRFEVLRCIAHGSPDDEDGNDSDGLGREGEEAEQKTGSLSDYTVNLNTEVKAGRIDPLIGRKHEMERLVQILCRRRKNNPLLVGEAGVGKTALAEGLAHQIVNGGIPDALKDAEVYALDMGSLLAGTKYRGDFEARVKSVLKQLEKIPHAILFIDEIHTIIGAGSTSGGTMDASNLLKPALAKGSLRCIGATTYDEYRTIFDKDHALSRRFQKIDVVEPTVSETVQILRGLKPMFEAFHQVRYTQGALEAAAELSARYINERFLPDKAIDVMDEAGAAQRILPKSKQKKVIGKAQIETVIAKVARIPEKTVSHDDKQVLQFLGRDLKNMVYGQENAIDALVAAVKMSRSGLGLPDKPIGSFLFSGPTGVGKTEAAKQLAYSMGVPLQRFDMSEYMERHAVSRLIGAPPGYVGFEQGGLLTEAVNKQPHCVLLLDEIEKAHPDIFNVLLQVMDAGKLTDNNGKSADFRNVILIMTTNAGAESLSRPSLGFTAKRERGDEMQAINKLFTPEFRNRLDAIIPFAPLSEPIIVKVVDKFLLQLEHQLLDKKVEAEFTSALHKYLAEKGFDPQMGARPMHRLIQEKIRKPLADELLFGKLSNGGFVRIDWDAAKEEAVLKFKKSKVKI

SEQ ID NO: 32022 - protein, 288 aa, Neisseria meningitidis
MSANEYAQIGWIGLGQMGLPMVTRLLDGGIEVGVYNRSPDKTAPISAKGAKVYGNTAELVRDYPVIFLMVSDYAAVCDILNGVRDGLAGKIIVNMSTISPTENLAVKALVEAAGGQFAEAPVSGSVGPATNGTLLILFGGSEAVLNPLQKIFSLVGKKLHFGDVGKGSGAKLVLNSLLGIFGEAYSEAMLMARQFGIDTDTIVEAIGGSAMDSPMFQTKKSLWANREFPPAFALKHASKDLNLAVKELEQAGNTLPAVETVAASYRKAVEAGYGEQDVSGVYLKLAEH

SEQ ID NO: 32023 - protein, 394 aa, Neisseria meningitidis
MAEICLITGTPGSGKTLKMVSMMANDEMFKPDENGIRRKVFTNIKGLKIPHTYIETDAKKLPKSTDEQLSAHDMYEWIKKPENIGSIVIVDEAQDVWPARSAGSKIPENVQWLNTHRHQGIDIFVLTQGSKLLDQNLRTLVRKHYHIASNKMGMRTLLEWKICADDPVKMASSAFSSIYTLDKKVYDLYESAEVHTVNKVKRSKWFYTLPVIILLIPVFVGLSYKMLSSYGKKEEPAAQESAATEHQAVFQDKTEGEPVNNGNLTADMFVPTLSEKPESKPIYNGVRQVRTFEYIAGCVEGGRTGCTCYSHQGTALKEITKEMCKDYARNGLPFNPYKEESQGRDVQQSEQHHSDRPQVATLGGKPWQNLMYDNWQERGKPFEGIGGGVVGSAN

SEQ ID NO: 32024 - protein, 759 aa, Neisseria meningitidis
MNTKLTKIISGLFVATAAFQTASAGNITDIKVSSLPNKQKIVKVSFDKEIVNPTGFVTSSPARIALDFEQTGISMDQQVLEYADPLLSKISAAQNSSRARLVLNLNKPGQYNTEVRGNKVWIFINESDDTVSAPARPAVKAAPAAPAKQQATAPSTKSAVSVSKPFTPAKQQAAAPFTESVVSVSAPFSPAKQQAAASAKQQTAAPAKQQAAAPAKQTNIDFRKDGKNAGIIELAALGFAGQPDISQQHDHIIVTLKNHTLPTTLQRSLDVADFKTPVQKVTLKRLNNDTQLIITTAGNWELVNKSAAPGYFTFQVLPKKQNLESGGVNNAPKTFTGRKISLDFQDVEIRTILQILAKESGMNIVASDSVNGKMTLSLKDVPWDQALDLVMQARNLDMRQQGNIVNIAPRDELLAKDKAFLQAEKDIADLGALYSQNFQLKYKNVEEFRSILRLDNADTTGNRNTLVSGRGSVLIDPATNTLIVTDTRSVIEKFRKLIDELDVPAQQVMIEARIVEAADGFSRDLGVKFGATGKKKLKNDISAFGWGVNSGFGGDDKWGAETKINLPITAAANSISLVRAISSGALNLELSASESLSKTKTLANPRVLTQNRKEAKIESGYEIPFTVTSIANGGSSTNTELKKAVLGLTVTPNITPDGQIIMTVKINKDSPAQCASGNQTILCISTKNLNTQAMVENGGTLIVGGIYEEDNGNTLTKVPLLGDIPVIGNLFKTRGKKPTAANCFSLPRGLWVRPATACA

SEQ ID NO: 32025 - protein, 181 aa, Neisseria meningitidis
MKHYALLISFLALSACSQGSEDLNEWMAQTRREAKAEIIPFQAPTLPVAPVYSPPQLTGPNAFDFRRMETDKKGENAPDTKRIKETLEKFSLENMRYVGILKSGQKVSGFIEAEGYVYTVGVGNYLGQNYGRIESITDNSIVLNELIEDSTGNWVSRKAELLLNSSDKNTEQAAAPAAEQN

SEQ ID NO: 32026 - protein, 685 aa, Neisseria meningitidis
MKTDIQTELTQALLSHEKVWANEEKTILAKNILLDLVEKTDPTIIGLLLNNDELKRHFFVEVNGVLVFKLQDLRFFLDKHSVNNSYTKYANRIGLTDGNRFLKDNSDIVLDFPFKDCVLNGGQSTEEGEEIYFKRSNSQPASQPASQPASQPIYTKLTRKRQEIFFNQTLAFDEIDRLFDAKAFSKFSRYTADGKQAVGEIKRHSDGTPAENLIIKGNNLLALHSLAKQFKGKVKLIYIDPPYNTGNDGFKYNDKFNHSTWLTFMKNRLEIAKELLMKDGSIFVSIDDNEQAYLKILMDEVFGNENFICNFIWEKKTGASDAKQIATITEFVLCYSKNFKTVKLNKNTFSYDTERYKLSDKFEQERGKYYIDNLDRGGLQYSDSLNFAIQCPDGTFTYPNGRTEFVNDGWIWKWSKNKIDWAITNGFLEFRKSKSKKSGWSVCYKNYMLVDNENKPIERSAPYKNLIQDILNTHATDELKKLFGSKVFTTPKPESLLQYLIQIATSESDIVLDYHLGSGTTAAVAHKMNRQYIGIEQMDYIETLAVERLKKVIDGEQGGISKAVNWQGGGEFVYAELAPFNETAKQQILACEDSDGIKTLFEGLCERYFLKYNVSVNEFSQIIQEPEFQSLPLDEQKQMVLEMLDLNQMYVSLSEMDDEQFADCLNDDDKAVSRAFYQAEKKNGE

SEQ ID NO: 32027 - protein, 327 aa, Neisseria meningitidis; identical to SEQ ID NO: 294

SEQ ID NO: 32028 - protein, 513 aa, Neisseria meningitidis
MMTEMQQRAQLHRQIWKIADEVRGAVDGWDFKQYVLGTLFYRFISENFTDYMQAGDSSIDYAAMPDSIITPEIKDDAVKVKGYFIYPGQLFCNIAAEAHQNEELNTKLKEIFTAIESSASGYPSEQDIKGLFDDFDTTSSRLGSTVADKNKRLAAVLKGVAELDFGNFENHHIDLFGDAYEYLISNYAANAGKSGGEFFTPQSVSKLIARLAVHGQEKVNKIYDPACGSGSLLLQAKKQFDEHIIEEGFFGQEINHTTYNLARMNMFLHNVNYNQFHIELGDTLTNPKLKDSKPFDAIVSNPPYSINWIGSDDPTLINDDRFAPAGVLAPKSKADFAFILHALNYLSGRGRAAIVSFPGIFYRGGAEQKIRQYLVEGNYVETVIALAPNLFYGTGIAVNILVLSKHKDNTDIQFIDASGFFKKETNNNVLIEEHIAEIVKLFADKADVPHIAQNAAQQTVKDKATTSPSAAMSKPKTHAKLSTSNSSTPKSAKPSPKSNGCGVKLTKLQRLKH

SEQ ID NO: 32029 - protein, 385 aa, Neisseria meningitidis; identical to SEQ ID NO: 7841

SEQ ID NO: 32030 - protein, 508 aa, Neisseria meningitidis
MDYPPLKGAALAWITLSLGLAVFMEVLDTTIANVAVPVIAGNLGAATTQGTWVITSFAVANAVSVPLTGFLAKRIGEVKLFTAAAVGFVITSWLCGIAPNLQSLVIFRILQGFIAGPLIPLSQSLLMASYPPAKRTLALALWAMTVVVAPVLGPILGGWISGNWHWGWIFFINIPIGIISAWITWKHLKYRETETVKMPTDYVGLTLMVVGIGALQMMLDRGKELDWFASGEIITLGVTALVCLSYFIVWELGEKYPIVDLSLFKDRNFTVGVIATSLGFMVYMGTLTLLPLVLQTNLGYTSTWAGLAAAPVGILPVFLSPIIGRFGNKIDMRLLVTASFLTFAFTFYWRTDFYADMDIGNVIWPQFWQGAGVAMFFLPLTTITLSHMKGGQIAAAGSLSNFLRVLMGGVGVSVVSTLWERREALHHTRFAEHITPYSATLHETAAHLSQQGISDIQTLGIINNTITQQGFIIGSNEIFMAGSLLFIIMIPVIWLAKPPFHNGGGGGH

SEQ ID NO: 32031 - protein, 790 aa, Neisseria meningitidis
MKPLQMLPIAALVGSIFGNPVFAADEAATETTPVKAEVKAVRVKGQRNAPAAVERVNLNRIKQEMIRDNKDLVRYSTDVGLSDSGRHQKGFAVRGVEGNRVGVSIDGVNLPDSEENSLYARYGNFNSSRLSIDPELVRNIEIVKGADSFNTGSGALGGGVNYQTLQGRDLLLDDRQFGVMMKNGYSTRNREWTNTLGFGVSNDRVDAALLYSQRRGHETESAGNRGYPVEGAGKETNIRGSARGIPDPSKHKYHNFLGKIAYQINDNRRIGASLNGQQGHNYTVEESYNLTASSWREADDVNRRRNANLFYEWMPDSNWLSSLKADFDYQKTKVAAINYKGLFPTNYTTWETEYHKKEVGEIYNRSMDTRFKRFTLRLDSHPLQLGGGHRLSFKTFASRRDFENLNRDDYYFSGRVVRTTSSIQHPVKTTNYGFSLSDQIQWNDVFSSRAGIRYDHTKMTPQELNAECHACDKTPPAANTYKGWSGFVGLAAQLNQAWRVGYDITSGYRVPNASEVYFTYNHGSGNWLPNPNLKAERSTTHTVSLQGRSEKGMLDANLYQSNYRNFLSEEQKLTTSGTPGCTEENAYYSICSDPYKEKLDWQMKNIDKARIRGIELTGRLNVDKVASFVPEGWKLFGSLGYAKSKLSGDNSLLSTQPLKVIAGIDYESPSEKWGVFSRLTYLGAKKVKDAQYTVYENKGWGTPLQKKVKDYPWLNKSAYVFDMYGFYKPAKNLTLRAGVYNLFNRKYTTWDSLRGLYSYSTTNAVDRDGKGLDRYRAPGRNYAVSLEWKF

SEQ ID NO: 32032 - protein, 209 aa, Neisseria meningitidis; identical to SEQ ID NO: 4735

SEQ ID NO: 32033 - protein, 1491 aa, Neisseria meningitidis
MRFTHTTPFCSVLSTLGLFAVSPAYSSIVRNDVDYQYFRDFAENKGAFTVGASNISIQDKQGKILGRVLNGIPMPDFRVSNRQTAIATLVHPQYVNSVKHNVGYGSIQFGNDTQNPEEQAYTYRLVSRNPHLDYDYHLPRLNKLVTEISPAALSSVPLLGNGQPKANAYLDTDRFPYFVRLGSGTQQVRKADGTRTRTAPAYQYLTGGTPLKVLGFQNHGLLVGGSLTDQPLNTYAIAGDSGSPLFAFDKHENRWVLAGVLSTYAGFDNFFNKYIVTQPEFIRSTIRQYETRLDVGLTTNELIWRDNGNGDSTLQGLNERITLPIANPSLAPQNDSRHMPSEDAGKTLILSSRFDNKTLMLADNINQGAGALQFDSNFTVVGKNHTWQGAGVIVADGKRVFWQVSNPKGDRLSKLGAGTLIANGQGINQGDISIGEGTVVLAQKAASDGSKQAFNQVGITSGRGTAVLADSQQIKSENLYFGFRGGRLDLNGNNLAFTHIRHADGGAQIVNHNPDQAATLTLTGNPVLSPEHVEWVQWGNRPQGNAAVYEYINPHRNRRTDYFILKPGGNPREFFPLNMENSTSWQFIGNNRQQAAKQVAQAENARPDLITFGGYLGENAQTGKAAPSYSKTNIEWVNGPNTPHKPSPYTNTPTRTGAGVPTITASKKAATPAPTSHGMPTAPKTGNFSDMTGEAAIEKNRHIANAAVYGRPEYRYNGALNLHYRPKRTDSTLLLNGGMNLNGEVLIEGGNMIVSGRPVPHAYDHQAKREPVLENEWTDGSFKAARFTLRNHARLTAGRNTAHLDGDITAYNLSGIDLGFIQGKTPECYRSYHSGSTHCTPNAVLKAENYRALPATQVRGDITLNDRSELRLGKAHLYGSIRAGKDTAVRMEADSNWTLSQSSHTGALTLDGAQITLNPDFANNTHNNRFNTLTVNGTLDGFGTFRFLTGIVRKQNAPPLKLEGDSRGAFQIHVKNTGQEPQTTESLALVSLNPKHSHQARFTLQNGYADLGAYRYILRKNNNGYSLYNPLKEAELQIEATRAEHERNQQAYNQLQATDISRQVQHDSDATRQALQAWQNSQTELARIDSQVQYLSAQLKQTDPLTGILTRAQNLCAAQGYSVDICRQVAKAADTNDLTLFETELDTYIERVEMAESELDKARQGGDAQAVETARHAYLNALNRLSRQIHSLKTGVAGIRMPNLAELISRSANTAVSEQAAYNTGRQQAGRRIDRHLTDPQQQNIWLETGTQQTDYHSGTHRPYQQTTNYAHIGIQTGITDRLSVGTILTDERTNNRFDEGVSARNRSNGAHLFVKGENGALFAAADLGYSNSRTRFTDYDGAAVRRHAWDAGINTGIKIDTGINLRPYAGIRINRSNGNRYVLDGAEINSPAQIQTTWHAGIRLDKTVELGQAKLTPAFSSDYYDTRQNSGSALSVNDRTLLQQAAHGTLHTLQIDAGYKGWNAKLHAAYGKDSNTARHKQAGIKIGYNW

SEQ ID NO: 32034 - protein, 292 aa, Neisseria meningitidis
MCIEMKFIFFVLYVLQFLPFALLHKIADLTGLLAYLLVKPRRRIGEINLAKCFSEWSEEKRKTVLKQHFKHMAKLMLEYGLYWYAPAGRLKSLVRYRNKHYLDDALAAGEKVIILYPHFTAFEMAVYALNQDIPLISMYSHQNKILDEQILKGRNRYHNVFLIGRTEGLRALVKQFRKSSAPFLYLPDQDFGRNDSVFVDFFGIQTATITGLSRIAALANAKVIPAIPVREADNTVTLHFYPAWKSFPGEDAKADAQRMNRFIEDRVREHPEQYFWLHKRFKTRPEGSPDFY

SEQ ID NO: 32035 - protein, 282 aa, Neisseria meningitidis
MTLLGIKLKQTQQLNQRLQQSLRVLQMSGIELEREVENWLSDNPLLERKDTDEFSDAGFHYTAPARQIGGDEGEDMLSNIVGEEDFKQYLHAQVCEHPLPDQEAACVHILIDFLDEQGYLTDSIEDILDHTPLEWMLDEAMLKQALTALQKFDPAGVAAADLNESLILQIERSGECAAKPAALHIVRNALDSIDGNRSQTLARIKKRLPQTDSGTLEAALDLIASLNPFPAAGFASSTPTPYSDEALANLLAFRGMEVSRRTVAKYRESFEIPAAHKRKTAE

SEQ ID NO: 32036 - protein, 325 aa, Neisseria meningitidis
MQENPTVWLFDLDNTLHNADAGLFTLINRAMTRYMARRLKLSESAASDLRQDYWHRYGATLAGLQIHHPEIDIAEFLRESHPIDAILTRLHGMADTENTLCRLNGRKAVFSNGPSFYVRAVVGALGLENRFDALFGTDDFGLLYKPNPQAYLNVCRLLDVPPECCIMVDDSADNLHQAKALGMKTVRFGAKVHDLPFIDASVSDMAQLARYAETLSEHRQNHYNTPQPPKIRKNVMRKTFLILMTAAALLSGCAWETYQDGNGKTAVRQKYPAGTPVYYQDGSYSKNMNYNQYRPERHAVLPNQTGNNADEEHRQHWQKPKFQNR

SEQ ID NO: 32037 - protein, 152 aa, Neisseria meningitidis; identical to SEQ ID NO: 2635

SEQ ID NO: 32038 - protein, 114 aa, Neisseria meningitidis
LRTHFVISNVPSTPASLRGRQLEGKLILEVPAQVNPIPQSVLRAAQEENVIIRDTTGRIYNRWWFSIRWLCRCTSCKKRTIDTNRENRGRCVSNCKCKHWISMDCQFVRAKRRS

SEQ ID NO: 32039 - protein, 424 aa, Neisseria meningitidis
MNRPKQPFFRPEVAVARQTSLTGKVILTRPLSFSLWTTFASISALLIILFLIFGNYTRKTTVEGQILPASGVIRVYAPDTGTITAKFVEDGEKVKAGDKLFALSTSRFGAGDSVQQQLKTEAVLKKTLAEQELGRLKLIHGNETRSLKATVERLENQELHISQQIDGQKRRIRLAEEMLQKYRFLSANDAVPKQEMMNVKAELLEQKAKLDAYRREEVGLLQEIRTQNLTLASLPQRHETEQSWLERTIADISQEVLDFEMRSEQIIRAERSGYIAIPNVEVGQQVDPSKLLLSIVPERTELYAHLYIPSSAAGFIKPKDKVVLRYQAYPYQKFGLASGSVVSVAKTALGRQELSGLGMVSSDLAKSNEPVYLVKIKPDKPTITAYGEEKPLQIGMTLEADILHEKRRLYEWVLELIYSMSGKL

SEQ ID NO: 32040 - protein, 346 aa, Neisseria meningitidis
MKAMVYHGANDIRFEEKPRPQIIDPTDAVVKIVKTTICGTDLGIWKGKKPEVADGRILGHESIGIVEEVGEAVKNIKVGDKVIISCVSKCCTCDNCKIQLYSHCRNGGWILGYMIDGTQAEYVRTPYADNSLVPLPDNVNEEVALLLSDALPTAHEIGVQYGDVKPGDTVFIAGAAPVGMSALLTAQLYSPAAIIVCDMDENRLKLAKELGATHTISPASGDVSKQVFAIVGEDGVDCAIEAVGIPATWNMCQDIVKPGGHIAVVGVHGQSVDFKLEKLWIKKLAITTGLVNANTTEMLMKAISSSSVDYTKMLTHRFKFSELEKAYDVFKHAAENQAMKVVLEAD

SEQ ID NO: 32041 - protein, 147 aa, Neisseria meningitidis; identical to SEQ ID NO: 2466

SEQ ID NO: 32042 - protein, 426 aa, Neisseria meningitidis; identical to SEQ ID NO: 5264

SEQ ID NO: 32043 - protein, 433 aa, Neisseria meningitidis
MYWERGLHMYKASAVVPTGYVRVGNTAPLVGEDTQQYASFWGDGYDVYRQLRWQQIPEKQRKAFKKAAKSKKTVMFAGREYGISKQNLSDVWDDFEDAMELKVFPCLSSLFLTKWHKNLYEYLEEYPFITRLCLENHGQTVLDFSNTRITDLSVDMTGVESLYLNEGLDSLNLKGEIKENCKVYTAEKGAGLILEVGKSVPKVRGLENLTAVNVMGIADFDMQNLSETYPKLKTIRLWGKPGNIANFSAVSGFEDLEVFTTVDLFGFGADDIPHPNRLPKLHRLWMSSLPEEAAKAVKKLYKKRKEDGLDLWIEKARKPEWLAQNFDNPFRDWDGAEHIPKSHAKKAAELYRKTRAGVVKLLGNPPGNIGEGLAEAVKAYTGGFNKMDKKHFIDTVEREDIAEALETILNLIPEGSCADKEKLFEIFDKNRNF

SEQ ID NO: 32044 - protein, 89 aa, Neisseria meningitidis
LYCLRLRRLVLIFVNPLYADAGDVYCVYNIRLKQYTACQVTRVEEHGGKKTRATLLALDWQGNKPLGAEELADLKPLYKDLKNNIGNIV

SEQ ID NO: 32045 - protein, 58 aa, Neisseria meningitidis; identical to SEQ ID NO: 1171

SEQ ID NO: 32046 - protein, 111 aa, Neisseria meningitidis
LYIIATTVPAQQTFLDAAELMQWSIETEGLGLNVISHKILGKDHAQVEFEAYFRDGQHRSAHHELSGFVNIGGQWYFIDPTVPHPAMKQPCICGSGKKFKACCGKYLKPVA

SEQ ID NO: 32047 - protein, 66 aa, Neisseria meningitidis
MAAPPDKKTIRNASDRSGLFSGASAASEHTAHAHIDLPSLAHRVHRRPLRLKIKLPSVVGITTQKK

SEQ ID NO: 32048 - protein, 66 aa, Neisseria meningitidis
VDTVGSLAIGYATGGNAGAFTDANADWNNRQLHSSEYKLAEQYADIVASRLNISKETCTVIYLGIN

SEQ ID NO: 32049 - protein, 64 aa, Neisseria meningitidis; identical to SEQ ID NO: 1873

SEQ ID NO: 32050 - protein, 139 aa, Neisseria meningitidis; identical to SEQ ID NO: 1180

SEQ ID NO: 32051 - protein, 67 aa, Neisseria meningitidis
MDTTLKHKAEALLGEPLLDEPVRPESWECCGSDCGDACIQTIYWADKARYDAQRRKLKEAGWSDDAV

SEQ ID NO: 32052 - protein, 68 aa, Neisseria meningitidis
MNIIGKLKEAASYFLTKLIGENPSNKQVNRALIQMPNVRPIHTYPRPNLRNSGVAAAKRAARKRKNRR

SEQ ID NO: 32053 - protein, 64 aa, Neisseria meningitidis; identical to SEQ ID NO: 631

SEQ ID NO: 32054 - protein, 142 aa, Neisseria meningitidis; identical to SEQ ID NO: 30108

SEQ ID NO: 32055 - protein, 65 aa, Neisseria meningitidis; identical to SEQ ID NO: 3913

SEQ ID NO: 32056 - protein, 69 aa, Neisseria meningitidis; identical to SEQ ID NO: 5143

SEQ ID NO: 32057 - protein, 264 aa, Neisseria meningitidis
MADILPSDKRRQPPKTKGSTMNIIEQEMKHSSLRKVDVEIAKIIADAHKINAESVKIAQESRWYPMMAATGLVTAIAAVLALIFKFAPQAPREALSPEQNEQSRTIQPLPRMDYRARRRKPFHYPLPLSPPDCQNPQADRRRMPGRALPPFRKRHHPLRFYFFRRKTGRRSPICRRPYRNLPPGSQKNMRNKINRNDMEFGYTPYNLRNRCKLIQAELAQIVGVKHYIQVGRWEAEPDTETRRADMPLEKWRQFLDWTEKTNAV

SEQ ID NO: 32058 - protein, 326 aa, Neisseria meningitidis; identical to SEQ ID NO: 1780

SEQ ID NO: 32059 - protein, 194 aa, Neisseria meningitidis
MNTDFQNILKQLGKQAQKEAAEKQAAEKNKQKQEQDFDFSQAVGQLSPLKNRQQYYAPPDKTPIKVRPKDNRADEENYFYIGSTYNDPPASFSKNGQGKTTSNAKTDTIPSLPMSTCTATHRKKPKKSSTNSSHSPKNAAYAAKSSTAADVPKATNPFKIPETGCNTPTYSPTPNPGKATTAASASCSNANGSK

SEQ ID NO: 32060 - protein, 100 aa, Neisseria meningitidis; identical to SEQ ID NO: 1890

SEQ ID NO: 32061 - protein, 73 aa, Neisseria meningitidis; identical to SEQ ID NO: 3916

SEQ ID NO: 32062 - protein, 72 aa, Neisseria meningitidis; identical to SEQ ID NO: 7897

SEQ ID NO: 32063 - protein, 220 aa, Neisseria meningitidis
MGRHFGRRRFLTVAAVAAAGAAVSFLPNPFAADDEKRNGDEKRNENVFFSGKVSRWVPVRSCACSAWITDRRRIWSTRFWRKWRVWKKLFSLYREDSLISRLNRDGYLTSPPADFLELLSLCRDIHALTGGAFDPTVQALWKLYADYFAARPDAETPPPENSVKEALKRVGFGKVSFDDREIRFAEKGMGLSLNGIAQGYSGLTKTSTALPRLSSKRTIL

SEQ ID NO: 32064 - protein, 74 aa, Neisseria meningitidis; identical to SEQ ID NO: 13735

SEQ ID NO: 32065 - protein, 707 aa, Neisseria meningitidis
MGKANAFTAPITVVNYDEQALNNTEARTLVDAVAKKDASVWQFGGESNTLTGLYFRGYQLDARQFSVNGLAGMYGTQGTASVQVGSAQLIKGASTAVNGMNPEGAVSGSVNIETKKAADEGNRKIGLGRFSNNRAQGTFDLGQRFGENKAFGVRANGKLRHGDTPRHGYSEDNKEFAVNADYRGETLRVAFDSIYAKRKTNGGRARMQDIQNAGGRLFGAPDGKTNLLPSWNWQNTAGQTNMLTFEWDAFDNAQITGGIGYNKARYYGTLISPTVCLNATSTCTDMQNTNASGKVTARNYDYNTGTARLTDQYFRTLSMNLTARGEFETSPVTHNWSTAFDRVIRQRKTIRGTAAGAGKVEVKANENIANQLASFKADYPNSWENSANLDANIKVNSLALSDTLGFVDNKYRLTLGGRFQAVEYTNKKKSQSGDAKRFSPMLMAAWVPQPDLVVYGNYMEDLEPADIKTDDSGETTMAKPRVSRQFEVGVRKNWGNFVTTLNAFQIKRPGYWRGHTTTKTTKGVTTTLTYGNNSDFARYKAQGGAAGDEQGMERNRGIEFNTYANLLNNTLRPTLGLMYLQSTVKEYPNSRDMLVNGVQVANPRVIAKAGLEWDTPFAKGLTLNGNVSYFGKSYQDTQKQYAFPSYTLIDVGARYKTKLGKNTLTVSSSVENLFNKNYWQVQRGQYDRSFAVVGMPRTYWLKAELDF

SEQ ID NO: 32066 - protein, 141 aa, Neisseria meningitidis
MINMKTSTVVFGGFFITDNGERIQIPVLENPGIKEINHFFSISNFEKKAGVLVFRIIPEPEFGNTELTIYFEKGYYLPMIQTILEGGDIEVKNLKTENYSGNTMEIWGDSYPIEHISKNISTIQNIISEFMIQKQTPAPII

SEQ ID NO: 32067 - protein, 112 aa, Neisseria meningitidis
LFVCFEKCLFPDFAIPIRFCAVRCVLARTCSKSDVVPVFEALIRDADFQYIFLSYNNEGLMSVGQVREIFERFGKYDLVQTEYRRFKADKTENRNHKANSTFEYLHILEKTF

SEQ ID NO: 32068 - protein, 68 aa, Neisseria meningitidis
MPSPQPSPTGEGEGCSRFCGCRRFERQLRFAAVVSGHLKNKKQPAQPVFLAEPLIPTATTSSLPVGES

SEQ ID NO: 32069 - protein, 71 aa, Neisseria meningitidis; identical to SEQ ID NO: 3926

SEQ ID NO: 32070 - protein, 58 aa, Neisseria meningitidis; identical to SEQ ID NO: 3077

SEQ ID NO: 32071 - protein, 229 aa, Neisseria meningitidis
  misc_feature 225, 226, 227: 'Xaa' is any amino acid
MHHFGRAATSCAAVWMRAFIKNYVLTLLFLKYVSDKHKQGGGMIELPAGTTFDDIVKLKNTADIGDRLNKIIAQIAEANDLKGVIDVTDFNDEDKLGKGKEMIDRLSRLVGIFKKLNLSSNQAEDDDLLGDAYEYLMRHFATESGKSKGQRPLQNSFPSRQPKSKHRFSAVFGCFRPRYLLILPKRPLNPARIPDNQASGLPFRRQRAHLACWRLSTGSNTSPSXXXHT

SEQ ID NO: 32072 - protein, 376 aa, Neisseria meningitidis
MKIVFITTVASSIYGFRAPVIKKLIGKNHQVYAFVSEFSDNELDIIREMGVTPVTYRSNRSGLNPFSDIKSTFLIFKELKKISPDLVFPYFAKPVIFGTFAAKLAGVPRIVGMLEGLGFAFTPQPEGIPLKTKIIKGILIALYHIALPMLESLIVLNPDDKDELTDKYGIKIKNIHILGGIGLDLRQYPYSEADIPDEKEPVKFLFIGRFLKEKGIDDFIRAAEQVKDKYPDTVFTALGAIDKSRGGGGDLERLAARDIIRFPGFVNNVSEVIKEHHIFVLPSYYREGVPRSTQEAMAVGRAVITTDVPGCRETVADKVNGFLIEPWNPRILAEKMIYFIENREAVRLMGNASYAIAKDKFDAEKVDLKLLDILKA

SEQ ID NO: 32073 - protein, 451 aa, Neisseria meningitidis
MSSPSNTNRQTSSRLTYILTVAGATVGFGATWRFPYLVGENGGGAYVFLFCIAMLVIGIPMILVENVIGRRKGVNALDAFGGPMNGKPIAKIWKLVGWMGFGAFGIMAYYMVLGGWVISYIVNIIGGNLNISSPVDGVVTKGFFAEHIDSPWEIAFYTLLFVAVNQWILVKGVIGGIEKAAKLMPLLFLFLIAMVVRNVTLPGAMEGVAFYLKPDFSKITAELFVFVLGQVFFALSLGFGVMITLSSYLDKNENLVQTAVITAITNTIIAILAGFMIFPSLFSFGVAPDSGPTLVFQSLPIVFSHMWARSVFAVIFFSLLLIAALTTSLTIYEVLITTIQEKTKIRRTAAITIVLAAIFIFGNIPSILSYGSWKDVLFGKNIFDAFDYISGNILFMLTALGFALFVGFVMKDEAKEELLYKGNHTTVNIWFAYVKYLVPLVILLIFVSNLF

SEQ ID NO: 32074 - protein, 97 aa, Neisseria meningitidis; identical to SEQ ID NO: 3898

SEQ ID NO: 32075 - protein, 51 aa, Neisseria meningitidis; identical to SEQ ID NO: 10821

SEQ ID NO: 32076 - protein, 141 aa, Neisseria meningitidis
MTENAQDKARQAVETVVKSPELVEQILSDEYVQIMIARRFHPLPPPSDLAQYNDIISNGADRIMAMAEKEQAVRHETIRQDQTFNRRGQLYGFISVILILLFAVFLVWSGYPATAASLVGGTVFALACAFVIGRSRDQGKN

SEQ ID NO: 32077 - protein, 337 aa, Neisseria meningitidis; identical to SEQ ID NO: 9915

SEQ ID NO: 32078 - protein, 390 aa, Neisseria meningitidis
MDLSIVVPIYNVESYLEACLNSIEPILSNENVELILVNDGSKDGSEDICYKYIDKTTNNKQQTTNNKQQTTNNKQQTTNNKQQTTNNKQQTTNNKQQTTNNKQQTTNNKQQTTNNKQQTTNNKHRTPNIKYIYQDNQGLSEARNTGIKNSNGKYIVFIDSDDFINCQVLLDFLSKDDIDMPDVVFLNAVKYDKGSVSYFGEDYQPEKILNQSKVEVLKGLCRFRKFPGSAWNKIIKRELIIKEKLFFEKGIYSEDVEWSMRLFNAATTFSYLDGCYYYYRQGREDSITGTVSEKSIKSLLYILEKNAEMEFNRDISSYLYSFLSYEYLVLLFIMTSKNIACDADIKRRAYHLRFMLLKSNKLIYKLIFPIITLFGVDITGRILKAIRGNI

SEQ ID NO: 32079 - protein, 149 aa, Neisseria meningitidis
MQTKALGTVDEIGDTVQQVGKQASGQKTSGGNPAIDSDPYSPSSVAARIEAGKARSDLQIKDILSNTTQRSKTKGPAVQYDKVGDYNDALNDFNSLNVRNVQTRPNGTITGNLPDGRAVNARNDSSGGEPTLEITISNNRNKIRYGNTR

SEQ ID NO: 32080 - protein, 351 aa, Neisseria meningitidis
MELKIDIATNNFKHGGGTERYTLDLVKGLNRQNITPAVYATKFDHGIPEYAMIEPHLVDQHRTLKKLRSFLFSSRLAQTRKNSAAKLIACHHADYADLLICGGTHLGYLHHMAQKPNLLDRLAIRRNRSNYATAKLIMAHSHMMRRELVGLYGVPPERIQVPPPPADTERFFPQPGETADLRAKYGFADHETVFLFPSTGHTRKGLELLADFFEHTGLPVKLAVVGSPLPRPMKNVVGLGFCTDMPELYRAADFTIMASLYEPFGLVGVESVLCGTRVVLSENMACAEVMNEEAGFFFSRQNPETLAQAVAQAVSLKKQGGHRLSDPMRALNYNPSLSHHIDRLTDMLASV

SEQ ID NO: 32081 - protein, 615 aa, Neisseria meningitidis
MHDTRTMMIKPTALLLPALFFFPHAYAPAADLSENKAAGFALFKNKSPDTESVKLKPKFPVRIDTQDSEIKDMVEEHLPLITQQQEEVSDKEQTGFLAEEAPDNVKTMLRSKGYFSSKVSLTEKDGAYTVHITPGPRTKIANVGVAILGDILSDGNLAEYYRNALENWQQPVGSDFDQDSWENSKTSVLGAVTRKGYPLAKLGNTRAAVNPDTATVDLNVVVDSGRPIAFGDFEITGTQRYPEQIVSGLARFQPGTPYDLDLLLDFQQALEQNGHYSGASVQADFDRLQGDRVPVKVSVTEVKRHKLETGIRLDSEYGLGGKIAYDYYNLFNKGYIGSVVWDMDKYETTLAAGISQPRNYRGNYWTSNVSYNRSTTQNLEKRAFSGGIWYVRDRAGIDARLGAEFLAEGRKIPGSDIDLGNSHATMLTASWKRQLLNNVLHPENGHYLDGKIGTTLGTFLSSTALIRTSARAGYFFTPENKKLGTFIIRGQAGYTVARDNADVPSGLMFRSGGASSVRGYELDSIGLAGPNGSVLPERALLVGSLEYQLPFTRTLSGAVFHDMGDAAANFKRMKLKHGSGLGVRWFSPLAPFSFDIAYGHSDKKIRWHISLGTRF

SEQ ID NO: 32082 - protein, 548 aa, Neisseria meningitidis; identical to SEQ ID NO: 3866

SEQ ID NO: 32083 - protein, 188 aa, Neisseria meningitidis
MTDFSWETAPFGATVDHIVDQIRTRRRSRRQYKYGKARQRRTGLNLIHYILQRYHNVHRAQFEELVPLAQKVAQVHADTFPAEIAELLAYMQNELLMHMMKEERMLFPMINQGVGRGATMPISVMMHEHEEHDRAIARLKELTDNFQAPEGACGSWTRLYVLTKEMVDDLNDHIHLENDILFARVLDS

SEQ ID NO: 32084 - protein, 793 aa, Neisseria meningitidis
MNKNIKSLNLREKDPFLSREKQRYEHPLPSREWIIELLERKGVPSKIESLARELSITEDEYVFFERRLKAMARDGQVLINRRGAVCAADKLDLVKCRVEAHKDGFGFAVPLTPAKDGDFVLYERQMRGIMHGDIVTVRPAGMDRRGRREGTVLDIVERAQSKVVGRFYMDRGVAILEPEDKRLNQSIVLEPDGVARFKPESGQVIVGEIEVYPEQNRPAVAKIIEVLGDYADSGMEIEIAVRKHHLPHQFSEACAKAVKKIPDHVRKSDLKGRVDLRDLPLVTIDGETARDFDDAVFAEKIGRNYRLVVAIADVSHYVRPDDAIDTDAQERSTSVYFPRRVIPMLPENLSNGICSLNPNVERLCMVCDMVITYAGNIKEYRFYPAVMRSHARLTYNQVWKWLSGGIGHPFKAQIDTLYKLFKILQKKRFERGAVEFDSIETQMLFDDNGKIEKIVPVVRNDAHKLIEECMLAANVCAADFLLKNKHTALFRNHLGPTPEKLAALREQFGLLGLQLGGGDNPSPKDYAALAGQFKGRPDAELLQVMMLRSMQQAVYEPHCDGHFGLAYEAYAHFTSPIRRYPDLTVHRAIKAVLNQQTYTPKKGQALGVHTSFCERRADDASRDVENWLKTYYMRDKVGEIFEGKISGVANFGIFVTLDDIHIDGLVHISDLGEDYFNFRPEIMAIEGERSGIRFNMGDRVAIKVARADLDDGKIDFVLIAEGSGRGRKVKSSASAKPAGTAGKGKPKTAAGKKTARGGKVRGRGASAAAESGKKAKKPIPIEVQKVKKRKGKS

SEQ ID NO: 32085 - protein, 760 aa, Neisseria meningitidis
MTVFRICFIIRLFLKYLGWGDVFRRWFLPCWVIGVAASFALPVVPHWLFWLAAFAVFAVFARRFAFAGLMLCVLAGAAYGVFRTEAALSSQWRAEAVSGVPLTVEVADMPRSDGRRVQFAAKAVDSGGRTFDLLLSDYKRREWAVGSRWRITARVHPVVGELNLRGLNREAWALSNGIGGAGTVGADRVLLHGGSGWGIAVWRSRISRNWQQADADGGLSDGIGLMRALSVGEQSALRPELWQAFRPLGLTHLVSISGLHVTMVAVLFAWLAKRLLACSPRLPARPRVWVLVAGCAGALFYALLAGFSVPTQRSVLMLAAFAWAWRRGRLSAWATWWQALAAVLLFDPLAVLGVGTWLSFGLVAALIWACSGRLHEGKRQTALRGQWAASVLSLVLLGYLFASLPLISPLVNAVAIPWFSWVLTPLALLGSVVPFAPLQQLGAFLAEYTLRFLVWLADVSPEFAVASAPLPLLVLAVCAALLLLLPRGLGLRPWAVLLLAGFVFYRSPGVPENEVAVTVWDAGQGLSVSVQTANHHLLFDTGTAAAAQMGIVPSLNASGIRYLDYLVLSHHDSDHDGGFQAVGKIPNSGIYAGQPEFYEGARHCAEQRWQWDGVDFEFLMPSERKNIDDNGKSCVLRVVAGGAALLVTGDLDTKGEESLVGKYGGNLYSQVLVLGHHGSNTSSSGVFLNAVSPEYAVASSGYANAYKHPTEAVQNRVRAHGIKLLRTDLSGALQFGLGRGGVKAQRLRGYKFYWQKKPFE

SEQ ID NO: 32086 - protein, 357 aa, Neisseria meningitidis
MQNNSYGYAVSVRVGGKEHRHWERYDIDSDFLIPADSFDFVIGRLGPEAAIPDLSGESCEVVIDGQIVMTQRHGKSKGGRELSLSGRDLAGFLVDCSAPQLNVKGMTVLDAAKKLAAPWPQIKAVVLKAENNPALDKIDIEPGETVWQALTHIANSVGLYPWLEPDGTLVVGGADYSSPPVATLCWSRTDSRRNIERMDIEWDTDNRFSEVTFLAQSHGRSGDSAKHDLKWVYKDPTMTLHRPKTVVVSDADNLAALQKQAKKQLADWRLEGLTLTITVGGHKTRDGVLWQPGQRVHVIDDEHGIDAVFFLMGRRFMLSRMDGTQTELRLKEDGIWTPDAYPKRPRRRASAKANAKA

SEQ ID NO: 32087 - protein, 156 aa, Neisseria meningitidis
MFVNEKDPYAALFAGLVFLTLPFALAVHDAFALAFGRAGLLVSVGRRGGWDGTVWFVFGVFAFLNLVVSAGLTKLAYKKMMRRHSRYALFLSGVAACAAAAVAWIFELLLGNAALGGLRGEAVSEYAFAVWLVAMLTLPKHLTRAPVQPVVFHRKK

SEQ ID NO: 32088 - protein, 300 aa, Neisseria meningitidis
MNPAMIERLKAVENQAEAMGRGARSAYLKQQAQELGISLATLYRKLEAVSIKPTRKRRSDAGKTELKTEEAKLISAVLVEAMRRNGKRLMSVRQAVEMLRANGKIEAARIDGETGEVIPSVRTAFRPLARHRPHRPVMAHPRRRHEDQTPLYRPTVGLGGRNTPRAAHTDRRQHPPFPRHPPTAQTRPPPDHISIKFAHNAIRRLGYDGSTPGKSKHTMHGFRHLFTNISLTAGKDTITTDLALGHISRAALQRAGFSSLHHYLTADSYRLQERHELAEWYSRRHRQAYEAAAQNTCNKT

SEQ ID NO: 32089 - protein, 248 aa, Neisseria meningitidis
MVLRRDFLAWCDETLQTASFKDYAPNGLQVEGREYIGKIVTSVTASRAAIDFAVEQKADLLLVHHGMFWKNELPTVTGWKKRIAALLRHDINMAGYHLPLDAHPTLGNNAQLADRLGFATEKRFGEQNLLNSGSLKQAKTLGALAAHIETVLQRKPVVIGKPEREIRRVAWCSGGAQGFFQTAIDEGVDLYLTGEISEAQYHLANETGTAFISAGHHATERYGVRALAESAAEVFGLEVCHFDENNPA

SEQ ID NO: 32090 - protein, 589 aa, Neisseria meningitidis
MIPSDFIDELLAKTDIVDIIDEQVPLKKGGANYMACCPFHKEKTPSFSVSPTKQFYHCFSCGAHGSAIGFVMEHQGLSFPEAVQFLADRVGMIVPKVRGQNDNPEVRAERKKKQQTLEETTAAAADFYAQQLKFNPAAKAYLDKRGLSAEVIAHYGLGYAPDGWQPLTQVFQPYPNTALVDTGMVIDNEGRYYDRFRHRIMFPIRNPRGQVIGFGGRVLDDSKPKYLNSPDTPLFDKGKNLYGLYEGRAAVKEVGRILVVEGYMDVVALAQFGVGYGVAALGTATTAEHVKILMRQADSIYFCFDGDSAGRKAAWRALENALPQLKDDKSLHFLFLPEEHDPDSYIRAYGKAQFEDALLNQSKPLSEYFWEHLSDGIHLNTQEGKAELVKTSSPLLAQITAPALAYLLKQRLSELVGIDPDNLAQLLGQEAPKRHVKQNYKLPPISVKQPVMPTLVQRQIRSLLINPDWAAYIDLPDYLALDGDFACLANLAETIKNHPSVPATAQVLEHMRGSPYEETINRIFRSALQSEEMEGGGEEDCENFQIGIKKLLNELKYSQIETLKQKSLQSGLNESEKKLLLSLLTAKQN

SEQ ID NO: 32091 - protein, 860 aa, Neisseria meningitidis
MKNQYSKSLHGVFYLAFYDKIHAFFAEQLFQLIINMNKKPTYISLFSSAGVGCYGFKTNGFECVATNELLEKRLKIQKYNQKCRFDSGYIAGDITLPETQAKLFAEIRRWNTEIDVVIATPPCQGMSVANHKKNNEMARNSLVVESIKIVREVQPKFFIFENVKAFLNTPCTDTDHQEKPIEEAIWSNLGGHYNILSNVLNFKDYGANSSRTRTLVIGVRKDIHHITPYDIFPKQTPPKTLRTLLADLPPLMQMGEISDDDIYHSYREFDPRMLPWIAQLKEGESAFQNTDPARIPHQIKNGEIIYNQNKNGDKYARWFLDREGPCIHTRNDILASQNTIHPTENRVFSVRELMRMMSIPPSFKWTAQDEKQLNALSFDEKKTFLKKEELNIRHCIGESVPTAVLANVAQNIQAALQQSELSMTEIQNLIKRENLSLADNLYRFIEQHFDAYPFSRLLQIAEYANAARSETAAYFTRIDIAFGLVNALPDFKKKNLRILEPSVGIGNFIPLLAKKYADKEKVIFDLVDIDSNSLNLLSLLLKKLNLGSKFEFNIIHQDFLTATLPENYDLVIGNPPYGKVKASDKNLALYRKNATNKDTQNIFSFFIDKALTLSKTVALVVPKSVINAPEFQITRQQLITANINRIIDYGEKAFKGVKIETIAFIADQTDKDNQHITIESHIQETLIQNCKNYFFDNFPYWLIYRNSEFDQIAQKLEFNVFQSFRDRQITKAHTQNSGNVRVLKSRNIGNNEIIDIEGYDSYVDSVAPFSVGKFINRKNVVMIPNLTYKPRAAFLPENSIADGSVALLTMKKHEKILTQRDLAYYATPEFEQFYRVARNYGSRSMNIDNHSVFFFGLLKD

SEQ ID NO: 32092 - protein, 188 aa, Neisseria meningitidis
MAEFATIARPYAKALFGLAQEKNQIESWLGGLEKLAAVVQEGKVASLIDRPETNASEKADILIDLVGLKDKELKNFVIVLAGQKRLSILPEVYAQYQDLTLSFNHIKSAIIYSAYPLTDKQVGELAQMLNKRFDSELKISVEIEPELIGGIKVEVGDQVLDLSVQRKLSALYTTMTNESFHAASCNRF

SEQ ID NO: 32093 - protein, 290 aa, Neisseria meningitidis
VKGLDYCRQKAEESRSSFLSGFRFLTQEKRDAVTVLYAFCRELDDVVDECSNPDVAQATLNWWRGDLDKVFGGAMPEHPVNQALRQVKETFKLPKYELEALIDGMQMDLLRVRYGSFEELKLYCRRVAGVVGCLIARILGFSDDQTLEYADKMGLALQLTNIIRDVGEDARRGRIYLPMEEMRRFDVPASVILQCSPTGNFAELMAFQIKRARETYREAVSLLPAADKKAQKVGLVMAAVYYELLNEIDRDGAQNVLKYKIALPSPRKKRIALKTWLFGFKPRPGTPERA

SEQ ID NO: 32094 - protein, 428 aa, Neisseria meningitidis [sequence omitted]

SEQ ID NO: 32095 - protein, 410 aa, Neisseria meningitidis
VIASLTGAAVGGTPVDAQTGGAVGQNAVENNLYLTSEALKKDKQTARKIYSVIKEQVKHECSSTGRITECRQNIGRIIEFTQDKRFDSRFKDKESLYYLNKHPDLVASYLKAEYEKLDREDKSILHRYISPGAEIVSGSLGVVLSGVAGGGSCAETFGLGCAAALVGVTSSYDHVITGTKNFGKKASEQRPTIAVQALKQLGLSEQAAEYVQFSIDLFSVGKSGGGIPKAKPVFDAKPRWEVDRKLNKLTTREQVEKNVQETRRRSQSSQFKAHAQREWENKTGLDFNHFIGGDINKKGTVTGGHSLTRGDVRVIQQTSAPDKHGVYQATVEIKKPDGSWEVKTKKGGKVMTKHTMFPKDWDEARIRAEVTSAWESRIMLKDNKWQGTSKSGIKIEGFTEPNRTAYPIYE

SEQ ID NO: 32096 - protein, 271 aa, Neisseria meningitidis
MAHYAIGDIQGCFDELTALLGKIGFNHGTDTLWLTGDIVNRGPKSLETLQFCIRHENSVQIVLGNHDLHLLAVGCGEGAPKRSDTIEPILKHPDGKKCSTGCARNRCYARAAAWYTPASCRNGASPKPNRSLEKPKPNCAAKNTSNSSPKCTATNRPRGTKVWKAMPACASSSTPSRGCAPPLKTNWISTTNPQKKCRLTCARGSKPPTGKTSSTIIFGHWSSLGYTNADNVISLDTGALWGGQLTAVNLETEEITQVQAAGGIDWKSFAK

SEQ ID NO: 32097 - protein, 215 aa, Neisseria meningitidis
MPSEPPSDGIARHPKSTIKIKKPNKPFRLTPKLLIRVVLLICITAIGALAIGIVSTFNPNGGKTLQTEPQHTDSPRETEFWLPNGVVGQDAAQPEHHHAASSEPAQPDGTDESGSGLPSPAAPKKNRVKPQPADTAQTDRQPDDAGTQAENTLKETPVLPTNVPRPEPRKETPEKQAQPKETPKEKETPKENHTKPDTPKNTPPKPHKEILDNLF

SEQ ID NO: 32098 - protein, 68 aa, Neisseria meningitidis; identical to SEQ ID NO: 531

SEQ ID NO: 32099 - protein, 135 aa, Neisseria meningitidis
MTTYTIPKDYQFLYIYEGTLLNYTLKNDEFHIIVQNVDYPDFPQEIPTPNYTDWVKIKFKQFSYLKFIYGYATKNQDKNIKNVLELGELKQDDEILDYGGALEVIGSRYDLPTGFSIDIVCREIELEFLDQESFN

SEQ ID NO: 32100 - protein, 64 aa, Neisseria meningitidis; identical to SEQ ID NO: 11919

SEQ ID NO: 32101 - protein, 160 aa, Neisseria meningitidis
MKYRFYRNGGTYFFTVVANKRQKILTDDAVRLALRQAVMAVRERYPFEILAWVLMPDHLHTIWRLPDNDSAYSERWRQRHSQYLIGGNLRLWQKRFWEHTIRDEADFSCHFDYLHFNPVKHGYVGQISDWRFSTFHRYVKQGIYPHNWGGGNADFSIEYD

SEQ ID NO: 32102 - protein, 164 aa, Neisseria meningitidis
VKDSLMDAFDFFMQGNFKKIATEQGLDRKYFIFQYIVCNLSAISSFCLMKIIHTYTILYINGFLLRSKVLSIVKNKQKFLSDMFPLEMPFFFVEYKIPILARFLNRGMKWLYLPSFFCLVAICFSIYILNEEGGWMPYFACYWFGLCYPVSTYYVFLSRDYKHI

SEQ ID NO: 32103 - protein, 268 aa, Neisseria meningitidis
VFTCAMIALTGTAAAAQELQTANEFTVHTDLSSISSTRAFLKEKHKAAKHIGVRADIPFDANQGIRLEAGFGRSKKNIINLETDENKLGKTKNVKLPTGVPENRIDLYTGYTYTQTLSDSLNFRVGAGLGFESSKDSIKTTKHTLHSSRQSWLAKVHADLLSQLGNGWYINPWSEVKFDLNSRYKLNTGVTNLKKDINQKTNGWGFGLGANIGKKLGESASIEAGPFYKQRTYKESGEFSVTTKSGDVSLTIPKTSIREYGLRVGIKF

SEQ ID NO: 32104 - protein, 122 aa, Neisseria meningitidis
MRFYIDNKECDYIFFRKAVNISDDFIQSGFITPEGLITKNSNPKLFNQYSKMVSNKCQYEMVTFLSDEMKNIIELLSNDDAYIEFAYSEDFYVLPEIEIDKRTLKSLNFYIDFGVKYIINKI

SEQ ID NO: 32105 - protein, 156 aa, Neisseria meningitidis
MKKQITEATMMLSIIAPMANGLDNQAFEDQVFHTRADAPMQLAELSQKEMKETEGAFLPIVAGALMGGAISAWANHGISKIKTGQFASTRSTLAATAGGMIGGGYSSAMLRGAGITTSVFARSAWKGGNAIPNAVIRANGAALNQSSSAAMGKHRR

SEQ ID NO: 32106 - protein, 433 aa, Neisseria meningitidis
MWTGFFSKSGTGIAEERHQNRRACTDVPLLAERNSKHPDRPLRFCKIWIKFKPVQRCLALPYYLYCLRLRRLVLIFVNPLYRQSGLDIYAWHGMYFFPRFPFIHIDRIRWVCAGLKAFKHYIRENGLPDLIHAHCMNYAGILAFKISQKYGIPYVVTEHSSTITRGLVRPHQWQPMKNAAAHAAARLAVSRHFAHVLQHKYGCEWQYLPNILGGIFNRPFEQREKNNKPHFVFCTVSHLRRLKGHDVLLTAFARALAQCPQLRLNIGGSGQEEQRLKQQAADLGITHAVTFLGALQPEAVLDLMRNSDAFVLASRTETFGVVYIEALSQGLPVIATRCGGAESIVSDGNGYLVPVDDDDALADALIKMYEHHSDFEPARLRENCLNEFGENAVIGRLIGIFRQAIAEYGKKIPVKYSGLTKIRTRRRSRRQYK

SEQ ID NO: 32107 - protein, 116 aa, Neisseria meningitidis
VFAVIFFSTLGYILAWIRDIPKIKSKKILARSLYIIGIINVIIGYVLIKNILVSVSDGGGIKYVAIYLSNFFWTVLMYVLVKRLSKKPSLNPVHNSSIKIPFARNNDNIQIAGFAI

SEQ ID NO: 32108 - protein, 717 aa, Neisseria meningitidis
MPVPQPTAPYDPLTAEARTLLFHTASYLKPEEQAELEKAVAYAFRAHDGQTRKSGEPYITHPIAVATQLAVWHMDVQGLCAGVMHDVLEDTGVTKGEMAAVFGNTIAEMVDGLSKLEKLKFEDHAEHQAESFRKLILAMTKDVRVIVVKLADRLHNMRTLGSMRPDKRRRIARETLEIYAQIANRIGLNNAYQELQDLSFQNLHPNRYETLKKMDKSRKNRQDVVGKVLRAFGQRLVGANIEAKIKGREKNLYGIHQKMMAKKLRFAEVMDIYGFRVIVNSIPACYAALGALHTLYQPKPGRFKDYIAIPKSNGYQSLHTTLVGPYGLPIEVQIRTKEMDAVAEGGIAGHWSYKSYSKMVDQAVLHTNRWLKNILDLQASSANAIEFLEHVKVDLFPNEIYILTPKGKILTLPKGATPVDFAYAVHTDIGHKTVAARINNIMMPLRTKLKTGDSVEIITSEHAKPNPAWLNFAVSGRARSAIRQYIKNLNRHDAVVLGESLLQKALSSLLPKDVLLSDGIKEKYLADLNDKQTSFEEVLYNVGMGHTLPVYVAMHIAELAGEHFGSEVRLSSIKVDGQESGHIHFAECCHPVPGDSIRLLLVKGKGMIIHRDTCPTLLKSDPEQQLDADWENMNGQNYRVGLQVQSEDSHGLLALMAQAISDSGADIESVETPSKSQSGTEGFVEFKFLLKVKNLNQLNQIIQNLHSIPYIRKVIRS

SEQ ID NO: 32109 - protein, 374 aa, Neisseria meningitidis
LPRNFIHRPQSWFKWDKDNGLLLRTRENPEGEALWPLGWVVHTQKSRSVQQARNGLFRTLSWLYMFKHYAVHDFAEFLELYGMPIRIGKYGAGATKEENTLLRAVAEIGHNAAGIMPEGMEIELHNAASGTMATSNPFLQMADWCEKSAARLILGQTLTSGADGKSSTNALGNIHNEVRRDLLVSDAKQVAQTITSQIIGPFLQINYPNADPNRVPKFEFDTREPKDIAVFADAIPKLVDVGVQIPESWVRDKLVIPDVQEGEAVLVRQVPDNPVNRTALAALSAHTVPSKATGRHQEILDGALDDALVEPDFNSQLNPMVRQAVAALNACNSYEEADAALNALYPNLDNAKLRTYMQQALFISDILGQDHARA

SEQ ID NO: 32110 - protein, 141 aa, Neisseria meningitidis; identical to SEQ ID NO: 5900

SEQ ID NO: 32111 - protein, 91 aa, Neisseria meningitidis; identical to SEQ ID NO: 3956

SEQ ID NO: 32112 - protein, 462 aa, Neisseria meningitidis
MTPSALKKTVLLLGTAFAAASAQASGYHFGTQSVNAQSTANAAAAEAADASTIFYNPAGLTKLDSSQISVNANIVLPSIHYEADSATDFTGLPVQGSKSGKITKTTVAPHIYGAYKVNDNLTVGLGVYVPFGSATEYEKDSVLRHNINKLGLTSIAVEPVAAWKLNERHSFGAGIIAQHTSAELRKYADWGIMEKAKALKETPPNPTKAAQIKADGHADVKGSDWGFGYQLAWMWDINDRARVGVNYRSKVSHTLKGDAEWAADGAAAKAMWSTMLAANGYTANEKARVKIVTPESLSVHGMYKVSDKADLFGDVTWTRHSRFDKAELVFEKEKTIVNGKSDRTTITNWRNTYKVGFGGSYQISEPLQLRAGIAFDKSPVRNADYRMNSLPDGNRIWFSAGMKYHIGKNHVVDAAYTHIHINDTSYRTAKASGNDVDSKGASSARFKNHADIIGLQYTYKFK

SEQ ID NO: 32113 - protein, 713 aa, Neisseria meningitidis
MNAPFFRLSLLSLTLAAGFAHAAENNANVALDTVTVKGDRQGSKIRTNIVTLQQKDESTATDMRELLKEEPSIDFGGGNGTSQFLTLRGMGQNSVDIKVDNAYSDSQILYHQGRFIVDPALVKVVSVQKGAGSASAGIGATNGAIIAKTVDAQDLLKGLDKNWGVRLNSGFASNEGVSYGASVFGKEGNFDGLFSYNRNDEKDYEAGKGFRNVNGGKTVPYSALDKRSYLAKIGTTFGDGDHRIVLSHMKDQHRGIRTVREEFTVGDKSSRINIDRQAPAYRETTQSNTNLAYTGKNLGFVEKLDANAYVLEKERYSADDSRTGYAGNVKGPNHTQITTRGMNFNFDSRLAEQTLLKYGINYRHQEIKPQAFLNGEFKISDKKKTTTEQKSKNRKNENIAKAYRLSNPTKTDTGAYIEAIHEIDGFTLTGGLRYDRFKVKTHDGKTVSSSNLNPSFGVIWQPHEHWSFSASHNYASRSPRLYDALQTHGKRGIISIADGTKAERARNTEIGFNYNDGTFAANGSYFWQTIKDALANPQNRHDSVAVREAVNAGYIKNHGYELGASYRTGGLTAKVGVSHSKPRFYDTHKDKLLSANPEFGAQVGRTWTASLAYRFQNPNLEIGWRGRYVQKAVGSILVAGQKGRDGKFENVVRQGFGVNDVFANWKPLGKDTLNVNLSVNNVFNKFYYPHSQRWNNTLPGVGRDVRLGVNYKF

SEQ ID NO: 32114 - protein, 702 aa, Neisseria meningitidis
MTLKASKQASKQASKQASKQASGRVNLLTLSVLSLFCTPYVGSDAYDPVKEAEIKNKFILEAAEDRNSHVWRGPCSISFDCFGMFRAQLGSNTRSTKIGDDADFSFSDKPKPGTSHYFSSGKTDQNSSEYGYDEINIQGKNYNSGILAVDNMPVVKKYITDTYGDNLKDAVKKQLQDLYKTRPEVWEENKKRTEEAYIEQLGPKFSILKQKNPDLINKLVEDSVLTPHSNTSQTSLNNIFNKKLHVKIENKSHVAGQVLELTKMTLKDSLWEPRRHSDIHTLETSDNARIRLNTKDEKLTVHKAYQGGADFLFGYDVRESDEPALTFEQNVSGKSNVVLERRPENLKTLDGRKLIAAEKADPNSFAFKQNYRQGLYELLLKQCEGGFCLGVQRLAIPEAEAVLYAQQAYAANTLFGLRAADRGDDVYAADPSRQKLWLRFIGGRSHQNIRGGAAADGRRKGVQIGGEVFVRQNEGSRLAIGVMGGRAGQHASVNGKGGAAGSYLHGYGGGVYAAWHQLRDKQTGAYLDGWLQYQRFKHRINDENRAERYKTKGWTASVEGGYNALVAEGVVGKGNNVRFYLQPQAQFTYLGVNGGFTDSEGTAVGLLGSGQWQSRAGIRAKTRFALRNGVNLQPFAAFNVLHRSKSFGVEMDGEKQTLAGRTALEGRFGIEAGWKGHMSARIGYGKRTDGDKEAALSLKWLF

SEQ ID NO: 32115 - protein, 276 aa, Neisseria meningitidis
MGRVSYLCVDAAEQALTDAGLLGDESITDGRMGVACGSSSGSTKDIGDVGELLLTGMSRNFSANTYVRMMPHSRNGEPEKTPRPYDANRDGLVIGEGAGIFVLEELEHAKRRGAIIYAELVGYGANSDAYHISTPRPDAQGAILAFQTALQHAGLAPEDIGWINLHGTGTHHNDSMESRAVAAVFGNNTPCTSTKPQTGHTLGAAGAIEAAFAWGIADRQSNPEGKLPPQLWDGQNDPNLPAINLTGSGSRWETEKRITASSSFAFGGSNCVLIIG

SEQ ID NO: 32116 - protein, 671 aa, Neisseria meningitidis
MKLEASKHKQKFKKSFIVSLFFLFFNTSPLLAVDYVYDNSKLTNEQIDRLKKLRDKTSEYWKKETYLITGDNPKVPSVPALYPRTYQFENINNSKKISFYDQKYTEDYLVGFARGLGVAKRNGDTEEPIRKYFKKCFNTELDDYSTCRAEQFGSHPLVVNSHIFSLGPEIKNSHINSEILSVGNYIEWLRPTLNKLTGWQEQLYSGLDPFHYIKVTDNSHVIGQTISLDQFRLENSLWEPRWDSDVGELKTTNADIRFNTKSESLLVKEDYAGGARFRFAYDPKEAKNTALIFEKNVTGTSNIIFENPIDDLKSLDGHQIIKVNGTADKHAFRLSGKHQKGIYTLSLQQRPEGFFTKVQERDDIAIYAQQAQAANTLFALRLNDKNSDIFDRTLPRKGLWLRVIDGHSKQWVQGKTAPVEGYRKGVQLGGEVFTWQNESNQLSIGLMGGQAEQRSTFRNPDTDNLTTGNVKGFGAGVYATWHQLQDKQTGAYADSWVQYQRFRHRINTEDATERFTSKGITASIEAGYNALLAEHFTEKGNRVRFYLQPQAQLTYLGVNGKFSDSENAHVNLLGSRQLQSRVGVQAKAQFSLYKNIAIEPFAAVNALYHNKPFGVEMDGERRVINNKTAIESQLGVAVKIKSHLTLQATFNRQTSKHHQAKQGALNLQWTF

SEQ ID NO: 32117 - protein, 119 aa, Neisseria meningitidis; identical to SEQ ID NO: 1252

SEQ ID NO: 32118 - protein, 68 aa, Neisseria meningitidis; identical to SEQ ID NO: 3911

SEQ ID NO: 32119 - protein, 103 aa, Neisseria meningitidis
MLPVILGSPEIAFPRINALSFWVTFVSLFMVYQSFFVGSGPGGGWTLYPPLSVEGQPELSLDSIVLGLHTVGLGSLLGAINFMITTQNIRSTAVTLDQVRMFV

SEQ ID NO: 32120 - protein, 165 aa, Neisseria meningitidis
  misc_feature 159, 160: 'Xaa' is any amino acid
MQQQHLFRLNILCLSLMTALPVYAENVQAGQAQEKQLDTIQVKAKKQKTRRDNEVTGLGKLVKTADTLSKEQVLDIRDLTRYDPGIAVVEQGRGASSGYSIRGMDKNRVSLTVDGLAQIQSYTAQAALGGTRTAGSSGAINEIEYENVKAVEISKGSNXXTHLIN

SEQ ID NO: 32121 - protein, 42 aa, Neisseria meningitidis
LVSFYYSVYILVGFLLGNKVGYVFDGRSVVCLPLVFIIYNFF

SEQ ID NO: 32122 - protein, 129 aa, Neisseria meningitidis; identical to SEQ ID NO: 4806

SEQ ID NO: 32123 - protein, 139 aa, Neisseria meningitidis
MKKMFLSAVLLLSAATRTVWADTVFSCKTDNNKYIEVQKINRNLYEYSFGSAAKKEIAIRNSKADLLGRSDRWQGMGSGRWATMKFQNGEFMYTIWTGFDSVTHTESSGVVVERRGKEVARVGCTPKTAQANFNDDDFS

SEQ ID NO: 32124 - protein, 134 aa, Neisseria meningitidis
  misc_feature 2, 3, 4: 'Xaa' is any amino acid
VXXXFGADITQYKNILETFMYEPPDEFRTEYYESPDSNLLIAVKKNKIISIFCYQELYFMGVNLIGLNFEDFKQLFHHPKSYGVDEYYLSNESYPTYVYEFDEIGVQAWEAKGKVVTIIAGGKDNYSTEPYYDE

SEQ ID NO: 32125 - protein, 203 aa, Neisseria meningitidis
LGGVAGFEKNTREAVDRWIQENPNAAETVEAVFNVAAAAKVAKLAKAEKAGKAAVSGDFSIGYKNFSTVKPKVIAKGTINGKTFRDVNQSAKIGSPDSPTLIAQRVNAKIQADGKPRPNATVANSHAEIDVIQQAYNAGKTKGGSMTMTVSGKDVCGYCKGDIAAAAQASGLKSLTVNATDDVTGKNKTYYWTPGMKSIKERK

SEQ ID NO: 32126 - protein, 107 aa, Neisseria meningitidis; identical to SEQ ID NO: 15201

SEQ ID NO: 32127 - protein, 220 aa, Neisseria meningitidis
  misc_feature 2, 3, 4: 'Xaa' is any amino acid
VXXXDTFMGLRDFLKDGEWPKRLAAYSPEGPPAEIHEQFMLAAENTLNIFAQKGYLGLDEFITSNIPKEQQDKMQGYFYEMLYGVMNAALDETIRRYGLPEWQQDEARNRFLLHSMDAYTGLTEYPAPMLLQLDGFSEVRSSGLQMTRSPGALLVYLGSVLLVLGTVLMFYVREKRAWVLFSDGKIRFAMSSARSERDLQKEFPKHVESLQRLGKDLNHD

SEQ ID NO: 32128 - protein, 203 aa, Neisseria meningitidis
  misc_feature 2, 3: 'Xaa' is any amino acid
VXXRRDFASGPCAAVAFAVGFAAYSEMLPQRAAVAFVLAKVAVNGAVVERDLVVFAQVGAYLFGTEFAADKGVDVLNQLRIELIGLSLTLFDSLALPLGFFGAVLLPLGAVPSDFAADGAFVAVQLFGDFGDGAVAGQVLDVVSFALGQLRVAHGNLSCRKGRMLPHTGLFLLGKVALQMRIRRRLKSKFQTAFCVCRACNQF

SEQ ID NO: 32129 - protein, 150 aa, Neisseria meningitidis; identical to SEQ ID NO: 7624

SEQ ID NO: 32130 - protein, 138 aa, Neisseria meningitidis
MKTSTIVFGGFFITDNGERIQIPILENPNIKEINNFFSVSNFEKKAGVLVFRIIPEPEFGNTELTIYFEKGYYLPIIQTILEDGDIEVKNLKTENYSGNTMEILGEVYPIEHISKNISIIQDIISKFIIKNKPITIMI

SEQ ID NO: 32131 - protein, 290 aa, Neisseria meningitidis; identical to SEQ ID NO: 15300

SEQ ID NO: 32132 - protein, 498 aa, Neisseria meningitidis
MNLPIQKFMMLFAAAISLLQIPISHANGLDARLRDDMQAKHYEPGGKYHLFGNARGSVKNRVYAVQTFDATAVGPILPITHERTGFEGVIGYETHFSGHGHEVHSPFDNHDSRSTSDFSGGVDGGFTVYQLHRTGSEIHPEDGYDGPQGSDYPPPGGARDIYSYYVKGTSTKTKINTVPQAPFSDRWLKENAGAASGFLSRADEAGKLIWENDPNQNWWGNRMDDIRGIIQGAANPFLTGFQGLGVGAITDSAVNPVTYAAARKTLQGIHNLGNLSPEAQLAAATALQDSAFAVKDSINSARQWADAHPNITATAQTALSVAEAAGTVWGGKKVELNPTKWDWVKNTDYKTPAARPMQTLDGEMAGGNKPPKSITSGGKANAATYPQLVNQLTGQNLKNIAAQDPRLSLALHKSEKNFPIGTATYEEADRLGKIWVSEGARQTSGGGWLSIDGTRQYRPPTEKNSQFATTGIQANFETYTIDSNGKRNKIKNGHLNIR

SEQ ID NO: 32133 - protein, 83 aa, Neisseria meningitidis
MDNTRIMAAHEAGVKVEANVHNFNDRLSSKERIRFKHDGIEPQTWGEAIQLRIRKQETQKGVPEGWSKRFPNGSIYDVKVLRK

SEQ ID NO: 32134 - protein, 119 aa, Neisseria meningitidis
  misc_feature 115, 116, 117: 'Xaa' is any amino acid
MRKILVTGGAGFIGSAVVRHIIRNTQDSVVNLDKLTYAGNLESLTDIADNPRYAFEQVDICDRAELDRVFAQHRPDAVMHLAAESHVDRSIGSAGEFIQTNIVGTFNLLEAARAXXXHT

SEQ ID NO: 32135 - protein, 701 aa, Neisseria meningitidis; identical to SEQ ID NO: 1407

SEQ ID NO: 32136 - protein, 244 aa, Neisseria meningitidis; identical to SEQ ID NO: 5512

SEQ ID NO: 32137 - protein, 1389 aa, Neisseria meningitidis
LLNLFKPLQTAGMEEEFDAIKIGIASPETIRSWSYGEVKKPETINYRTFKPERDGLFCAKIFGPVKDYECLCGKYKRLKFKGVTCEKCGVEVTLSKVRRERMGHIELAAPVAHIWFLKSLPSRLGMVLDMTLRDIERVLYFEAFVVTDPGMTPLQRRQLLTEDDYYNKLDEYGDDFDAKMGAEGIRELLRTLNVAGEIEILRQELESTGSDTKIKKIAKRLKVLEAFHRSGMKLEWMIMDVLPVLPPDLRPLVPLDGGRFATSDLNDLYRRVINRNNRLKRLLELHAPDIIVRNEKRMLQEAVDSLLDNGRRGKAMTGANKRPLKSLADMIKGKGGRFRQNLLGKRVDYSGRSVITVGPYLRLHQCGLPKKMALELFKPFIFHKLEKQGLASTVKAAKKLVEQEVPEVWDILEEVIREHPIMLNRAPTLHRLGIQAFEPILIEGKAIQLHPLVCAAFNADFDGDQMAVHVPLSLEAQMEARTLMLASNNVLSPANGEPIIVPSQDIVLGLYYMTRDRINAKGEGSLFADVKEVHRAYHTKQVELGTKITVRLREWVKNEAGEFEPVVNRYETTVGRALLSEILPKGLPFEYVNKALKKKEISKLINASFRLCGLRDTVIFADHLMYTGFGFAAKGGISIAVDDMEIPKEKAALLAEANAEVKEIEDQYRQGLVTNGERYNKVVDIWGRAGDKIAKAMMDNLSKQKVIDRAGNEVDQESFNSIYMMADSGARGSAAQIKQLSGMRGLMAKPDGSIIETPITSNFREGLTVLQYFIATHGARKGLADTALKTANSGYLTRRLVDVTQDLVVVEDDCGTSDGFVMKAVVQGGDVIEALRDRILGRVTASDVVDPSSGETLVEAGTLLTEKLVDMIDQSGVDEVKVRTPITCKTRHGLCAHCYGRDLARGKLVNAGEAVGVIAAQSIGEPGTQLTMRTFHIGGAASRAAAASQVEAKSNGTARFSSQMRYVANNKGELVVIGRSCEVVIHDDIGRERERHKVPYGAILLVQDGMAIKAGQTLATWDPHTRPMITEHAGMVKFENVEEGVTVAKQTDDVTGLSTLVVIDGKRRSSSASKLLRPTVKLLDENGVEICIPGTSTPVSMAFPVGAVITVREGQEIGKGDVLARIPQASSKTRDITGGLPRVAELFEARVPKDAGMLAEITGTVSFGKETKGKQRLIVTDVDGVAYETLISKEKQILVHDGQVVNRGETIVDGAVDPHDILRLQGIEALARYIVQEVQEVYRLQGVKISDKHIEVIIRQMLRRVNIADAGETGFITGEQVERGDVMAANEKALEEGKEPARYENVLLGITKASLSTDSFISAASFQETTRVLTEAAIMGKQDELRGLKENVIVGRLIPAGTGLTYHRSRHQQWQEVEQETAETQVTDE

SEQ ID NO: 32138 - protein, 216 aa, Neisseria meningitidis
  misc_feature 211, 212: 'Xaa' is any amino acid
MKLKNKYQKFSKISEQKFREIIRCFALDLTASDTAKMTGISVRSINPIFLKIRHRIAALCEQSSPLSGVVELDESYFGARRIRGKRGRGASGKTIVFGILKRNGVVYTEIVPDASKASLIKVIRGHISADSEINTDGWKAYDGLVDMGYEKHYRVHHGSNEFARGKQHINGIESFWSYAKGRLAKFYGISKEMFYLHLKETEFRFNHRHEXXHTLN

SEQ ID NO: 32139 - protein, 283 aa, Neisseria meningitidis
  misc_feature 2, 3, 4: 'Xaa' is any amino acid
VXXXNSDVEELVSKTLMVARKLKINELTEWCNNELQGYSSKNLPKYRIFYGELKAFNPYRGDVPFMLPDELRERVTRVEYTSSISEIRNLLKTKNNNFIRILSSKEKQFLMNLQDTPFPLEPKIIIYPINLMNIQSKVRQLILDWALRLEEEGILGDGIQFTKSEQEKAMSNQFNIQNMQGFIGDIFGGNVQQNIQDGIHIEKENFNKLANFLAKNGIPSAELEDLRNALIEDGQPTDKKFGSKVSAWIGNIITKASTGAIDVSVGTIAGILTNAISKYYGLM

SEQ ID NO: 32140 - protein, 123 aa, Neisseria meningitidis; identical to SEQ ID NO: 1296

SEQ ID NO: 32141 - protein, 49 aa, Neisseria meningitidis
MSAALWHKKLSWKGFTPQINFRYNKINSNMPAFYSRSSKEWFVSIEKTY

SEQ ID NO: 32142 - protein, 338 aa, Neisseria meningitidis
MNILVTGGTGFIGSHTVVSLLKSGHQIVILDNLCNSSINILPRLKTITGQEIPFYQGDIRDREILRRIFTENRIDSVIHFAGLKAVGESVAEPMKYYDNNVSGSLVLAEEMAQAGVFSIVFSSSATVYGDPGKVPYTEDMPPGDTTSPYGASKSMVERILTDIQKADPRWSVILLRYFNPIGAHESGLIGEQPNGIPNNLLPYICQVAAGKLPQLAVFGDDYPTPDGTGMRDYIHVMDLAEGHVAAMQAKSNVAGTHLLNLGSGRASSVLEIIRAFEAASGLTIPYEVKPRRAGDLACFYADPSYTKAQIGWQTQRDLTQMMEDSWRWVSNNPNGYDD

SEQ ID NO: 32143 - protein, 172 aa, Neisseria meningitidis; identical to SEQ ID NO: 1304

SEQ ID NO: 32144 - protein, 116 aa, Neisseria meningitidis
MQNGGGKIYQTADNVEGIMLLKVVPERTVSADAKTRDPMWDNAALQTSEGVNFIARFLGFFSDGEYRYVDVLQPNHSDIIRYSGKDFPLNQILNHIHPARYAVTFENNVDSKLRRH

SEQ ID NO: 32145 - protein, 174 aa, Neisseria meningitidis
VLDREGYRPNVGIILINERNEVFWGKRVREHSWQFPQGGIKPGESPETAMYRELYEEVGLLPQHVKIVGRTRDWLRYDVPNNWVRREWRGSYRGQKQIWYLLRLTGRDCDVNLRATRHPEFDGWRWHQYWAPVDEVIDFKRDVYLGALKELSSRFLRGMESYEDFAARQLSGNR

SEQ ID NO: 32146 - protein, 221 aa, Neisseria meningitidis
MSSIIIKGTQPAKEKIEKLLEEVKQMDLSPLDQMVTKEETQRQYEARKRMIEEKIMRFELHISTLETANAEWKQYIQQLPTATRKREEEEKYAQMVDNEKGILNLINEGKEAIIILKMYKNDCELVLQRLSQHQTKDELTHLKASTKMALHQTVNLPQLPLPIFSGNPNEWRGFWSSFDAAVHQQIIPDIQKLNYLMACLKGEASKAIRGYDITPENYHAI

SEQ ID NO: 32147 - protein, 75 aa, Neisseria meningitidis
  misc_feature 69, 70: 'Xaa' is any amino acid
MEDKQGMTKAVAGVMTDAPTDGRKPATASNLPPYLTGGTETETAGRVQEVFECYETYITDGKGNLLGVXXTHLIN

SEQ ID NO: 32148 - protein, 48 aa, Neisseria meningitidis
MMKEREFEIKNHLYKGRSIDGKTHYGENVLLISLLEQALLRQMDYIVN

SEQ ID NO: 32149 - protein, 175 aa, Neisseria meningitidis
  misc_feature 2, 3, 4: 'Xaa' is any amino acid
VXXXLAKVAVNGAVVERDLVVFAQVGAYLFGTEFAADKGVDVLNQLRIELIGLSLTLFDSLALPLGFFGAVLLPLGAVPSDFAADGAFVAVKLFGDFGDGAVAGQVLDVVSFALGQLRVAHGNLSCRKGRMLPHTGLFLLGKVALQMRSRRPFDCWFFQPILRLIPKNFVSILLF

SEQ ID NO: 32150 - protein, 103 aa, Neisseria meningitidis
  misc_feature 99, 100, 101: 'Xaa' is any amino acid
VCSQHWAGGLCILGTIFSDGIQGFFLIAAAPKNRLSRLIKNTDNGILPKATIRYNKEMLSNKTATPRSKRRRNHKIPLTILLAATARARKVSLLAVCSXXXHT

SEQ ID NO: 32151 - protein, 176 aa, Neisseria meningitidis
  misc_feature 172, 173, 174: 'Xaa' is any amino acid
LHSIKKNDREWKTTVEAIERILRQLEAMGENLEQSSIEIIIENKLPIWILDQIYQQKKEQGPWSVTKLRSFLGKLVQRNEEVARSQSLNIEKDPKPIKNKPRPYLQHARNETSALAITIPPREKAKENSSSKKNEKTRRPCSFCKQDHWDNECHVYPTLKQRMERLRENNAXXXHT

SEQ ID NO: 32152 - protein, 345 aa, Neisseria meningitidis
MAESGKEDLAAAFKTELFNDTIYVLTPHGKVLSLPTGATPIDFAYALHSSIGDRCRGAKVEGQIVPLSTPLENGQRVEIITAKEGHPSVNWLYEGWVKSNKAIGKIRAYIRQQNADTVREEGRVQLDKQLAKLTPKPNLQELAENLGYKKPEDLYTAVGQGEISNRAIQKACGTLNEPPPVPVSETTIVKQSKIKKGGKNGVLIDGEDGLMTTLAKCCKPAPPDDIVGFVTRDRGISVHRKTCPSFRHLAEQAPEKVLDASWAALQEGQVFAVDIEIRAQDRSGLLRDVSDALARHKLNVTAVQTQSRDLEASMRFTLEVKQVNDLPRVLASLGDVKGVLSVTRL

SEQ ID NO: 32153 - protein, 246 aa, Neisseria meningitidis
  misc_feature 2, 3: 'Xaa' is any amino acid
VXXDEKDTQAGTAANGNQAASNTAGDANGKTKTYAVEVCCSNLNYLKYGLLTRKTAGNTGEGGNGSPTAAAQTAQGAQSMFLQGERTDEKEIPSEQNVVYRGSWYGHIANSTSWSGNASNATSGNKADFTVNFGEKKINGTLTAENRQAATFTIEGTIQGNGFSGTAKTADSGFDLDQSNTIGTPKAYITDAKVQGGFYGPKAEEMGGWFAYPGDSQTQPSASGSGASAANSATVVFGAKRQQLVQ

SEQ ID NO: 32154 - protein, 123 aa, Neisseria meningitidis; identical to SEQ ID NO: 130

SEQ ID NO: 32155 - protein, 350 aa, Neisseria meningitidis
MSPSHHSLVDNNNLSYGVIVFMNTIQNYPAYQNDTDIAKQKTSYTELGVNFNPDYSKVRLVLQTNSRLNIIKLARRDAQAYDQYIEIIKNDFILISHHRDGYSVFMKRKEYHPERLKAYSDLRRHKEMLYTLTPPSPKRKSASVPNRLLVLFAHMNGGGGYDSSNVVERLFVQYFADVQRSLVKNVYVLRIADLNISHGSYFTNTANYPDYEDQIQSLIKETLYKCDIQPENVVLYGGSKGGAGALLHGAIGNYKVVAGDPIIDSSVYNQKDVHFVKHFKEANMTNMIVNHLRGNTHKMYICASSAQKFNFETSSNLARASSGLINIVDLSNDIQIKTHPKLLLTPSLNR

SEQ ID NO: 32156 - protein, 89 aa, Neisseria meningitidis; identical to SEQ ID NO: 5173

SEQ ID NO: 32157 - protein, 155 aa, Neisseria meningitidis
LNKKDFVESAGVNFASEEAQVVFDDSKTSVADIAKIIEKTGYGAKEKTEDTLPQPEAEHHIGWRLWLLFTINVPFLIGMAGMMIGRHDWMIPPLWQFALARVGATLAGGCHFKKGRGGSIKGGLAKMDVLVTIGHGLDFTCIPSICCFFSPPRGA

SEQ ID NO: 32158 - protein, 132 aa, Neisseria meningitidis
MLGLTRNNCYDLGFAILCYERNAADKKEFLDWLYGIVRTVPVESFPRYLIDLIDCLESDDCSINIYDIIGFVPTTGMTKKEKDAVYGITYIRNQEFYDIPITREKALKALKKHPEIYQKFRHFFPFVELPPL

SEQ ID NO: 32159 - protein, 44 aa, Neisseria meningitidis
MGRSYPYDCRMVGYLYPTKIFDASIVSEMPLLKNVGFENPTYGC

SEQ ID NO: 32160 - protein, 89 aa, Neisseria meningitidis
LTSFLLVLSVPVLAGSFLFLLLDRNFNTSFYDTSKGGNPLLYQHLFWFFGHPEVYVIILPVFGIIREAVLFLTDKDRLFGQTSITFASI

SEQ ID NO: 32161 - protein, 222 aa, Neisseria meningitidis
LVKTADGYKAIAHIRVGDRVFAKDEASGAMGYKHVTARYGNPYQETVYIKVSDGIGNSQTLISNKIHPFYSDGKWIKAEDLKAGNRLHSENGAEQTVQSVTVKPKPLQAYNLTVADWHTYFVKGDKAETEGVWVHNSCPPKRAPEYHAGTVSESNFLNVAEKWLGENYKSYPNGRYVSQDGMRQVRYGHHETNSSTHHGHFESYDKPNGRVIENSVVTIIQD

SEQ ID NO: 32162 - protein, 332 aa, Neisseria meningitidis
MKIAIYGTKSYDREHFTRANRHFGFELEFFDFMLDVKTAKMAEGAEAVCIFVNDDGSRPVLEKLAQIGVKTVALRCAGFNNVDLKAAEELGLKVVRVPAYSPESVAEHTVGLMLTLNRRIHKAYQRTRDANFSLEGLTGFNMYGKTAGVIGTGKIGIATMRILKGFGMNLLAYDPFCNPEAEKIGGRYVELNELYARSDIITLHCPSTPENHYMLNEAAFDKMKDGVMIINTSRGGLIDSAAAIEALKRRKIGALGMDVYENERELFFEDKSNDVITDDVFRRLSSCHNVLFTGHQAFLTEEALGNISEVTLSNIREVGQTGDCGNAVRADG

SEQ ID NO: 32163 - protein, 98 aa, Neisseria meningitidis
  misc_feature 95, 96: 'Xaa' is any amino acid
MLIVRPSGRAAEDVETCLNAGWRAEVLSPVEIEADAAGLELLSEQYARADAVFWVSPTAVETAVPYLNLSDGIKMHISVGQGSRRALERCLGRTXXHT

SEQ ID NO: 32164 - protein, 138 aa, Neisseria meningitidis
  misc_feature 3, 4: 'Xaa' is any amino acid
VCXXSVSPANADTDVFINIDVFGTIRNRTEMHLYNAETLKAQTKLEYFAVDRTNKKLLIKPKTNAFEAAYKENYALWMGPYKVSKGIKPTEGLMVDFSDIQPYGNHMGNSAPSVEADNSHEGYGYSDEAVRRHRQGQP

SEQ ID NO: 32165 - protein, 160 aa, Neisseria meningitidis; identical to SEQ ID NO: 1608

SEQ ID NO: 32166 - protein, 511 aa, Neisseria meningitidis
MNLPIQKFMMLFAAAISLLQIPISHANGLDARLRDDMQAKHYEPGGKYHLFGNARGSVKNRVYAVQTFDATAVGPILPITHERTGFEGVIGYETHFSGHGHEVHSPFDNHDSRSTSDFSGGVDGGFTVYQLHRTGSEIHPEDGYDGPQGSDYPPPGGARDIYSYYVKGTSTKTKINTVPQAPFSDRWLKENAGAASGFLSRADEAGKLIWENDPNQNWWGNRMDDIRGIIQGAANPFLTGFQGLGVGAITDSAVNPVTYAAARKTLQGIHNLGNLSPEAQLAAATALQDSAFAVKDGINSARQWADAHPNITATAQTALAVAEAAGTVWRGKKVNLNPTKWDWVKNTGYKTPAARPMQTLDGEMAGGNKPAKQATPNGKAGVSTQQSLQNSLVPQKNYTHTTYNGGSAITDGKYITDPLSMVRHKPDASSLDKIDSKSLFKSDVDAEKATLDAARYADKHNLWDSQNKAKVPTNDVVGYTDGKPTHIINIYRRKPNKDGFRPVHGTPGKER

SEQ ID NO: 32167 - protein, 136 aa, Neisseria meningitidis; identical to SEQ ID NO: 14101

SEQ ID NO: 32168 - protein, 322 aa, Neisseria meningitidis
MAMHAEYGGVVPELASRDHIRRLVPLTEGCLAQAGASYGDIDAVAFTQGPGLGGALLAGSSYANALALALDKPVIPVHHLEGHLLSPLLAEEKPDFPFVALLVSGGHTQIMAVRGIGDYALLGESVDDAAGEAFDKTAKLLGLPYPGGAKLSELAESGRPEAFVFPRPMIHSDDLQMSFSGLKTAVLTAVEKVREANGSETIPEQTRNDICRAFQDAVVDVLAAKVKKALLQTGFRTVVVAGGVGANRKLRETFGNMTVQIPTPKGKPKHPSEKVSVFFPPMAYCTDNGAMIAFAGAMHLGKGREVGAFNVRPRWPLSEIVK

SEQ ID NO: 32169 - protein, 431 aa, Neisseria meningitidis; identical to SEQ ID NO: 4065

SEQ ID NO: 32170 - protein, 70 aa, Neisseria meningitidis
MKLINFEESSVKISLDKDELYIIQAIVGEIYSGVCVDCRDFEIIHGVEKIKFFLWIKNLKKYMILGINVS

SEQ ID NO: 32171 - protein, 244 aa, Neisseria meningitidis
MKKFFSILSIFILSFFNSEYTYAQSLCIQQSSQNHIHIAKINLNCKGINLIATQEADKGMTVSQFARKYRTDIAINGSFFRTGYFPFGLAITDHKTWDKTRDVQKRVFLACNRQNRCMIEDKNMVSKVDDSWKLAVSGWQSFNPATKKFECSDDDPVGCTHIKFITKQPRTMVGLDEKRNYLYFVVIDGRLPKFKGATLNELGQLAASLKLTKAINLDGGGSSTMVKGYNRISTLPATQKKNVW

SEQ ID NO: 32172 - protein, 51 aa, Neisseria meningitidis
LFTFICIVFIKSLQINVNIRLMRTVVSDGLLLKITFRSVYELFVYREKTYP

SEQ ID NO: 32173 - protein, 47 aa, Neisseria meningitidis
  misc_feature 41, 42: 'Xaa' is any amino acid
LAQPGDFLFVGGIAFAALFVTPVGGDTEFVELVHIEGADLXXTHLIN

SEQ ID NO: 32174 - protein, 157 aa, Neisseria meningitidis
VAVEEISAAIANAQTLVVAEYRGISVSSMTELRANARKEGVYLRVLKNTLARRAVQGTSFAELADQMVGPLVYAASEDAVAAAKVLHQFAKKDDKIVVKAGSYNGEVMNAAQVAELASIPSREELLSKLLFVMQAPVSGFARGLAALAEKKAGEEAA

SEQ ID NO: 32175 - protein, 79 aa, Neisseria meningitidis
VLGTSVWGHHMYTAGLDVDTRTYFRAATMIIAIPRAVKVFNWLGTFLVLIRIFSLCGVELIVLFFIYCWWFKGYYFEGC

SEQ ID NO: 32176 - protein, 179 aa, Neisseria meningitidis; identical to SEQ ID NO: 25135

SEQ ID NO: 32177 - protein, 114 aa, Neisseria meningitidis; identical to SEQ ID NO: 53

SEQ ID NO: 32178 - protein, 156 aa, Neisseria meningitidis; identical to SEQ ID NO: 955

SEQ ID NO: 32179 - protein, 94 aa, Neisseria meningitidis; identical to SEQ ID NO: 23891

SEQ ID NO: 32180 - protein, 231 aa, Neisseria meningitidis; identical to SEQ ID NO: 3708

SEQ ID NO: 32181 - protein, 171 aa, Neisseria meningitidis
  misc_feature 165, 166: 'Xaa' is any amino acid
MQIKKIMKWLPVALSLLGALGYTGYGSEAVRTAVAVLDVLGAAGDAGSDAPARRRASAKSGHRYTGTVSKVYDGDTLHVIDGDGAKHKIRMAYIDAPEMKQAYGTRSRDNLRAAAEGRKVSVRVFDTDRYQREVAQVSVGKTDLNLMQVQDGAAWHYKSYAKERXXTHLIN

SEQ ID NO: 32182 - protein, 39 aa, Neisseria meningitidis
LGFICVSEILSGLVFYSCVIVFLVFVFFIQVVFLCYMFL

SEQ ID NO: 32183 - protein, 87 aa, Neisseria meningitidis
MLIGIPIRSPRTSPPAALLGTSDGIASRTGGTSSANGRRARLSPSDGIAIRLPTLISSTGTPISSANVAEVSRQPAKKRFLGFIFIF

SEQ ID NO: 32184 - protein, 46 aa, Neisseria meningitidis
  misc_feature 2, 3, 4: 'Xaa' is any amino acid
VXXXEFIQDFITASTDVINLSYENFRKNFIHKCQLILPIMQPNMKV

SEQ ID NO: 32185 - protein, 191 aa, Neisseria meningitidis
LLCTQTDGDNAQKKTTTYKEQDPAKVTHYLTQSAEFSDYQRVYLDETGFDRYLFRPYTRSLKGQIVKAQISGKRYQRLSLVSAQVGNRLIAPMVYQNTMTGVFFEAWFQQCLLPALTQKSVIILDNARFHRMGVLREMAEKLGHKVLPLAPYSPELNPIEKVWANIKRYLRTVLSDYARFDDALLSYFDFN

SEQ ID NO: 32186 - protein, 177 aa, Neisseria meningitidis
LAGIMLKLGGCGVYRISKSLSFFSFEFLIFVSLVSMVFCSFICMVQSDCKSLAAYSSICHMGFVLLSELSMVYYGKSMALVMMLAHGYTSFLIFYFIGEFYHISNSRLVYYLRGYFNVSVLFCLMFCLVMMSNFGFPVSISFFSEYLMLNWFSSVCYVGIFFYFFIIWFLFIILCIF

SEQ ID NO: 32187 - protein, 47 aa, Neisseria meningitidis; identical to SEQ ID NO: 2624

SEQ ID NO: 32188 - protein, 81 aa, Neisseria meningitidis; identical to SEQ ID NO: 6740

SEQ ID NO: 32189 - protein, 41 aa, Neisseria meningitidis
MPLKTEKRILADFGTTAVSQKRNMPSEDRSDGIVAPYQSVP

SEQ ID NO: 32190 - protein, 144 aa, Neisseria meningitidis; identical to SEQ ID NO: 4312

SEQ ID NO: 32191 - protein, 123 aa, Neisseria meningitidis; identical to SEQ ID NO: 616

SEQ ID NO: 32192 - protein, 243 aa, Neisseria meningitidis
  misc_feature 240, 241: 'Xaa' is any amino acid
MSEYLFTSESVSEGHPDKVADQVSDAILDAILAQDPKARVAAETLVNTGLCVLAGEITTTAQVDYIKVARETIKRIGYNSSELGFDANGCAVGVYYDQQSPDIAQGVNEGEGIDLNQGAGDQGLMFGYACDETPTLMPFAIYYSHRLMQRQSELRKDGLLPWLRPDAKAQLTVVYDSESGKVKRIDTVVLSTQHDPEIGYEELKNAVIEQIIKPVLPSELLTDEIKYLINPTGRFVIGGXXHT

SEQ ID NO: 32193 - protein, 37 aa, Neisseria meningitidis
  misc_feature 34, 35: 'Xaa' is any amino acid
MVEISQTCDIRVDPKLDTAKKNMSHTQLIILGSXXHT

SEQ ID NO: 32194 - protein, 453 aa, Neisseria meningitidis
VRDQLKPPKRTAEEQAFLPAHLELTDTPVSAAPKWAARFIMAFALLALLWSWFGKIDIVAAASGKTVSGGRSKTIQPLETAVVKAVHVRDGQHVKQGETLAELEAVGTDSDVVQSEQALQAAQLSKLRYEAVLAALESRTVPHIDMAQARSLGLSDADVQSAQVLAQHQYQAWAAQDAQLQSALRGHQAELQSAKAQEQKLVSVGAIEQQKTADYRRLRADNFISEHAFLEQQSKSVSNWNDLESTRGQMRQIQAAIAQAEQNRVLNTQNLKRDTLDALRQANEQIDQYRGQTDKAKQRQQLMTIQSPADGTVQELATYTVGGVVQAAQKMMVIAPDDDKMDVEVLVLNKDIGFVEQGQDAVVKIESFPYTRYGYLTGKVKSVSHDAVSHEQLGLVYTAVVSLDKHTLNIDGKAVNLTAGMNVTAEIKTGKRRVLDYLLSPLQTKLDESFRER

SEQ ID NO: 32195 - protein, 342 aa, Neisseria meningitidis
VGQTLFDAAKFAQYRQSRFDTQAAEQRFDAAREELLLKVAESYFNVLLSRDTVAAHAAEKEAYAQQVRQAQALFNKGAATALDIHEAKAGYDNALAQEIAVLAEKQTYENQLNDYTDLDSKQIEAIDTANLLARYLPKLERYSLDEWQRIALSNNHEYRMQQLALQSSGQALRAAQNSRYPTVSAHVGYQNNLYTSSAQNNDYHYRGKGMSVGVQLNLPLYTGGELSGKIHEAEAQYGAAEAQLTATERHIKLAVRQAYTESGAARYQIMAQERVLESSRLKLKSTETGQQYGIRNRLEVIRARQEVAQAEQKLAQARYKFMLAYLRLVKESGLGLETVFAE

SEQ ID NO: 32196 - protein, 142 aa, Neisseria meningitidis
MSTDSTNYAAKHESLGKSVQRELQKTQSQLRQVVRKMQSKYNINNKARVAEISLLRQMQSQFSRKYVNKNLGNSNTLAQQGSYTKKDGTTAQAGDSLLAADNLHSRLTDKMLSISHVRENTISPFVLGCLKQITINVSHYLK

SEQ ID NO: 32197 - protein, 92 aa, Neisseria meningitidis
MIPVLFCLLGYGRQVEKVRACYYLIFYTLFFGIPYLFLYRRVFWFLSFVYYDFLYLMSLYFCLACVFWLSFLYILFIFDCPRSMWSRQLVLG

SEQ ID NO: 32198 - protein, 223 aa, Neisseria meningitidis; identical to SEQ ID NO: 8619

SEQ ID NO: 32199 - protein, 96 aa, Neisseria meningitidis
  misc_feature 92, 93, 94: 'Xaa' is any amino acid
MADYYAITVKFAEQGTPLKQGGVSKTGHVWVELYSARDKKIYSFGWSTGDSKTEGGFDNLVKDDRSNYINHPDTPISSITVPITKEQFDRAXXXHT

SEQ ID NO: 32200 - protein, 42 aa, Neisseria meningitidis
MADFRYGETVLLISDGLNADCFILILKPLFQTTLKGRLKTFV

SEQ ID NO: 32201 - protein, 89 aa, Neisseria meningitidis
  misc_feature 2, 3, 4: 'Xaa' is any amino acid
VXXXQHTKITKALKAETYFCRPYHSWEKGLNENTNGLIRQYFPKQTDFRNISDREIRRVQDELNHRPRKTLGYETPSVLFLNLFQPLIH

SEQ ID NO: 32202 - protein, 178 aa, Neisseria meningitidis; identical to SEQ ID NO: 5654

SEQ ID NO: 32203 - protein, 50 aa, Neisseria meningitidis
  misc_feature 3, 4: 'Xaa' is any amino acid
VCXXLEDRGELMVMKKDGEGFVIAARAPDGMWKTAEAETLAQAITLWEEV

SEQ ID NO: 32204 - protein, 348 aa, Neisseria meningitidis
  misc_feature 3, 4: 'Xaa' is any amino acid
VCXXINAPEEKARGITINTSHVEYETETRHYAHVDCPGHADYVKNMITGAAQMDGAILVCSAADGPMPQTREHILLARQVGVPYIIVFMNKCDMVDDAELLELVEMEIRDLLSSYDFPGDDCPIVQGSALKALEGDAAYEEKIFELAAALDSYIPTPERAVDKPFLLPIEDVFSISGRGTVVTGRVERGIIHVGDEIEIVGLKETQKTTCTGVEMFRKLLDEGQAGDNVGVLLRGTKREDVERGQVLAKPGTITPHTKFKAEVYVLSKEEGGRHTPFFANYRPQFYFRTTDVTGAVTLEEGVEMVMPGENVTITVELIAPIAMEEGLRFAIREGGRTVGAGVVSSVIA

SEQ ID NO: 32205 - protein, 92 aa, Neisseria meningitidis; identical to SEQ ID NO: 1005

SEQ ID NO: 32206 - protein, 395 aa, Neisseria meningitidis; identical to SEQ ID NO: 1105

SEQ ID NO: 32207 - protein, 101 aa, Neisseria meningitidis
LDGEMAGGNKPVVKSIRPTTRDELRQALQEQGFRRTGSDEAQYETWKGPDGVKIDIRPNGEVIRTQRVPRTDGVQGKYPQRQNYEGNPLPNNRHHSGYFIK

SEQ ID NO: 32208 - protein, 40 aa, Neisseria meningitidis
VCKAAKINNDPKINNDPKILKSPYLKTIATKRMGVAMDQR

SEQ ID NO: 32209 - protein, 124 aa, Neisseria meningitidis
  misc_feature 120, 121, 122: 'Xaa' is any amino acid
MAHVYFEVGVMVIGFVSLGKFLEHRTKKSSLNSLGLLLKLTPTQVNVQRNGEWKQLPIDQVQIGDLIRANHGERIAADGIIESGSGWADESHLTGESNPEEKKAGGKVLAGALMTEGSVXXXHT

SEQ ID NO: 32210 - protein, 38 aa, Neisseria meningitidis
MAIYDLNEIVTRAALGIYKGKWRNMDFEQVLQNIVQQP

SEQ ID NO: 32211 - protein, 1392 aa, Neisseria meningitidis
MNYSFTEKKRIRKSFAKRENVLEVPFLLATQIDSYAKFLQLENAFDKRTDDGLQAAFNSIFPIVSHNGYARLEFVHYTLGEPLFDIPECQLRGITYAAPLRARIRLVILDKEASKPTVKEVRENEVYMGEIPLMTPSGSFVINGTERVIVSQLHRSPGVFFEHDKGKTHSSGKLLFSARIIPYRGSWLDFEFDPKDLLYFRIDRRRKMPVTILLKALGYGNEQILDIFYDKETFYLSSNGVQTDLVAGRLKGETAKVDILDKEGNVLVAKGKRITAKNIRDITNAGLTRLDVEPESLLGKALAADLIDSETGEVLASANDEITEELLAKFDINGVKEITTLYINELDQGAYISNTLRTDETAGRQAARVAIYRMMRPGEPPTEEAVEQLFNRLFFSEDSYDLSRVGRMKFNTRTYEQKLSEAQQNSWYGRLLNETFAGAAEKGGYVLSVEDIVASIATLVELRNGHGEVDDIDHLGNRRVRSVGELTENQFRSGLARVERAVKERLNQAESENLMPHDLINAKPVSAAIKEFFGSSQLSQFMDQTNPLSEVTHKRRVSALGPGGLTRERAGFEVRDVHPTHYGRVCPIETPEGPNIGLINSLSVYARTNDYGFLETPYRRVIDGKVTEEIDYLSAIEEGRYVIAQANADLDSDGNLIGDLVTCREKGETIMATPDRVQYMDVATGQVVSVAASLIPFLEHDDANRALMGANMQRQAVPCLRPEKPMVGTGIERSVAVDSATAIVARRGGVVEYVDANRVVIRVHDDEATAGEVGVDIYNLVKFTRSNQSTNINQRPAVKAGDVLQRGDLVADGASTDLGELALGQNMTIAFMPWNGYNYEDSILISEKVAADDRYTSIHIEELNVVARDTKLGAEDITRDIPNLSERMQNRLDESGIVYIGAEVEAGDVLVGKVTPKGETQLTPEEKLLRAIFGEKASDVKDTSLRMPTGMSGTVIDVQVFTREGIQRDKRAQSIIDSELKRYRLDLNDQLRIFDNDAFDRIERMIVGQKANGGPMKLAKGSEITTEYLAGLPSRHDWFDIRLTDEDLAKQLELIKVSLQQKREEADELYEIKKKKLTQGDELQPGVQKMVKVFIAIKRRLQAGDKMAGRHGNKGVVSRILPVEDMPYMADGRPVDIVLNPLGVPSRMNIGQILEVHLGWAAKGIGERIDRMLKEQRKAGELREFLNKLYNGSGKKEDLDALTDEEIIELASNLRKGASFASPVFDGAKESEIREMLNLAYPSDDPEVEKLGFNDSKTQITLYDGRSGEAFDRKVTVGVMHYLKLHHLVDEKMHARSTGPYSLVTQQPLGGKAQFGGQRFGEMEVWALEAYGAAYTLQEMLTVKSDDVNGRTKMYENIVKGEHKIDAGMPESFNVLVKEIRSLGLDIDLERY

SEQ ID NO: 32212 - protein, 486 aa, Neisseria meningitidis
MIMSKISKLVTHPNLFFRDYFLKKAPLNYGENIKPLPIETSSHSKKNTAHKTPVSSDQPIEDPYPVTFPIDVVYTWVDSDDEKFNEERLKFQNSSTSETLQGKAESTDIARFQSHDELKYSIRSLMKYAPWVNHIYIVTNGQIPKWLDTNNTKVTIIPHSTIIDSQFLPTFNSHVIESSLYKIPVLSEHYIYFNDDVMLTRDLSPSYFFTSSGLAKLFITNSRLPNGYKNVKDTPTQWASKNSRELLHAETGFWAEAMFAHTFHPQRKSVHESIEHLWHEQLNVCRQNRFRDISDINMATFLHHHFAILTGQALATRTKCIYFNIRSPQAAQHYKTLLARKGSEYSPHSICLNDHTSSNKNILSNYEAKLQSFLETYYPDVSEVEILLPTKSEVAELVKHKDYLTVYTKLLPIINKQLVNKYNKPYSYLFYYLGLSAQFLFKETQQEHYRETAEENLQIFCGLNPKHTLALKYLADVTLTSQPSGQ

SEQ ID NO: 32213 - protein, 105 aa, Neisseria meningitidis; identical to SEQ ID NO: 10058

SEQ ID NO: 32214 - protein, 38 aa, Neisseria meningitidis
  misc_feature 33, 34: 'Xaa' is any amino acid
MKLKSLDFPTGYFYFDNAAINSDKVEVIAVGYXXHTLN

SEQ ID NO: 32215 - protein, 75 aa, Neisseria meningitidis; identical to SEQ ID NO: 1870

SEQ ID NO: 32216 - protein, 286 aa, Neisseria meningitidis
MAKEKFERSKPHVNVGTIGHVDHGKTTLTAALTTILAKKFGGAAKAYDQIDNAPEEKARGITINTSHVEYETETRHYAHVDCPGHADYVKNMITGAAQMDGAILVCSAADGPMPQTREHILLARQVGVPYIIVFMNKCDMVDDAELLELVEMEIRDLLSSYDFPGDDCPIVQGSALKALEGDAAYEEKIFELAAALDSYIPTPERAVDKPFLLPIEDVFSISGRGTVVTGRVERGIIHVGDEIEIVGLKETQKTTCTGVEMFRKLLDEGQAGDNVAYCCAVPNVKT

SEQ ID NO: 32217 - protein, 229 aa, Neisseria meningitidis
MKRKNIALIPAAGIGARFGADKPKQYVEIGSKTVLEHTIGIFERHEAVDLTVVVVSPEDTFADKVQTAFPQVRVWKNGGQTRAETVRNGVAKLLETGLAAETDNILVHDAARCCLPSEALTRLIEQAGNAAEGGILAIPIADTLKCADGGNISATVERTSLWQAQTPQLFRAGLLHRALAAENLDGITDEASAVEKLGIRPLLVQGDARNLKLTQPQDAYIVRLLLDAV

SEQ ID NO: 32218 - protein, 569 aa, Neisseria meningitidis
  misc_feature 563, 564: 'Xaa' is any amino acid
MAKNNQYSESSITVLKGLEPVKERPGMYTRTDSPTHICQEVIDNAADEALGGFATAIDVQIHEDGSLSVRDNGRGIPVGLHPEEGVPVVELVFTRLHAGGKFNKKDGGSAYAFSGGLHGVGVSVTNALSSRLEVTVKREGKIHRIVFAGGDVVEPLAQVGKCAVKDSGTEVRVWPDGKYFESPNYSIPELERLLRAKAVLLPGVRVSLTRPVKGEDEAHTQTWHYPDGLKSYLTDLIADAQEAVPIFSCENYISDDHNGDFSIGEGAAFALTWLEEGSCANESYVNLIPTPLGGTHEAGLKQAVFNAVNNFINLHNLLPRGVKVQSDDVFGKTAFVLSARVLDPQFQGQTKDKLTNRDALKLVAAVAGDPLELWLNQNVDFGKKIAELAIRQAQARMRSVKKIEKKKGSGVAVLPGKLTDCESEDIRENELFLVEGDSAGGSAKLARDKATQAILPLRGKVLNSFEVHPDQLFGNAEIHDISVAIGVDPHGINDHPDLSGLRYGKIAILSDADVDGSHIQVLLLTLFYRHFPKLVADGHIYVAQPPLFRVDVNAQGKSKPARXXTHLIN

SEQ ID NO: 32219 - protein, 298 aa, Neisseria meningitidis; identical to SEQ ID NO: 17802

SEQ ID NO: 32220 - protein, 72 aa, Neisseria meningitidis; identical to SEQ ID NO: 18381

SEQ ID NO: 32221 - protein, 90 aa, Neisseria meningitidis; identical to SEQ ID NO: 1889

SEQ ID NO: 32222 - protein, 354 aa, Neisseria meningitidis; identical to SEQ ID NO: 18215

SEQ ID NO: 32223 - protein, 273 aa, Neisseria meningitidis; identical to SEQ ID NO: 3190

SEQ ID NO: 32224 - protein, 220 aa, Neisseria meningitidis; identical to SEQ ID NO: 5269

SEQ ID NO: 32225 - protein, 405 aa, Neisseria meningitidis; identical to SEQ ID NO: 25610

SEQ ID NO: 32226 - protein, 261 aa, Neisseria meningitidis; identical to SEQ ID NO: 8388

SEQ ID NO: 32227 - protein, 421 aa, Neisseria meningitidis
MFSFFRRKKKQETPAPEEAQVQETAAKAESEVTQIVENIKEEVESLTESVKGQVESAVETVSGAVEQVKETVAEMLSEAEEAAEKAAEQVEAAKEAVAETVGEAVGQVQEAVATTEEHKLGWAARLKQGLTKSRDKMAKSLAGVFGGGQIDEDLYEELETVLITSDMGMEATEYLMKDVRDRVSLKGLKDGNELRGALKEALYDLIKPLEKPLVLPETKEPFVIMLAGINGAGKTTSIGKLAKYFQAQGKSVLLAAGDTFRAAAREQLQAWGERNNVTVISQTTGDSAAVCFDAVQAAKARGIDIVLADTAGRLPTQLHLMEEIKKVKRVLQKAMPDAPHEIIVVLDANIGQNAVNQVKAFDDALGLTGLIVTKLDGTAKGGILAALASDRPVPVRYIGVGEGIDDLRPFDARAFVDALLD

SEQ ID NO: 32228 - protein, 950 aa, Neisseria meningitidis
MKLSELFNPDEFAARHLSFGDEAALLAAVGEKSMDDFVGNTVPQSIRMPSELDLPDALTEADALAKLKGIASKNVINKSYIGLGYYPTRVPNVTLRNVLENPGWYTAYTPYQAEIAQGRLEALLNFQQVCIDLTGFPVAGASLLDEATAAAEAMAMAHRVGKVKSERFFVDARVYPQTLDVMKTRAKYFGFELVVGDFAQAEEGEYFGALFQYVGKDGDVQDLQDVIGRLKAKGTIVAVAADIMSLVLLKSPAELGADIALGNTQRFGVPMGFGGPHAAYFAFKDEFKRSAPGRIIGVSKDASGKPALRMALSTREQHIRREKATSNICTAQALLANLAGMYAVYHGPEGVKRIANRIHALASAFADALVSDGLNVVHKVFFDTVTVDFGNKEKADQVFAAALESGYNLRRVNDTQVAAAFHETSACEDLVDLYRAFTGKDAFAFADDVKGRLNAELLRQDDILQHPVFNRYHTEHEMLRYLKKLEDRDLAMNRSMISLGSCTMKLNATAEMLPITWAEFSDIHPYAPEAQTVGYRELLADMENSLKAITGFDAISFQPNSGAQGEYSGMLAIRRYQEAQGEAQRNICLIPKSAHGTNPATAAMLGLKVVVVDTDEHGNVNIDDLKAKAEQHRDALSAIMITYPSTHGVYEEGIRDICRIIHENGGQVYMDGANLNAQIGIMQPAEVGADVLHMNLHKTFCIPHGGGGPGMGPIGLKAHLAPFAPGHVVTDMHNASADQTAVAAAAFGSASILPITWMYLTMMGKQGMEQATRWALLNANYVAKRLSEDYPILYTGKNGRVAHECIVDLRPLKAESGITETDIAKRLMDYGFHAPTVSFPVAGTLMIEPTESESKAELDRFIAALKQIKQEVLKVERGEWPKEDNPLVNAPHTASDVTGEWTHPYSREEAVFPLPFVREHKFWPSVNRVDDVYGDRNLVCSCPPMENYED

SEQ ID NO: 32229 - protein, 351 aa, Neisseria meningitidis
MTILSDVKALGQQIWLDNLSRSLVQSGELAQMLKQGVCGVTSNPAIFQKAFAGDALYADEIAALKQQNLSPKQRYETMAVADVRAACGVCLAEHESTGGKTGFVSLEVSPELSKDAQGTVEEARRLYAAIGCKNAMIKVPATDAGIDALEILVSDGISVNLTLLFSRAQTLKAYAAYARGIAKRLAAGQSVAHIHVVASFFISRVDGALDTTLPDHLKGKIAIALAKAAYQDWEQYFTTPEFAALEAQGANRVQLLWASTGVKNPAYPDTLYVDNLIGAHTVNTVPDATLKAFIDHGTAKATLTEGVEEAQAQLAETAALGIDVETLANRLQEDGLKQFEEAFEKLLAPLV

SEQ ID NO: 32230 - protein, 146 aa, Neisseria meningitidis; identical to SEQ ID NO: 2365

SEQ ID NO: 32231 - protein, 1277 aa, Neisseria meningitidis; identical to SEQ ID NO: 24292

SEQ ID NO: 32232 - protein, 451 aa, Neisseria meningitidis; identical to SEQ ID NO: 26399

SEQ ID NO: 32233 - protein, 404 aa, Neisseria meningitidis; identical to SEQ ID NO: 18892

SEQ ID NO: 32234 - protein, 89 aa, Neisseria meningitidis; identical to SEQ ID NO: 9425

SEQ ID NO: 32235 - protein, 142 aa, Neisseria meningitidis; identical to SEQ ID NO: 5523

SEQ ID NO: 32236 - protein, 350 aa, Neisseria meningitidis; identical to SEQ ID NO: 8682

SEQ ID NO: 32237 - protein, 74 aa, Neisseria meningitidis; identical to SEQ ID NO: 444

SEQ ID NO: 32238 - protein, 76 aa, Neisseria meningitidis; identical to SEQ ID NO: 374

SEQ ID NO: 32239 - protein, 590 aa, Neisseria meningitidis; identical to SEQ ID NO: 25253

SEQ ID NO: 32240 - protein, 47 aa, Neisseria meningitidis; identical to SEQ ID NO: 17316

SEQ ID NO: 32241 - protein, 221 aa, Neisseria meningitidis; identical to SEQ ID NO: 1539

SEQ ID NO: 32242 - protein, 498 aa, Neisseria meningitidis; identical to SEQ ID NO: 25553

SEQ ID NO: 32243 - protein, 329 aa, Neisseria meningitidis; identical to SEQ ID NO: 19766

SEQ ID NO: 32244 - protein, 427 aa, Neisseria meningitidis; identical to SEQ ID NO: 25029

SEQ ID NO: 32245 - protein, 281 aa, Neisseria meningitidis; identical to SEQ ID NO: 24186

SEQ ID NO: 32246 - protein, 100 aa, Neisseria meningitidis; identical to SEQ ID NO: 3450

SEQ ID NO: 32247 - protein, 287 aa, Neisseria meningitidis; identical to SEQ ID NO: 2947

SEQ ID NO: 32248 - protein, 453 aa, Neisseria meningitidis; identical to SEQ ID NO: 18644

SEQ ID NO: 32249 - protein, 69 aa, Neisseria meningitidis; identical to SEQ ID NO: 7188

SEQ ID NO: 32250 - protein, 334 aa, Neisseria meningitidis; identical to SEQ ID NO: 24613

SEQ ID NO: 32251 - protein, 111 aa, Neisseria meningitidis; identical to SEQ ID NO: 16634

SEQ ID NO: 32252 - protein, 868 aa, Neisseria meningitidis; identical to SEQ ID NO: 19076

SEQ ID NO: 32253 - protein, 211 aa, Neisseria meningitidis
LNIKYSGIENRFETAILKKNGVRYGFVSFAPNLAAVKLNDYAKVRKLITKTKQKADIVIVMFHGGAEGKQAEHLPFDTEIFYGENRGNVVEFARLAVDSGADVVFGQGPHVTRAVELYRDRFISYSGGNFATYGAINTSGISGIAPIFKIITDKQGRFVSGNIIPITQVGDKIPKIDPEKTVIGRIIYLNRSDFPKGNGLDVSPDGSITRR

SEQ ID NO: 32254 - protein, 391 aa, Neisseria meningitidis; identical to SEQ ID NO: 2276

SEQ ID NO: 32255 - protein, 160 aa, Neisseria meningitidis; identical to SEQ ID NO: 1608

SEQ ID NO: 32256 - protein, 284 aa, Neisseria meningitidis; identical to SEQ ID NO: 4138

SEQ ID NO: 32257 - protein, 91 aa, Neisseria meningitidis; identical to SEQ ID NO: 4054

SEQ ID NO: 32258 - protein, 222 aa, Neisseria meningitidis; identical to SEQ ID NO: 4261

SEQ ID NO: 32259 - protein, 300 aa, Neisseria meningitidis; identical to SEQ ID NO: 19401

SEQ ID NO: 32260 - protein, 558 aa, Neisseria meningitidis; identical to SEQ ID NO: 1615

SEQ ID NO: 32261 - protein, 424 aa, Neisseria meningitidis
MKTLQDWLSHLETAHSGGLIDMGLERVGEVKKRMKLTPQCPVVVVAGTNGKGSVCAYLTQIYKQAGYKTGTLTSPHLLRYNERIAINAEPVSDDTIIASFERIEAARSEISLTYFEFNTLAAVDIFMREQVDVMILEVGLGGRLDAVNAFDGDCAVVTSVDLDHQAFLGDTVEQVGFEKAGVFRSGKPAICGQNPAPKSLLSHAEAIGAKLLMVQRDFEFHALENIQWNYHFRPQHSDSPARNRNSLPFPALRGAYQLSNAACALTVLECLNDKLPVDIGAIKRGLLLVENPGRFQVLPGRPLTVLDVGHNPHAARALRRSLINLAFAQKRTAVFSMLSDKDIDGVLEIVKDQFDEWYIAPLDMPRGMTLESLQNKLHEHSIENIQTFAAVREAYRAAASKAGENDRIVVFGSFHTVADVMSVL

SEQ ID NO: 32262 - protein, 207 aa, Neisseria meningitidis; identical to SEQ ID NO: 243

SEQ ID NO: 32263 - protein, 459 aa, Neisseria meningitidis; identical to SEQ ID NO: 19288

SEQ ID NO: 32264 - protein, 56 aa, Neisseria meningitidis; identical to SEQ ID NO: 326

SEQ ID NO: 32265 - protein, 127 aa, Neisseria meningitidis; identical to SEQ ID NO: 1080

SEQ ID NO: 32266 - protein, 151 aa, Neisseria meningitidis; identical to SEQ ID NO: 14268

SEQ ID NO: 32267 - protein, 68 aa, Neisseria meningitidis
MESMFILVPISIILAFVIGWFFWWSGKNGQFDDLEGPAHRILMDDDSTSKLIEKERENDVRKRRFGTG

SEQ ID NO: 32268 - protein, 485 aa, Neisseria meningitidis; identical to SEQ ID NO: 24807

SEQ ID NO: 32269 - protein, 480 aa, Neisseria meningitidis; identical to SEQ ID NO: 25167

SEQ ID NO: 32270 - protein, 151 aa, Neisseria meningitidis; identical to SEQ ID NO: 6340

SEQ ID NO: 32271 - protein, 121 aa, Neisseria meningitidis; identical to SEQ ID NO: 1070

SEQ ID NO: 32272 - protein, 333 aa, Neisseria meningitidis; identical to SEQ ID NO: 19210

SEQ ID NO: 32273 - protein, 252 aa, Neisseria meningitidis; identical to SEQ ID NO: 19078

SEQ ID NO: 32274 - protein, 494 aa, Neisseria meningitidis; identical to SEQ ID NO: 19482

SEQ ID NO: 32275 - protein, 347 aa, Neisseria meningitidis; identical to SEQ ID NO: 18084

SEQ ID NO: 32276 - protein, 179 aa, Neisseria meningitidis; identical to SEQ ID NO: 19051

SEQ ID NO: 32277 - protein, 391 aa, Neisseria meningitidis; identical to SEQ ID NO: 24138

SEQ ID NO: 32278 - protein, 374 aa, Neisseria meningitidis; identical to SEQ ID NO: 16979

SEQ ID NO: 32279 - protein, 322 aa, Neisseria meningitidis
MRRKMLNVPKGSYDGMKGFTIIEFLVAGMLSMIVLMAVGSSYFTSRKLNDAANERLAIQQDLRNAATLIVRDARMAGSFGCFNMSEHTEKDVVSDVPQKNRLFSLKGSSANKLIPNGTDNKLIPITESLDINYQNFFQVGSALIFQYGIDDVNASAATTVVSSCAAISKPGKQILTLENVKKELKISDQDKEQNGNIARQRHVVNAYAVGRIAGEEGLFRFQLDDKGKWGNPQLLAKKIRYMKVRYIYVSDCPEDDDAGKEETFRYTDKFNSAQDAVTPAGVEVLLSSGTDTKIAASSDNHIYAYRIDATIRGGNVCANRTL

SEQ ID NO: 32280 - protein, 106 aa, Neisseria meningitidis; identical to SEQ ID NO: 2510

SEQ ID NO: 32281 - protein, 394 aa, Neisseria meningitidis; identical to SEQ ID NO: 19894

SEQ ID NO: 32282 - protein, 280 aa, Neisseria meningitidis; identical to SEQ ID NO: 19580

SEQ ID NO: 32283 - protein, 299 aa, Neisseria meningitidis; identical to SEQ ID NO: 24115

SEQ ID NO: 32284 - protein, 376 aa, Neisseria meningitidis; identical to SEQ ID NO: 6637

SEQ ID NO: 32285 - protein, 1862 aa, Neisseria meningitidis; identical to SEQ ID NO: 18911

SEQ ID NO: 32286 - protein, 315 aa, Neisseria meningitidis; identical to SEQ ID NO: 25646

SEQ ID NO: 32287 - protein, 445 aa, Neisseria meningitidis; identical to SEQ ID NO: 19216

SEQ ID NO: 32288 - protein, 116 aa, Neisseria meningitidis; identical to SEQ ID NO: 4624

SEQ ID NO: 32289 - protein, 545 aa, Neisseria meningitidis; identical to SEQ ID NO: 775

SEQ ID NO: 32290 - protein, 97 aa, Neisseria meningitidis; identical to SEQ ID NO: 4307

SEQ ID NO: 32291 - protein, 241 aa, Neisseria meningitidis; identical to SEQ ID NO: 24961

SEQ ID NO: 32292 - protein, 149 aa, Neisseria meningitidis; identical to SEQ ID NO: 3543

SEQ ID NO: 32293 - protein, 544 aa, Neisseria meningitidis; identical to SEQ ID NO: 3460

SEQ ID NO: 32294 - protein, 213 aa, Neisseria meningitidis; identical to SEQ ID NO: 25835

SEQ ID NO: 32295 - protein, 93 aa, Neisseria meningitidis; identical to SEQ ID NO: 19520

SEQ ID NO: 32296 - protein, 362 aa, Neisseria meningitidis; identical to SEQ ID NO: 18731

SEQ ID NO: 32297 - protein, 436 aa, Neisseria meningitidis; identical to SEQ ID NO: 19409

SEQ ID NO: 32298 - protein, 303 aa, Neisseria meningitidis; identical to SEQ ID NO: 7711

SEQ ID NO: 32299 - protein, 751 aa, Neisseria meningitidis; identical to SEQ ID NO: 25957

SEQ ID NO: 32300 - protein, 333 aa, Neisseria meningitidis; identical to SEQ ID NO: 19210

SEQ ID NO: 32301 - protein, 426 aa, Neisseria meningitidis; identical to SEQ ID NO: 14240

SEQ ID NO: 32302 - protein, 380 aa, Neisseria meningitidis; identical to SEQ ID NO: 24719

SEQ ID NO: 32303 - protein, 298 aa, Neisseria meningitidis; identical to SEQ ID NO: 18812

SEQ ID NO: 32304 - protein, 135 aa, Neisseria meningitidis; identical to SEQ ID NO: 18606

SEQ ID NO: 32305 - protein, 431 aa, Neisseria meningitidis; identical to SEQ ID NO: 24876

SEQ ID NO: 32306 - protein, 113 aa, Neisseria meningitidis; identical to SEQ ID NO: 1239

SEQ ID NO: 32307 - protein, 104 aa, Neisseria meningitidis; identical to SEQ ID NO: 1772

SEQ ID NO: 32308 - protein, 147 aa, Neisseria meningitidis; identical to SEQ ID NO: 18420

SEQ ID NO: 32309 - protein, 507 aa, Neisseria meningitidis; identical to SEQ ID NO: 2566

SEQ ID NO: 32310 - protein, 333 aa, Neisseria meningitidis; identical to SEQ ID NO: 24778

SEQ ID NO: 32311 - protein, 88 aa, Neisseria meningitidis; identical to SEQ ID NO: 1982

SEQ ID NO: 32312 - protein, 188 aa, Neisseria meningitidis; identical to SEQ ID NO: 1721

SEQ ID NO: 32313 - protein, 512 aa, Neisseria meningitidis; identical to SEQ ID NO: 18297

SEQ ID NO: 32314 - protein, 330 aa, Neisseria meningitidis
MPSETVCPFSDGISVTHPSPYTVRPYSEGLLRKPVMPYQQITVNVNDAVAERLADALMEHGALSAAIEDAYAGTQNEQAIFGEPGMPAEQIWQQSKVIALFGEHDEAAAIIQTAAQECGLKDLAYTGETLEDQDWVRLTQAQFDPIQISERLWITPSWHEAPEGTAVNLRLDPGLAFGTGSHPTTRLCLKWLDTQLKNGESVLDYGCGSGILTIAALKLGAGSAVGVDIDEQAVRAGRDNAAQNNVDAQFFLPDGLPQGQFDVVVANILANPLRMLGEMLAARTKQGGRIVLSGLLDEQAEELGGIYSQWFDLDPAETEEGWARLSGVKR

SEQ ID NO: 32315 - protein, 321 aa, Neisseria meningitidis; identical to SEQ ID NO: 24337

SEQ ID NO: 32316 - protein, 227 aa, Neisseria meningitidis; identical to SEQ ID NO: 1151

SEQ ID NO: 32317 - protein, 287 aa, Neisseria meningitidis; identical to SEQ ID NO: 17134

SEQ ID NO: 32318 - protein, 248 aa, Neisseria meningitidis; identical to SEQ ID NO: 25365

SEQ ID NO: 32319 - protein, 223 aa, Neisseria meningitidis; identical to SEQ ID NO: 19689

SEQ ID NO: 32320 - protein, 553 aa, Neisseria meningitidis; identical to SEQ ID NO: 19418

SEQ ID NO: 32321 - protein, 250 aa, Neisseria meningitidis; identical to SEQ ID NO: 18054

SEQ ID NO: 32322 - protein, 275 aa, Neisseria meningitidis; identical to SEQ ID NO: 67

SEQ ID NO: 32323 - protein, 124 aa, Neisseria meningitidis; identical to SEQ ID NO: 2472

SEQ ID NO: 32324 - protein, 456 aa, Neisseria meningitidis; identical to SEQ ID NO: 24767

SEQ ID NO: 32325 - protein, 431 aa, Neisseria meningitidis; identical to SEQ ID NO: 28235

SEQ ID NO: 32326 - protein, 498 aa, Neisseria meningitidis; identical to SEQ ID NO: 1489

SEQ ID NO: 32327 - protein, 382 aa, Neisseria meningitidis
MPTMGAEMNTRNMRYILLTGLLPMASAFGETALQCAALTDNVTRLACYDRIFAAQLPSSAGQEGQESKAVLNLTETVRSSLDKGEAVIVVEKGGDALPADSAGETADIYTPLSLMYDLDKNDLRGLLGVREHNPMYLMPLWYNNSPNYAPSSPTRGTTVQEKFGQQKRAETKLQVSFKSKIAEDLFKTRADLWFGYTQRSDWQIYNQGRKSAPFRNTDYKPEIFLTQPVKADLPFGGRLRMLGAGFVHQSNGQSRPESRSWNRIYAMAGMEWGKLTVIPRVWVRAFDQSGDKNDNPDIADYMGYGDVKLQYRLNDRQNVYSVLRYNPKTGYGAIEAAYTFPIKGKLKGVVRGFHGYGESLIDYNHKQNGIGIGLMFNDLDGI

SEQ ID NO: 32328 - protein, 260 aa, Neisseria meningitidis; identical to SEQ ID NO: 6334

SEQ ID NO: 32329 - protein, 239 aa, Neisseria meningitidis; identical to SEQ ID NO: 18283

SEQ ID NO: 32330 - protein, 117 aa, Neisseria meningitidis; identical to SEQ ID NO: 408

SEQ ID NO: 32331 - protein, 132 aa, Neisseria meningitidis; identical to SEQ ID NO: 1178

SEQ ID NO: 32332 - protein, 766 aa, Neisseria meningitidis; identical to SEQ ID NO: 25905

SEQ ID NO: 32333 - protein, 395 aa, Neisseria meningitidis; identical to SEQ ID NO: 1108

SEQ ID NO: 32334 - protein, 356 aa, Neisseria meningitidis; identical to SEQ ID NO: 24720

SEQ ID NO: 32335 - protein, 229 aa, Neisseria meningitidis; identical to SEQ ID NO: 18452

SEQ ID NO: 32336 - protein, 735 aa, Neisseria meningitidis
VLEYAARDRRSDGIPTHRQKHHDRNQEKNMAYQVLARKWRPKTFSDLVGQEHVVKALQNALDEGRLHHAYLLTGTRGVGKTTIARILAKSLNCENAQHGEPCGVCESCTQIDAGRYVDLLEIDAASNTGIDNIREVLENAQYAPTAGKYKVYIIDEVHMLSKSAFNAMLKTLEEPPEHVKFILATTDPHKVPVTVLSRCLQFVLRNMTAQQVADHLAHVLDSEKIAYAPPALQLLGRAAAGSMRDALSLLDQAIAMGSGSVAEQDVRQMIGAVDKQYLYELLTGIVNQDGEALLAKAQEMAACAVGFDNALGELAILLQHLALIQAVPNALAHDDPDSDILHRLAQTISGEQIQLYYQIAVHGKRDLSLAPDEYAGFMMTLLRMLAFAPLAATSCDANAVIENTELQSPSAQTAEKETAAKKPQPRPETETAQTSVQTASAAAMPSESKTAEPVSNQENNDVPPWEDAPDEAQTAAGTAQTSAKSIQTASEAETPPENQVSKNKAADNETNAPLSETPSENPIQATPNNEAVETETFAHEAPAEPFYGYGFPDNDCPVEDNAEIPPPDWEHAAPADAEEENNADEGSNDENNTPSAPPPEFSTENWAAIVRHFARKLGAAQMPAQHSAWTEYHPDTGLMVLAMTAEARATADKKRLDKIRDTLAQAYGLQLTLQTQDWRDEAGRETPAMQDKRVQAEDRQKAQALLEADPAAQKILQAFGAQWQPESLELAANRP

SEQ ID NO: 32337 - protein, 501 aa, Neisseria meningitidis; identical to SEQ ID NO: 16540

SEQ ID NO: 32338 - protein, 919 aa, Neisseria meningitidis; identical to SEQ ID NO: 19900

SEQ ID NO: 32339 - protein, 225 aa, Neisseria meningitidis; identical to SEQ ID NO: 25428

SEQ ID NO: 32340 - protein, 87 aa, Neisseria meningitidis; identical to SEQ ID NO: 932

SEQ ID NO: 32341 - protein, 791 aa, Neisseria meningitidis; identical to SEQ ID NO: 24580

SEQ ID NO: 32342 - protein, 206 aa, Neisseria meningitidis; identical to SEQ ID NO: 19020

SEQ ID NO: 32343 - protein, 514 aa, Neisseria meningitidis; identical to SEQ ID NO: 19733

SEQ ID NO: 32344 - protein, 422 aa, Neisseria meningitidis; identical to SEQ ID NO: 15601

SEQ ID NO: 32345 - protein, 1992 aa, Neisseria meningitidis; identical to SEQ ID NO: 18376

SEQ ID NO: 32346 - protein, 77 aa, Neisseria meningitidis
MEAIVYLEDNEYIALCDLLKLAGLAESGGQAKALIAEGLVSRNGETETRKTAKIRGGEVIEFDGARLEIADGYDPEE

SEQ ID NO: 32347 - protein, 141 aa, Neisseria meningitidis; identical to SEQ ID NO: 24497

SEQ ID NO: 32348 - protein, 168 aa, Neisseria meningitidis; identical to SEQ ID NO: 5993

SEQ ID NO: 32349 - protein, 604 aa, Neisseria meningitidis; identical to SEQ ID NO: 25214

SEQ ID NO: 32350 - protein, 970 aa, Neisseria meningitidis
MSFQTASVQPSGRGLLPFVYILKKRAHAMMDEKLNFSYLFGSNAPYIEELYEAFLENPDAVDEKWKQYFTDLSKQPGTVAVDVAHTPIRESFVTLAKKKIASAVAGGADEAMLKKQVSVLRLISAYRIQGVGAAQLDPLKRIPPRDIEALDPKFHGLSDADMTLQFNMGEGDFANRGKLPLSQIISNLKQTYCGHIALEYIYIPNTEERRWVRNYFESVLSTPHYNADQKRRILKEMTAAETLERYLHTKYVGQKRFGVEGGESAIAGLNYLIQNASKDGVEEVIIGMAHRGRLNVLVNILGKKPGDLFAEFEGRAEIKLPSGDVKYHMGFSSDIATPHGPMHVSLAFNPSHLEIVNPVVEGSARAKQKRLGENGRDKVLPVLIHGDSAFIGLGVNQATFNLSKTRGYTTGGTVHIVINNQIGFTTSDIRDTRSTVHCTDIAKMVSAPVIHVNGDDPERVCFAIQAALDYRKKFHKDIVIDVVCYRKWGHNEGDDPTLTQPMMYKKVSQHPGARALYTEQLIAEGVVTQAEADGYIQAYRDALDKGEHVEQTTLSNFQRTQIDWSKYQGKDWREHIETGLPAADIERLTEKFTAVPEGFALHPTAKRVIEARKAMASGKQAIDWGMAETLAYASLVTKGHGVRISGEDSGRGTFSHRHAVLHDQKREKWDDGTYVPLRHMGEGMGEFLVIDSILNEEAVMAFEYGFACSAPDKLTIWEAQFGDFANGAQVTIDQFLSSGETKWGRLCGLTTILPHGYDGQGPEHSSARVERWLQLCSENNMQVIMPSEASQMFHLLQRQVLGSYRKPLVIFMSKRLLRFKGAMSPLENFTEGSTFRPVIGDTAERASNGSVKRVVLCAGQVYYDLEAGRTERKLEDDVAIVRVEQLYPFPYEEVKAELAKYPNAKSVVWAQEEPKNQGAFYQIRHRIEDVISEEQKLSYAGRPSSASPAVGYSSKHIAQLKQLVEDALAL

SEQ ID NO: 32351 - protein, 197 aa, Neisseria meningitidis; identical to SEQ ID NO: 24409

SEQ ID NO: 32352 - protein, 2510 aa, Neisseria meningitidis
MNKTLYRVIFNRKRGAVVAVAETTKREGKSCADSDSGSAHVKSVPFGTTHAPVCRSNIFSFSLLGFSLCLAVGTANIAFADGIIADKAAPKTQQATILQTGNGIPQVNIQTPTSAGVSVNQYTQFDVGNRGAILNNSRSNTQTQLGGWIQGNLWLARGEARVVVNQINSSHSSQMNGYIEVGGRRAEVVIANPAGIAVNGGGFINASRATLTTGQPQYQAGALTGFQVRSGHIAITGQGLDARDTDFTQILSHAVKIDGPVWGKDVRVSAGKNDVSADGSIQSSHSPATNINSDNSLYAIDTGALGGMYAGKITLISTDRDASVRNQGQWFASAGNVAIDANGRLVNSGTMAAANAKDTDNTAEHKVNIRSQGVENSGTAVSQQGTQIHSQSIQNTGTLLSSGEILIHNSGSLKNETSGTIEAARLAIDTDTLNNQGKLSQTGSQKLHIDAQGKMDNRGRMGLQDTAPTASNGSSNQTGNSYNASFHSSTTTPTTATGTGTATVSISNITAPTFADGTIRTHGALDNSGSIIANGQTDVSAQQGLNNAGQIDIHQLNAKGSAFDNHNGTIISDAVHIQAGSLNNQNGNITTRQQLEIETDQLDNAHGKLLSAEIADLAVSGSLNNQNGEIATNQQLIIHDGQQSTAVIDNTNGTIQSGRDVAIQAKSLSNNGTLAADNKLDIALQDDFYVERNIVAGNELSLSTRGSLKNSHTLQAGKRIRIKANNLDNAAQGNIQSGGATDIGTQHNLTNRGLIDGQQTKIQAGQMNNIGTGRIYGDNIAIAATRLDNQDENGTGAAIAARENLNLGIGQLNNRENSLIYSGNDMAVGGALDTNGQATGKAQRIHNAGATIEAAGKMRLGVEKLHNTNEHLKTQLVETGREHIVDYEAFGRHELLREGTQHELGWSVYNDESDHLRTPDGAAHENWHKYDYEKVTQKTQVTQTAPAKIISGNDLTIDGKEVFNTDSQIIAGGNLLVQTEKDGLHNEQTFGEKKVFSENGKLHSYWREKHKGRDSTGHSEQNYTLPEEITRNISLGSFAYESHRKALSHHAPSQGTELPQSNGISLPYTSNSFTPLPSSSLYIINPVNKGYLVETDPRFANYRQWLGSDYMLDSLKLDPNNLHKRLGDGYYEQRLINEQIAELTGHRRLDGYQNDEEQFKALMDNGATAARSMNLSVGIALSAEQVAQLTSDIVWLVQKEVKLPDGGTQTVLVPQVYVRVKNGDIDGKGALLSGSNTQINVSGSLKNSGTIAGRNALIINTDTLDNIGGRIHAQKSAVTATQDINNIGGILSVEQTLLLNAGNNINSQSTAASSQNTQGSSTYLDRMAGIYITGKEKGVLAAQAGKDINIIAGQISNQSEQGQTRLQAGRDINLDTVQTGKHQATHFDADNHVIRGSTNEVGSSIQTKGDVTLLSGNNLNAKAAEVSSANGTLAVSAKNDINISAGINTTHVDDASKHTGRSGGGNKLIITDKAQSHNETAQSSTFDGRQVVLQAGNDANILGSNVISDNGTRIQAGNHVRIGTTQTQSQSETYHQTQKSGLMSAGIGFTIGSKTNTQENQSQSNEHTGSTVGSLKGDTTIVAGKHYEQIGSTVSSPEGNNIIHAQSIDIQAAHNKLNSNTTQTYEQKGLTVAFSSPVTDLAQQAIAVAQSSKQVGQSKNGRVNAMAAANAGWQAYQTGKSAQNLANGTTNAKQVSISITYGEQQNRQTTQVQASQAQASQIQAGGKTTLIATGAAEQSNINIAGSDIAGKAGTILIADNDITLQSAEQSNTERSQNKSTGWNAGAAVSFGQGGWSLGVTAGGNVGKGYGNGDSVTHRHSHIGDKGSQTLIQSGGDTTIKGAQVRGKGVQVNAKNLSIQSVQDRETYQSKQQNASAQVTVGYGFSASGDYSQSKIRADHASVTEQSGIYAGEDGYQIKVGNHTDLKGGIITSSQSAEDKGKNRFQTATLTTSDIQNYSQYQGKSFGLGASVAVSGKTLGQGAQNKPQNKHLTSVADKNGASSSVGYGSDSDSQSSITKSGINTRNIHITDEAGQIRLTGKTAAQTKADIDTNVTTDTAERHSGSLKNTFNKEAVQSELDLQREVTQEFDKTRQGVKQELYAVVDSKREQATKERLKNGGYDNDKSRALNKEANELDEKIRWLDAGLGLVWGAGSSDMAWSMFATTQADRAVRSATAPKEMWFHKKIIDEKTGKVSFDTRQIWSLNDLSKEELASIQDTNGKVITVSNPGIFNNREDSLSNAAKQNRNSTNGSGVIAVMNPPTGKYKSDSNNKIKDSLWLSSSLVSELMYVGYDQLNNKVFQGYLPKTNSEKLNQDIYREVQKMDNGWSVDTSNHSRGGITASVSLKDWVNNKEQNGIAPIRKARFYGTATNVKNDYADVLQKNGYTYTGADGKTYNSGAYSIVHDKDFVGNKWIPFLLGNNETTKGACKGFCYSHSSYFAEVPEQYQRDASGEYVIRDGKKVETEAWKDYKSIWGEPTEKDENGKYINKYIPKLINPNKPNGEKYEDKPF

SEQ ID NO: 32353 - protein, 459 aa, Neisseria meningitidis; identical to SEQ ID NO: 25256

SEQ ID NO: 32354 - protein, 426 aa, Neisseria meningitidis; identical to SEQ ID NO: 24144

SEQ ID NO: 32355 - protein, 311 aa, Neisseria meningitidis; identical to SEQ ID NO: 25402

SEQ ID NO: 32356 - protein, 155 aa, Neisseria meningitidis; identical to SEQ ID NO: 6688

SEQ ID NO: 32357 - protein, 395 aa, Neisseria meningitidis
MNTLLNQLKPYPFARLREAMQGISAPEGLEAVPLHIGEPKHPTPKVITDALTASLHELEKYPLTAGLPELRQACANWLKRRYDGLTVDADNEILPVLGSREALFSFVQTVLDPVSDGIKPAIVSPNPFYQIYEGATLLGGGEIHFANCPAPSFNPDWRSISEEVWKRTKLVFVCSPNNPSGSVLDLDGWKEVFDLQDKYGFIIASDECYSEIYFDGNKPLGCLQAAAQLGRSRQKLLMFTSLSKRSNVPGLRSGFVAGDAELLKNFLLYRTYHGSAMSIPVQRASIAAWDDEQHVIDNRRLYQEKFERVIPILQQVFDVKLPDASFYIWLKVPDGDDLAFARNLWQKAAIQVLPGRFLARDTEQGNPGEGYVRIALVADVATCVKAAETIVSLYR

SEQ ID NO: 32358 - protein, 530 aa, Neisseria meningitidis
MRAFAVRNHKGSFMNRTYANFYEMLTTACRKNGNGTAVFDGKEKTAYRALKQEAEAVAAYLQNIGVKFGDTVALAVSNSTEFITAYFAISAIGAVAVPMNTFLKNSEYAYILNDCKARFLFASVGLSKELAGLKAQTPIEKIIWTGKSRPVGETAEGDAFFEDVRRFPEKPDLGRQPRINDLAHIIYTSGTTGHPKGALISYANLFANLNGIERIFKISKRDRFIVFLPMFHSFTLTAMVLLPIYMACSIILVKSVFPFSNVLKQTLLKRATVFLGIPAIYTAMSKAKIPWYFRWFNRIRLFISGGAPLAEQTILDFKAKFPRAKLLEGYGLSEASPVVAVNTPERQKARSVGIPLPGLEAKAVDEELVEVPRGEVGELIVRGGSVMRGYLNMPAATDETIVNGWLKTGDFVTIDEDGFIFIVDRKKDLIISKGQNVYPREIEEEIYKLDAVEAAAVIGVKDRYADEEIVAFVQLKEGMDLGENEIRRHLRTVLANFKIPKQIHFKDGLPRNATGKVLKRVLKEQFDGNK

SEQ ID NO: 32359 - protein, 204 aa, Neisseria meningitidis; identical to SEQ ID NO: 25245

SEQ ID NO: 32360 - protein, 468 aa, Neisseria meningitidis; identical to SEQ ID NO: 1695

SEQ ID NO: 32361 - protein, 248 aa, Neisseria meningitidis; identical to SEQ ID NO: 24823

SEQ ID NO: 32362 - protein, 148 aa, Neisseria meningitidis; identical to SEQ ID NO: 4053

SEQ ID NO: 32363 - protein, 170 aa, Neisseria meningitidis
MTGFISNAFIGLKEAGSLLKGFNQLKTEAEVAQKTIELNQIIAGIQTDLFEAQSSYTAAISRIDELEKELVAVKNWSTEKQRYQLYELAPGSFVYRLKTEMANSEPIHDICPQCYEQGVKSILQFNGYEGAFHKYSCSRCQTIILGERLKSDVEVFSVGGSRYGRLIDGY

SEQ ID NO: 32364 - protein, 208 aa, Neisseria meningitidis; identical to SEQ ID NO: 1121

SEQ ID NO: 32365 - protein, 467 aa, Neisseria meningitidis; identical to SEQ ID NO: 18280

SEQ ID NO: 32366 - protein, 129 aa, Neisseria meningitidis; identical to SEQ ID NO: 322

SEQ ID NO: 32367 - protein, 248 aa, Neisseria meningitidis; identical to SEQ ID NO: 3755

SEQ ID NO: 32368 - protein, 384 aa, Neisseria meningitidis; identical to SEQ ID NO: 19375

SEQ ID NO: 32369 - protein, 178 aa, Neisseria meningitidis; identical to SEQ ID NO: 2748

SEQ ID NO: 32370 - protein, 352 aa, Neisseria meningitidis; identical to SEQ ID NO: 327

SEQ ID NO: 32371 - protein, 136 aa, Neisseria meningitidis; identical to SEQ ID NO: 4515

SEQ ID NO: 32372 - protein, 275 aa, Neisseria meningitidis; identical to SEQ ID NO: 22228

SEQ ID NO: 32373 - protein, 226 aa, Neisseria meningitidis; identical to SEQ ID NO: 19445

SEQ ID NO: 32374 - protein, 321 aa, Neisseria meningitidis; identical to SEQ ID NO: 24871

SEQ ID NO: 32375 - protein, 280 aa, Neisseria meningitidis
MSGGVMPELPEVETTLRGIAPHIEGKTVEAVVLRQLKLRWQINPDLGEILSGRQVLSCGRRAKYLLIRFQTGVLLIHLGMSGSLRIFTPSDGRIGRPDRHDHVDIVFSDGTVMRYRDPRKFGAILWYEGIEEHHPLLEKLGPEPLSEAFCTDYLYVRLKAQKRAVKLALMDNAVVVGVGNIYANESLFRAGISPHRPANRLKKKECALLVETVKAVLRRAIETGGSTLRDFVDSDGKSGYFQQEYTVYGRHNQPCPQCGGLVVKETLGQRGTFYCPNCQK

SEQ ID NO: 32376 - protein, 279 aa, Neisseria meningitidis; identical to SEQ ID NO: 9071

SEQ ID NO: 32377 - protein, 123 aa, Neisseria meningitidis; identical to SEQ ID NO: 616

SEQ ID NO: 32378 - protein, 114 aa, Neisseria meningitidis; identical to SEQ ID NO: 53

SEQ ID NO: 32379 - protein, 187 aa, Neisseria meningitidis; identical to SEQ ID NO: 18661

SEQ ID NO: 32380 - protein, 340 aa, Neisseria meningitidis; identical to SEQ ID NO: 19658

SEQ ID NO: 32381 - protein, 514 aa, Neisseria meningitidis; identical to SEQ ID NO: 19204

SEQ ID NO: 32382 - protein, 100 aa, Neisseria meningitidis; identical to SEQ ID NO: 1675

SEQ ID NO: 32383 - protein, 524 aa, Neisseria meningitidis; identical to SEQ ID NO: 2756

SEQ ID NO: 32384 - protein, 56 aa, Neisseria meningitidis; identical to SEQ ID NO: 8938

SEQ ID NO: 32385 - protein, 122 aa, Neisseria meningitidis; identical to SEQ ID NO: 3130

SEQ ID NO: 32386 - protein, 171 aa, Neisseria meningitidis; identical to SEQ ID NO: 25576

SEQ ID NO: 32387 - protein, 179 aa, Neisseria meningitidis; identical to SEQ ID NO: 18824

SEQ ID NO: 32388 - protein, 136 aa, Neisseria meningitidis; identical to SEQ ID NO: 25189

SEQ ID NO: 32389 - protein, 407 aa, Neisseria meningitidis
VGRRKLWFALAAAGVIGGLVGIVLTELMHFIQHTAYGYGADGAYISFREGVAQASGMRRVAMLTLCGAIAGGGWWLLKALGKPQIEIKAALKQPLQGLPFLTTVFHVLLQIITVGLGSPLGREVAPREMTAAFASAGGKRLGLDEGEMRLLIACASGAGLAAVYNVPLASTLFILEAMLGMWTQQAVAAALLTSVIATAVARIGLGDVQQYHPANLAVNTSLLWFSAVIGPILGATAVFFQSTAQKFPFIKRDNIKIIPLAVCMFALIGAIAVWFPEVLGNGKAGNQLTFGGLTDWQYALELAAVKWPVVLMALAAGAYGGLITPSMMLGSTVSFAAAAAWNSVFPAMPSESAAVVGAAVFLGVSLKMPLTAIVFVLELTYAPLSLLLPLCIGMAGALGTSGKMGFK

SEQ ID NO: 32390 - protein, 363 aa, Neisseria meningitidis
VKKIRSSEESDMSGYTGGLVVSGGISLIDRLDIMENVNRIVAEGIAAVEAAQDFNALEQIKARYLGKTGELTGLLKTLGQMSPEERKTIGAHINECKNRFQTAFNAKRDALNEAKLQARLAAEALDITLPGRAQEGGSLHPVTLTLQRVVELFHGMGFEVADGPEIEDDFHNFQALNIPANHPARAMQDTFYVENGDVLRTHTSPIQIRYMLDKKEPPIRIIAPGRVYRVDSDATHSPMFHQAEGLWVEEGVTFADLKAVFTDFIRRFFERDDLQVRFRPSFFPFTEPSAEIDIMGENGKWLEVGGCGMVHPNVLKNVNIDSEKYTGFAFGIGLDRFAMLRYNVNDLRLFFDNDLNFLKQFVK

SEQ ID NO: 32391 - protein, 537 aa, Neisseria meningitidis
MFLILGRNFLKIILCFSFFVPKFALASVNVPGKFDRVEVYDDGRYLGIRGSDDKRRRIWKGVFDRESGRYLTSEAQDLKVRHVSTGASSTGKVSSVVSSSVSRAAVLSGVGKLARLGAKLSTRAVPYVGTALLAHDVYETFKEDIQAQGYQYDPETDKFVKGYEYSNCLWYEDKRRINRTYGCYGVDSSIMRLMSDDSRFPEVKELMESQMYRLARPFWNWHKEELNKLSSLDWNNFVLNRCTFNWNGGDCLVNKGDDFRNGADFSLIRNSKYKEEMDAKKLEEILSLKVDANPDKYIKATGYPGYSEKVEVAPGTKVNMGPVTDRNGNPVQVVATFGRDSQGNTTVDVQVIPRPDLTPGSAEAPNAQPLPEVSPAENPANNPNPNENPGTSPNPEPDPDLNPDANPDTDGQPGTRPDSPAVPDRPNGRDGEDGGLLCKFFPDILACDRLPEPNPAEDLNLPSETVNVEFQKSGIFQNSAQCPAPVTFTVTVLDSSRQFAFSFENACTIAERLRYMLLALAWAVAAFFCIRTVSREV

SEQ ID NO: 32392 - protein, 1391 aa, Neisseria meningitidis; identical to SEQ ID NO: 4736

SEQ ID NO: 32393 - protein, 249 aa, Neisseria meningitidis
MLIQAVTIFPEMFDSITRYGVTGRANRQGIWQFEAVNPRKFADNRLSYIDDRPFGGGPGMIMMAPPLHAAIEHAKAQSSQTAKVIYLSPQGKPLTHQKAAELAELPHLILLCGRYEGIDERLLQTSVDEEISIGDFVVSGGELPAMMLMDAVLRLVPGVLGDMQSAEQDSFSSGILDCPHYTKPLEFQGMAVPEVLRSGNHGLIAEWRLEQSLRRTLERRPDLLEKRSLIPKESRLLETIRQEQREIQS

SEQ ID NO: 32394 - protein, 179 aa, Neisseria meningitidis; identical to SEQ ID NO: 11525

SEQ ID NO: 32395 - protein, 238 aa, Neisseria meningitidis; identical to SEQ ID NO: 2994

SEQ ID NO: 32396 - protein, 212 aa, Neisseria meningitidis; identical to SEQ ID NO: 9292

SEQ ID NO: 32397 - protein, 397 aa, Neisseria meningitidis; identical to SEQ ID NO: 19122

SEQ ID NO: 32398 - protein, 290 aa, Neisseria meningitidis; identical to SEQ ID NO: 18034

SEQ ID NO: 32399 - protein, 258 aa, Neisseria meningitidis; identical to SEQ ID NO: 3248

SEQ ID NO: 32400 - protein, 369 aa, Neisseria meningitidis; identical to SEQ ID NO: 18151

SEQ ID NO: 32401 - protein, 367 aa, Neisseria meningitidis; identical to SEQ ID NO: 1944

SEQ ID NO: 32402 - protein, 321 aa, Neisseria meningitidis; identical to SEQ ID NO: 24344

SEQ ID NO: 32403 - protein, 230 aa, Neisseria meningitidis; identical to SEQ ID NO: 18712

SEQ ID NO: 32404 - protein, 197 aa, Neisseria meningitidis; identical to SEQ ID NO: 5504

SEQ ID NO: 32405 - protein, 397 aa, Neisseria meningitidis; identical to SEQ ID NO: 5534

SEQ ID NO: 32406 - protein, 38 aa, Neisseria meningitidis
VCLNLLKAANRLSAPAPPKRQPGCLIIGYPGRIKGIFG

SEQ ID NO: 32407 - protein, 183 aa, Neisseria meningitidis; identical to SEQ ID NO: 4319

SEQ ID NO: 32408 - protein, 422 aa, Neisseria meningitidis
VKPLRRLTNLLAACAVAAAAFGQPALAADLAQDPFITDNAQRQHYEPGGKYHLFGDPRGSVSDRTGQINVIQDYTHQMGNLLIQQANINGTIGYHTRFSGHGHEEHAPFDNHAADSASEEKGSVNEGFTVYRLNWKGHEHHPADGYDGPQGGNYPKPTGARDEYTYHVNGTARSIKLNPTDTRSIRQRISDNYSNLGSNFSDRADEANRKMFEHNAKLDRWGNSMEFINGVAAGALNPFISAGEAVDQWMQENPNAAETVEALVNVLPFAKVKNLTKAAKPGKAAVSGDFSDSYKHNTASRLSQSVDGEMFQTRNVDFKAKSIGTKIHDGAQGKHISGHRNYIEGKSTLNQNINPQELLNGIHSGAYPVISKGARGNPVVDFGYPIGSDGKSGLSTNFGTIHSGKNGVHIVPANPKTIKKVQ

SEQ ID NO: 32409 - protein, 156 aa, Neisseria meningitidis; identical to SEQ ID NO: 955

SEQ ID NO: 32410 - protein, 300 aa, Neisseria meningitidis; identical to SEQ ID NO: 19179

SEQ ID NO: 32411 - protein, 52 aa, Neisseria meningitidis; identical to SEQ ID NO: 14117

SEQ ID NO: 32412 - protein, 91 aa, Neisseria meningitidis; identical to SEQ ID NO: 9295

SEQ ID NO: 32413 - protein, 193 aa, Neisseria meningitidis; identical to SEQ ID NO: 24517

SEQ ID NO: 32414 - protein, 77 aa, Neisseria meningitidis; identical to SEQ ID NO: 3979

SEQ ID NO: 32415 - protein, 162 aa, Neisseria meningitidis; identical to SEQ ID NO: 9363

SEQ ID NO: 32416 - protein, 89 aa, Neisseria meningitidis; identical to SEQ ID NO: 19926

SEQ ID NO: 32417 - protein, 107 aa, Neisseria meningitidis; identical to SEQ ID NO: 4856

SEQ ID NO: 32418 - protein, 517 aa, Neisseria meningitidis; identical to SEQ ID NO: 3152

SEQ ID NO: 32419 - protein, 391 aa, Neisseria meningitidis; identical to SEQ ID NO: 24888

SEQ ID NO: 32420 - protein, 557 aa, Neisseria meningitidis; identical to SEQ ID NO: 25499

SEQ ID NO: 32421 - protein, 157 aa, Neisseria meningitidis; identical to SEQ ID NO: 18255

SEQ ID NO: 32422 - protein, 672 aa, Neisseria meningitidis; identical to SEQ ID NO: 18360

SEQ ID NO: 32423 - protein, 146 aa, Neisseria meningitidis; identical to SEQ ID NO: 18170

SEQ ID NO: 32424 - protein, 278 aa, Neisseria meningitidis; identical to SEQ ID NO: 24614

SEQ ID NO: 32425 - protein, 472 aa, Neisseria meningitidis; identical to SEQ ID NO: 24772

SEQ ID NO: 32426 - protein, 306 aa, Neisseria meningitidis; identical to SEQ ID NO: 25103

SEQ ID NO: 32427 - protein, 286 aa, Neisseria meningitidis; identical to SEQ ID NO: 24607

SEQ ID NO: 32428 - protein, 420 aa, Neisseria meningitidis; identical to SEQ ID NO: 25272

SEQ ID NO: 32429 - protein, 867 aa, Neisseria meningitidis; identical to SEQ ID NO: 25460

SEQ ID NO: 32430 - protein, 55 aa, Neisseria meningitidis; identical to SEQ ID NO: 1257

SEQ ID NO: 32431 - protein, 637 aa, Neisseria meningitidis; identical to SEQ ID NO: 24725

SEQ ID NO: 32432 - protein, 139 aa, Neisseria meningitidis
MNLVKLLANNWQPIAIIALVGTGLAVSHHQGYKAAFAKQQAVIDKMEHDKAQALLLSAQNYARELELARAEAKKYEVKAHAVGMALAKKQAEVSRLKTENKKEIENVLTQDRKNAGGGCIDGFGHHGLQLYKRALGYGN

SEQ ID NO: 32433 - protein, 133 aa, Neisseria meningitidis
MKDKHDSSAMRLDKWLWAARFFKTRSLAQKHIELGRVQVNGSKVKNSKTIDIGDIIDLTLNSLPYKIKVKGLNHQRRPASEARLLYEEDAKTAALREERKQLDQFSRITSAYPDGRPTKRDRRQLDRLKKGDW

SEQ ID NO: 32434 - protein, 419 aa, Neisseria meningitidis; identical to SEQ ID NO: 6779

SEQ ID NO: 32435 - protein, 118 aa, Neisseria meningitidis; identical to SEQ ID NO: 7534

SEQ ID NO: 32436 - protein, 375 aa, Neisseria meningitidis; identical to SEQ ID NO: 777

SEQ ID NO: 32437 - protein, 360 aa, Neisseria meningitidis; identical to SEQ ID NO: 18389

SEQ ID NO: 32438 - protein, 151 aa, Neisseria meningitidis; identical to SEQ ID NO: 24160

SEQ ID NO: 32439 - protein, 916 aa, Neisseria meningitidis
MQQQYLFRLNILCLSLMTALPVYAENVQAGQAQEKQLDTIQVKAKKQKTRRDNEVTGLGKLVKTADTLSKEQVLDIRDLTRYDPGIAVVEQGRGASSGYSIRGMDKNRVSLTVDGLAQIQSYTAQAALGGTRTAGSSGAINEIEYENVKAVEISKGSNSVEQGSGALAGSVAFQTKTADDVIGEGRQWGIQSKTAYSGKNRGLTQSIALAGRIGGAEALLIHTGRRAGEIRAHEDAGRGVQSFNRLVPVEDDSKYADFIVEEECESKNYETCKANPKKDVVGKDERQTVSTRDYTGPNRFLADPLSYESRSWLFRPGFRFENKRHYIGGILEHTQQTFDTRDMTVPAFLTKAVFDENRKYGPIRGNGKYAGNHKYGGLFTNGENGALVGAEYGTGVFYDETHTKSRYGLEYVYTNADKDTWADYARLSYDRQGIGLDNHFQQTHCSADGSDKYCRPSADKPFSYYKSDRVIYGESHRLLQAAFKKSFDTAKIRHNLSVNLGFDRFGSNLRHQDYYYQHANRAYSSKTPPKTGNGGSNASPNGSQDNPYWVSIGGGNVVTGQICRLGNNTYTDCTPRSINGKSYYAAVRDNVRLGRWADVGAGLRYDYRSTHSDDGSVSTGTHRTLSWNAGIVLKPADWLDLTYRTSTGFRLPSFAEMYGWRAGVQSKAVKIDPEKSFNKEAGIVFKGDFGNLEASWFNNAYRDLIVRGYEAQIQNGKETAKGDPAYLNAQSARITGINVLGKIDWNGVWDKLPEGWYSTFAYNRVRVRDIKKRADRTDIQSHLFDAIQPSRYVVGLGYDQPEGKWGVNGMLTYSKAKEITELLGSRALLNGNSRNTKATARRTRPWYIVDVSGYYTIKKHFTLRAGVYNLLNHRYVTWENVRQTAGGAVNQHKNVGVYNRYAAPGRNYTFSLEMKF

SEQ ID NO: 32440 - protein, 667 aa, Neisseria meningitidis
MLPTQPNPTQPNPTQPNPTQPNPTQPNPTQPNPTQPNPSPDLIDTAGVNTEAIYTSDGITANSTQLEQLKKLFPACFDADGNFLIDRLQAEIAPQTDIGREFYEMNWLGKSYARLLRNLPPETLISEDKTHNAKPENAGSQNLLIRGDNLEVLKHLKNAYTNSVKMIYIDPPYNTGSDGFVYQDDRKFTPAELACLANIDEDEAARILDFTDKGSNSHSAWLTFMYPRLYIARELLKDDGVIFISIDDNEAAQLKLLCDEVFGEGNFIKDLIVNTSEGGGNAKYVVNGHETVLVYAKDITHFDNLKRPKDIRGKKIVINDELYWIQEDAVREQFGKYGNLHYEDIIEIKGIEFKNKIDKDIENNEYILIPKSYGKTIIGKLRKVSDDFSKFHSILNIGNISKNLTKDGIRELEELFETGKGYSPFETPKPLDLLKRLVLSATFKGNQTDLILDFFAGSGTTAHAVMQLNAEGQNGNRRYICVQLPEKTAEKSEARKAGYPTIFDITKARIEKAAAKIRVEHPDYTGDSGFKIFQTADNFRQHPDKDFSPEQPDLPLNDELSEEQLQTLLTTWTLYDGAALTTPVEPVRLGAYTAYLCEKRLYLMNAGFTSADLLAFIRKLDDDADFNPNRVIVFGSNMASAMQHELDQAVRGYANKKEIELNVIIRV

SEQ ID NO: 32441 - protein, 200 aa, Neisseria meningitidis; identical to SEQ ID NO: 18122

SEQ ID NO: 32442 - protein, 377 aa, Neisseria meningitidis; identical to SEQ ID NO: 25111

SEQ ID NO: 32443 - protein, 166 aa, Neisseria meningitidis
MNTLQKGFTLIELMIVIAIVGILAAVALPAYQDYTARAQVSEAILLAEGQKSAVTEYYLNHGEWPANNNSAGVASSTDIKGKYVAGVKVEKGVITATMASSNVNKEIKGKKLSLWATRQNGSVKWFCGQPVERNANNADAVANGKGTANIDTKHLPSTCRDTASAS

SEQ ID NO: 32444 - protein, 392 aa, Neisseria meningitidis; identical to SEQ ID NO: 276

SEQ ID NO: 32445 - protein, 117 aa, Neisseria meningitidis; identical to SEQ ID NO: 18705

SEQ ID NO: 32446 - protein, 133 aa, Neisseria meningitidis; identical to SEQ ID NO: 15506

SEQ ID NO: 32447 - protein, 599 aa, Neisseria meningitidis; identical to SEQ ID NO: 15275

SEQ ID NO: 32448 - protein, 90 aa, Neisseria meningitidis; identical to SEQ ID NO: 1115

SEQ ID NO: 32449 - protein, 741 aa, Neisseria meningitidis; identical to SEQ ID NO: 24133

SEQ ID NO: 32450 - protein, 152 aa, Neisseria meningitidis; identical to SEQ ID NO: 24303

SEQ ID NO: 32451 - protein, 264 aa, Neisseria meningitidis
MMSEHRVNHEPVFLLASSPWRESSLRVEAFSRRYGRVALLARSARKRQSELRGVLVSFVPVSASWYGSQELKTLHRAEWVGGWRQPQGRALFSGLYVNELVLKLTAREDPMPELYDALAKVMEAVCREANHIADLRRFEWKLLNALGVAPDLHADGTGGDILADKTYRLMPEEAVMPVCRDTDALSHEAGAIVEGQSLIDLREGSFRTAESLQQALKITRLFIRHLLPEGLKSRQVLEQIRQFDRKETARETVPTSDGTASNAV

SEQ ID NO: 32452 - protein, 758 aa, Neisseria meningitidis
MAQITLKPIVLSILLISTPLLVLAHETEQSVDLETVSVVGKSRPRATSGLLHASTSSDKIISGDTLRQKAVNLGDALDGVPGIHASQYGGGASAPVIRGQTGRRIKVLNHHGETGDMADFSPDHAIMVDTALSQQVEILRGPVTLLYSSGNVAGLVDVTDGKIPEKMPENGVSGEAGLRLSSGNLEKLTSAGINIGLGNNFVLHTEGLYRKSGDYAVPRYRNLKRLPDSHADSQTGSIGLSWVGEKGFIGVVYSDRRDQYGLPAHSHEYDDCHADIIWQKSLINKRYLQLYPHLLTEEDIDYDNPGLSCGSHDGDGAHAHTHSGRPWIDLRNKRYELRAEWKQPLPGFEALRVHLNRNDYHHDEKAGDAVENFFNNKTHNARIELRHQPIGRLKGSWGVQYLGQKSSALSAIPETVQQPMLIDNNVRHYSFFGVEQANWDNFTLEGGVRVEKQKASIRYDKALIDRENYYNQPLPDLGAHRQTARSFALSGNWYFTPHHKLSLTASHQERLPSTQELYAHGKHVATNTFEVGNKHLNKERSNNIELALGYEGDRWQYNLALYRNHFGNYIYAQTLNDGRGPKSIEDDSEMKLVRYNQSGADFYGAEGEIYFKPTPRYRIGVSGDYVRGRLKNLPSLPGREDAYGNRPFIAQDDQNAPRVPAARLGFHLKASLTDRIDANLDYYRVFAQNKLARYETRTPGHHMLNLGANYRRNTRYGEWNWYIKTDNLLNQSVYAHSSFLSDTPQMGRSFTGGVNVKF

SEQ ID NO: 32453 - protein, 518 aa, Neisseria meningitidis; identical to SEQ ID NO: 24167

SEQ ID NO: 32454 - protein, 475 aa, Neisseria meningitidis; identical to SEQ ID NO: 18392

SEQ ID NO: 32455 - protein, 136 aa, Neisseria meningitidis; identical to SEQ ID NO: 30298

SEQ ID NO: 32456 - protein, 521 aa, Neisseria meningitidis; identical to SEQ ID NO: 25528

SEQ ID NO: 32457 - protein, 467 aa, Neisseria meningitidis; identical to SEQ ID NO: 3712

SEQ ID NO: 32458 - protein, 165 aa, Neisseria meningitidis; identical to SEQ ID NO: 19240

SEQ ID NO: 32459 - protein, 74 aa, Neisseria meningitidis; identical to SEQ ID NO: 2464

SEQ ID NO: 32460 - protein, 358 aa, Neisseria meningitidis; identical to SEQ ID NO: 18789

SEQ ID NO: 32461 - protein, 191 aa, Neisseria meningitidis; identical to SEQ ID NO: 19358

SEQ ID NO: 32462 - protein, 208 aa, Neisseria meningitidis; identical to SEQ ID NO: 24381

SEQ ID NO: 32463 - protein, 146 aa, Neisseria meningitidis; identical to SEQ ID NO: 19156

SEQ ID NO: 32464 - protein, 381 aa, Neisseria meningitidis; identical to SEQ ID NO: 14816

SEQ ID NO: 32465 - protein, 1392 aa, Neisseria meningitidis
MNYSFTEKKRIRKSFAKRENVLEVPFLLATQIDSYAKFLQLENAFDKRTDDGLQAAFNSIFPIVSHNGYARLEFVHYTLGEPLFDIPECQLRGITYAAPLRARIRLVILDKEASKPTVKEVRENEVYMGEIPLMTPSGSFVINGTERVIVSQLHRSPGVFFEHDKGKTHSSGKLLFSARIIPYRGSWLDFEFDPKDLLYFRIDRRRKMPVTILLKALGYGNEQILDIFYDKETFYLSSNGVQTDLVAGRLKGETAKVDILDKEGNVLVAKGKRITAKNIRDITNAGLTRLDVEPESLLGKALAADLIDSETGEVLASANDEITEELLAKFDINGVKEITTLYINELDQGAYISNTLRTDETAGRQAARVAIYRMMRPGEPPTEEAVEQLFNRLFFSEDSYDLSRVGRMKFNTRTYEQKLSEAQQNSWYGRLLNETFAGAAEKGGYVLSVEDIVASIATLVELRNGHGEVDDIDHLGNRRVRSVGELTENQFRSGLARVERAVKERLNQAESENLMPHDLINAKPVSAAIKEFFGSSQLSQFMDQTNPLSEVTHKRRVSALGPGGLTRERAGFEVRDVHPTHYGRVCPIETPEGPNIGLINSLSVYARTNDYGFLETPYRRVIDGKVTKEIDYLSAIEEGRYVIAQANADLDSDGNLIGDLVTCREKGETIMATPDRVQYMDVATGQVVSVAASLIPFLEHDDANRALMGANMQRQAVPCLRPEKPMVGTGIERSVAVDSATAIVARRGGVVEYVDANRVVIRVHDDEATAGEVGVDIYNLVKFTRSNQSTNINQRPAVKAGDVLQRGDLVADGASTDLGELALGQNMTIAFMPWNGYNYEDSILISEKVAADDRYTSIHIEELNVVARDTKLGAEDITRDIPNLSERMQNRLDESGIVYIGAEVEAGDVLVGKVTPKGETQLTPEEKLLRAIFGEKASDVKDTSLRMPTGMSGTVIDVQVFTREGIQRDKRAQSIIDSELKRYRLDLNDQLRIFDNDAFDRIERMIVGQKANGGPMKLAKGSEITTEYLAGLPSRHDWFDIRLTDEDLAKQLELIKVSLQQKREEADELYEIKKKKLTQGDELQPGVQKMVKVFIAIKRRLQAGDKMAGRHGNKGVVSRILPVEDMPYMADGRPVDIVLNPLGVPSRMNIGQILEVHLGWAAKGIGERIDRMLKEQRKAGELREFLNRLYNGSGKKEDLDALTDEEIIELASNLRKGASFASPVFDGAKESEIREMLNLAYPSDDPEVEKLGFNDSKTQITLYDGRSGEAFDRKVTVGVMHYLKLHHLVDEKMHARSTGPYSLVTQQPLGGKAQFGGQRFGEMEVWALEAYGAAYTLQEMLTVKSDDVNGRTKMYENIVKGEHKIDAGMPESFNVLVKEIRSLGLDIDLERY

SEQ ID NO: 32466 - protein, 1071 aa, Neisseria meningitidis; identical to SEQ ID NO: 19134

SEQ ID NO: 32467 - protein, 212 aa, Neisseria meningitidis; identical to SEQ ID NO: 19072

SEQ ID NO: 32468 - protein, 660 aa, Neisseria meningitidis
MTEPTYIPLRLHTEFSITDGMVRIKKLVAKAQEYGLPALGISDLMNEFGLVKFYKACRGAGIKPIGAADVWIGNPNAPDKPFRAMLIIRNDAGYLRLSELLTAAYVGKDRNIHHAELNPEWLENGDNSGLICLSGAHYGEVGVNLLNGNEDAARAAALKYAAWFPDAFYLELQRLPERPEWEACVSGSVKLAEELGLPVVATHPTQFMSSDDFNAHEARVCIAGGWVLTDKKRPRDFTPGQFFIPPETMLERFADLPEALENTVEIAKRCNLHITLGKNFLPLFPTPDGLSRDDYLIKLSNKGLQERMVQLYPDEAERAAKMPEYQERLDFELNIIIQMKFPGYFLIVQDFINWAKTHGCPVGPGRGSGAGSLVAYSLKITDLDPLKYALLFERFLNPERVSMPDFDVDFCQANRGRVIEYVRDKYGAQAVSQIVTFGTMSSKAVIRDVGRVLELPFMLCDKLSKLIPLEANKPLGLDDAMKAEPQIQELIEAEEADELITLAKKLEDLTRGLGMHAGGVLIAPGKISDYSPVYQADESASPVSMYDKGDVEDVGLVKFDFLGLRNLTIIEMAQNNIKNTTGDIIDVGKIPLDDQAAYQIFRDANTTAVFQFESTGMKKMLKTAHTTKFEELIAFVSLYRPGPMDNIPDFVARMKGQEFQ

SEQ ID NO: 32469 - protein, 612 aa, Neisseria meningitidis; identical to SEQ ID NO: 19368

SEQ ID NO: 32470 - protein, 287 aa, Neisseria meningitidis; identical to SEQ ID NO: 18747

SEQ ID NO: 32471 - protein, 173 aa, Neisseria meningitidis; identical to SEQ ID NO: 6851

SEQ ID NO: 32472 - protein, 96 aa, Neisseria meningitidis; identical to SEQ ID NO: 3537

SEQ ID NO: 32473 - protein, 108 aa, Neisseria meningitidis; identical to SEQ ID NO: 6420

SEQ ID NO: 32474 - protein, 379 aa, Neisseria meningitidis; identical to SEQ ID NO: 12895

SEQ ID NO: 32475 - protein, 333 aa, Neisseria meningitidis; identical to SEQ ID NO: 465

SEQ ID NO: 32476 - protein, 215 aa, Neisseria meningitidis; identical to SEQ ID NO: 1509

SEQ ID NO: 32477 - protein, 103 aa, Neisseria meningitidis; identical to SEQ ID NO: 1278

SEQ ID NO: 32478 - protein, 241 aa, Neisseria meningitidis; identical to SEQ ID NO: 400

SEQ ID NO: 32479 - protein, 455 aa, Neisseria meningitidis; identical to SEQ ID NO: 25747

SEQ ID NO: 32480 - protein, 99 aa, Neisseria meningitidis; identical to SEQ ID NO: 19064

SEQ ID NO: 32481 - protein, 302 aa, Neisseria meningitidis; identical to SEQ ID NO: 24161

SEQ ID NO: 32482 - protein, 321 aa, Neisseria meningitidis; identical to SEQ ID NO: 4056

SEQ ID NO: 32483 - protein, 324 aa, Neisseria meningitidis; identical to SEQ ID NO: 24794

SEQ ID NO: 32484 - protein, 41 aa, Neisseria meningitidis; identical to SEQ ID NO: 5333

SEQ ID NO: 32485 - protein, 67 aa, Neisseria meningitidis; identical to SEQ ID NO: 20018

SEQ ID NO: 32486 - protein, 921 aa, Neisseria meningitidis
MRSSFRLKPICFYLMGVMLYHHSYAEDAGRAGSEAQIQVLEDVHVKAKRVPKDKKVFTDARAVSTRQDIFKSSENLDNIVRSIPGAFTQQDKSSGIVSLNIRGDSGFGRVNTMVDGITQTFYSTSTDAGRAGGSSQFGASVDSNFIAGLDVVKGSFSGSAGINSLAGSANLRTLGVDDVVQGNNTYGLLLKGLTGTNSTKGNAMAAIGARKWLESGASVGVLYGHSRRSVAQNYRVGGGGQHIGNFGAEYLERRKQRYFVQDGQLKFNSDSGKWERDLQRQQWKYPWYKKYENPQELQKYIEEHDKSWRENLAPQYDITPIDPSSLKQQSAGNLFKLEYDGVFNKYTAQFRDLNTKIGSRKIINRNYQFNYGLSLNSYANLNLTAAYNSGRQKYPKGSKFTGWGLLKDFETYNNAKILDLNNTATFRLPRETELQTTLGFNYFHNEYGKNRFPEELGLFFDGPDQDNGLYSYLGRFKGDKGLLPQKSTIVQPAGSQYFNTFYFDAALKKDIYRLNYSTNTVGYRFGGEYTGYYGSDDEFKRAFGENSPTYREHCNQSCGIYEPVLKKYGKKRANNHSVSISADFGDYFMPFASYSRTHRMPNIQEMYFSQIGDSGVHTALKPERANTWQFGFNTYKKGLLKQDDTLGLKLVGYRSRIDNYIHNVYGKWWDLNGNIPSWVSSTGLAYTIQHRNFKDKVHKHGFELELNYDYGRFFTNLSYAYQKSTQPTNFSDASESPNNASKEDQLKQGYGLSRVSALPRDYGRLEVGTRWLGNKLTLGGAMRYFGKSIRATAEERYIDGTNGGNTSNVRQLGKRSIKQTETLARQPLIFDFYAAYEPKKNLIFRAEVKNLFDRRYIDPLDAGNDAATQRYYSSFDPKDKDEDVTCNADGLCNGKYGGTSKSVLTNFARGRTFLITMSYKF

SEQ ID NO: 32487 - protein, 621 aa, Neisseria meningitidis; identical to SEQ ID NO: 18904

SEQ ID NO: 32488 - protein, 63 aa, Neisseria meningitidis; identical to SEQ ID NO: 980

SEQ ID NO: 32489 - protein, 66 aa, Neisseria meningitidis; identical to SEQ ID NO: 587

SEQ ID NO: 32490 - protein, 332 aa, Neisseria meningitidis; identical to SEQ ID NO: 19103

SEQ ID NO: 32491 - protein, 695 aa, Neisseria meningitidis; identical to SEQ ID NO: 19112

SEQ ID NO: 32492 - protein, 177 aa, Neisseria meningitidis; identical to SEQ ID NO: 3663

SEQ ID NO: 32493 - protein, 595 aa, Neisseria meningitidis; identical to SEQ ID NO: 25078

SEQ ID NO: 32494 - protein, 215 aa, Neisseria meningitidis; identical to SEQ ID NO: 24873

SEQ ID NO: 32495 - protein, 296 aa, Neisseria meningitidis; identical to SEQ ID NO: 25102

SEQ ID NO: 32496 - protein, 335 aa, Neisseria meningitidis; identical to SEQ ID NO: 24896

SEQ ID NO: 32497 - protein, 242 aa, Neisseria meningitidis; identical to SEQ ID NO: 2996

SEQ ID NO: 32498 - protein, 245 aa, Neisseria meningitidis; identical to SEQ ID NO: 388

SEQ ID NO: 32499 - protein, 259 aa, Neisseria meningitidis
MAASPEAKFTEEKILWVKHHTPKLITFAISRPESYRFKAGQFSRLGFYEGEGFIWRAYSIVSAEYADTLEYFAVLIQDGPMSARFAKMQQGDTILLDKNATGFLLPERFPDGKDLVMLCTGSGIAPFLSILEQPEIRQRFDTVNLIHSVSFPEELIFNDRLAALAEHPLVGEYGHSFRFVPVTTRAANPSGLGGKRIPELLKNNSIEQALHTKFTPESTRFMICGNPEIVKDTFQTLLDMGYAMHRNRIPGQIMMENGF

SEQ ID NO: 32500 - protein, 302 aa, Neisseria meningitidis; identical to SEQ ID NO: 1790

SEQ ID NO: 32501 - protein, 142 aa, Neisseria meningitidis; identical to SEQ ID NO: 19559

SEQ ID NO: 32502 - protein, 859 aa, Neisseria meningitidis; identical to SEQ ID NO: 19097

SEQ ID NO: 32503 - protein, 322 aa, Neisseria meningitidis; identical to SEQ ID NO: 25990

SEQ ID NO: 32504 - protein, 626 aa, Neisseria meningitidis; identical to SEQ ID NO: 25738

SEQ ID NO: 32505 - protein, 447 aa, Neisseria meningitidis; identical to SEQ ID NO: 25280

SEQ ID NO: 32506 - protein, 129 aa, Neisseria meningitidis; identical to SEQ ID NO: 2209

SEQ ID NO: 32507 - protein, 102 aa, Neisseria meningitidis; identical to SEQ ID NO: 1826

SEQ ID NO: 32508 - protein, 619 aa, Neisseria meningitidis; identical to SEQ ID NO: 24967

SEQ ID NO: 32509 - protein, 469 aa, Neisseria meningitidis; identical to SEQ ID NO: 19963

SEQ ID NO: 32510 - protein, 506 aa, Neisseria meningitidis
MQLIDYSHSFFSVVPPFLALALAVITRRVLLSLGIGILVGVAFLVGGNPVDGLTHLKDMVVGLAWSDGDWSLGKPKILVFLILLGIFTSLLTYSGSNQAFADWAKRHIKNRRGAKMLTACLVFVTFIDDYFHSLAVGAIARPVTDKFKVSRAKLAYILDSTAAPMCVLMPVSSWGASIIATLAGLLVTYKITEYTPMGTFVAMSLMNYYALFALIMVFVVAWFSFDIGSMARFEQAALNEAHDETAASDATKGRVYALIIPVLALIASTVSAMIYTGAQASETFSILGAFENTDVNTSLVFGGTCGVLAVVLCTLGTIKTADYPKAVWQGAKSMFGAIAILILAWLISTVVGEMHTGDYLSTLVAGNIHPGFLPVILFLLASVMAFATGTSWGTFGIMLPIAAAMAVKVEPALIIPCMSAVMAGAVCGDHCSPISDTTILSSTGARCNHIDHVTSQLPYALTVAAAAASGYLALGLTKSALLGFGTTGIVLAVLIFLLKDKKRANA

SEQ ID NO: 32511 - protein, 405 aa, Neisseria meningitidis; identical to SEQ ID NO: 19889

SEQ ID NO: 32512 - protein, 230 aa, Neisseria meningitidis; identical to SEQ ID NO: 1269

SEQ ID NO: 32513 - protein, 324 aa, Neisseria meningitidis; identical to SEQ ID NO: 23000

SEQ ID NO: 32514 - protein, 172 aa, Neisseria meningitidis; identical to SEQ ID NO: 25299

SEQ ID NO: 32515 - protein, 394 aa, Neisseria meningitidis; identical to SEQ ID NO: 277

SEQ ID NO: 32516 - protein, 257 aa, Neisseria meningitidis; identical to SEQ ID NO: 1404

SEQ ID NO: 32517 - protein, 145 aa, Neisseria meningitidis; identical to SEQ ID NO: 2822

SEQ ID NO: 32518 - protein, 597 aa, Neisseria meningitidis; identical to SEQ ID NO: 8838

SEQ ID NO: 32519 - protein, 366 aa, Neisseria meningitidis; identical to SEQ ID NO: 18457

SEQ ID NO: 32520 - protein, 158 aa, Neisseria meningitidis; identical to SEQ ID NO: 2471

SEQ ID NO: 32521 - protein, 206 aa, Neisseria meningitidis; identical to SEQ ID NO: 12065

SEQ ID NO: 32522 - protein, 162 aa, Neisseria meningitidis; identical to SEQ ID NO: 7842

SEQ ID NO: 32523 - protein, 485 aa, Neisseria meningitidis; identical to SEQ ID NO: 22659

SEQ ID NO: 32524 - protein, 346 aa, Neisseria meningitidis; identical to SEQ ID NO: 19638

SEQ ID NO: 32525 - protein, 231 aa, Neisseria meningitidis; identical to SEQ ID NO: 19590

SEQ ID NO: 32526 - protein, 1069 aa, Neisseria meningitidis; identical to SEQ ID NO: 19118

SEQ ID NO: 32527 - protein, 481 aa, Neisseria meningitidis; identical to SEQ ID NO: 18290

SEQ ID NO: 32528 - protein, 263 aa, Neisseria meningitidis; identical to SEQ ID NO: 14166

SEQ ID NO: 32529 - protein, 122 aa, Neisseria meningitidis; identical to SEQ ID NO: 19227

SEQ ID NO: 32530 - protein, 43 aa, Neisseria meningitidis; identical to SEQ ID NO: 3165

SEQ ID NO: 32531 - protein, 60 aa, Neisseria meningitidis; identical to SEQ ID NO: 4635

SEQ ID NO: 32532 - protein, 335 aa, Neisseria meningitidis
MSTFFRQTAQAMIAKHIDRFPLLKLDQVIDWQPIEHYLNRQKTRYLRDHRGRPAYPLLSMFKAVLLGQWHSLSDPELEHSLITRIDFNLFCRFDELSIPDYSTLCRYRNWLAQDDTLSELLKLINRQLTEKGLKIEKASAAVIDATIIQTAGSKQRQAIEVDEEGQISGQTTPSKDKDARWTKKNGLYRLGYKQHTRTDEEGYIKKLHITPANAHECKHLSPLLEGLPKGTTVYADKGYDSAENRQHLEEHQLLDGIMRKACRNRPLSETQTKRNRYLSKTRYVVEQSFGTLHRKFRYARAAYFGLIKVSAQSHLKAMCLNLLKAANRLSAPAAA

SEQ ID NO: 32533 - protein, 215 aa, Neisseria meningitidis; identical to SEQ ID NO: 1514

SEQ ID NO: 32534 - protein, 273 aa, Neisseria meningitidis; identical to SEQ ID NO: 19705

SEQ ID NO: 32535 - protein, 228 aa, Neisseria meningitidis; identical to SEQ ID NO: 5838

SEQ ID NO: 32536 - protein, 208 aa, Neisseria meningitidis
MRKIRTKICGITTPEDASAAVAAGADAVGLVFFQGSSRAVDIARAKKITAALPPFVSVVALFVNESAQNIRRILAEVPIHIIQFHGDEDDTFCRQFHRPYIKAIRVQTTSDIRNAADRFPDAQALLFDAYHPSEYGGTGHRFDWTLLAEYSGKPWVLAGGLTPENVGEAVRITGAEAVDVSGGVEASKGKKDPAKVAAFIATTNRLSR

SEQ ID NO: 32537 - protein, 193 aa, Neisseria meningitidis; identical to SEQ ID NO: 1600

SEQ ID NO: 32538 - protein, 349 aa, Neisseria meningitidis; identical to SEQ ID NO: 25141

SEQ ID NO: 32539 - protein, 430 aa, Neisseria meningitidis; identical to SEQ ID NO: 25027

SEQ ID NO: 32540 - protein, 469 aa, Neisseria meningitidis
LFEFKENKMIVASRWPLLEKVFLRFGMPVAVVDLESTGGNLYEDRVTEVALVKFEQGRVVRHEWLVNPQKPIPQFVAGLTGISDGMVADAPVFAEIAGELFSVLKGCVLVAHNSRFDYTFLKHEFHRAGIGFSSPALCSVQLSRCLYPQFYKHSLDSIIERLGIVVEDRHRAMADVSALCDYLEYSLSEHGVEAWIRQCFRLMNPKPLPAALPERLREQLYGLPDSMGVLACFDGGGKVNYIGTFERVYSEVSALLDSGKASFDWCNTEAVRFFPALGRLHAYKIKAELVRRYHSGCYVSAKNLLKTFTTVRFEKGSDGMLNAKTTALKNGVTDNPPTGLFANKKAARRALSSWAETYGLCPAAAGILSDGYTEDEPCPVYVSGRCDKACGRSDEQVLAFAHKLPILDWGKMHEVEITETDPLTGEKVVLHGMGGALEMGDGLWYFDKDLPDAFKAKFKTDRKNIKEIG

SEQ ID NO: 32541 - protein, 1043 aa, Neisseria meningitidis; identical to SEQ ID NO: 25676

SEQ ID NO: 32542 - protein, 178 aa, Neisseria meningitidis; identical to SEQ ID NO: 19367

SEQ ID NO: 32543 - protein, 384 aa, Neisseria meningitidis; identical to SEQ ID NO: 9078

SEQ ID NO: 32544 - protein, 265 aa, Neisseria meningitidis; identical to SEQ ID NO: 25386

SEQ ID NO: 32545 - protein, 332 aa, Neisseria meningitidis; identical to SEQ ID NO: 18743

SEQ ID NO: 32546 - protein, 121 aa, Neisseria meningitidis
MNLIQQLEQEEIVRLNKEIPEFAPGDTVVVSVRVVEGTRSRLQAYEGVVIARRNRGLNSNFIVRKISSGEGVERTFQLYSPTVEKIEVKRRGDVRRAKLYYLRGLTGKAARIKEKLPARKG

SEQ ID NO: 32547 - protein, 92 aa, Neisseria meningitidis; identical to SEQ ID NO: 600

SEQ ID NO: 32548 - protein, 417 aa, Neisseria meningitidis; identical to SEQ ID NO: 4662

SEQ ID NO: 32549 - protein, 87 aa, Neisseria meningitidis; identical to SEQ ID NO: 11737

SEQ ID NO: 32550 - protein, 256 aa, Neisseria meningitidis; identical to SEQ ID NO: 19257

SEQ ID NO: 32551 - protein, 40 aa, Neisseria meningitidis; identical to SEQ ID NO: 1884

SEQ ID NO: 32552 - protein, 219 aa, Neisseria meningitidis; identical to SEQ ID NO: 24984

SEQ ID NO: 32553 - protein, 355 aa, Neisseria meningitidis; identical to SEQ ID NO: 19325

SEQ ID NO: 32554 - protein, 289 aa, Neisseria meningitidis; identical to SEQ ID NO: 25451

SEQ ID NO: 32555 - protein, 288 aa, Neisseria meningitidis
MKAKILTSVALLACSGSLFAQTLATVNGQKIDSSVIDAQVAAFRAENSRAEDTPQLRQSLLENEVVNTVVAQEVKRLKLDRSAEFKNALAKLRAEAKKSGDDKKPSFKTVWQAVKYGLNGEAYALHIAKTQPVSEQEIKAAYDNISGFYKGTQEVQLGEILTDKEENAKKAVADLKAKKGFDAVLKQYSLNDRTKQTGAPVGYVPLKDLEQGVPPLYQAIKDLKKGEFTATPLKNGDFYGVYYVNDSREVKVPSFDEMKGQIAGNLQAERIDRAVGALLGKANIKPAK

SEQ ID NO: 32556 - protein, 642 aa, Neisseria meningitidis; identical to SEQ ID NO: 2342

SEQ ID NO: 32557 - protein, 273 aa, Neisseria meningitidis; identical to SEQ ID NO: 24475

SEQ ID NO: 32558 - protein, 434 aa, Neisseria meningitidis; identical to SEQ ID NO: 2219

SEQ ID NO: 32559 - protein, 127 aa, Neisseria meningitidis; identical to SEQ ID NO: 2146

SEQ ID NO: 32560 - protein, 244 aa, Neisseria meningitidis; identical to SEQ ID NO: 7175

SEQ ID NO: 32561 - protein, 128 aa, Neisseria meningitidis; identical to SEQ ID NO: 19630

SEQ ID NO: 32562 - protein, 168 aa, Neisseria meningitidis
MDFFNFFEQGYFKKLAVENGLNTEYFIFQFTVCNLFSIFVIILMNFIKNYAVLIVLIVIVSILSGLILKNKTMSLIKNKEKFLCGLFPLDVPIFKYTMPSYFKLINKNMRWLFHMNVFCLFFICFSIYLINKGENQYIAYFSCYFFGLTYPLINYLILLHREYKRIQF

SEQ ID NO: 32563 - protein, 206 aa, Neisseria meningitidis; identical to SEQ ID NO: 1725

SEQ ID NO: 32564 - protein, 197 aa, Neisseria meningitidis; identical to SEQ ID NO: 2603

SEQ ID NO: 32565 - protein, 261 aa, Neisseria meningitidis; identical to SEQ ID NO: 25633

SEQ ID NO: 32566 - protein, 716 aa, Neisseria meningitidis; identical to SEQ ID NO: 25817

SEQ ID NO: 32567 - protein, 150 aa, Neisseria meningitidis; identical to SEQ ID NO: 18173

SEQ ID NO: 32568 - protein, 595 aa, Neisseria meningitidis; identical to SEQ ID NO: 18209

SEQ ID NO: 32569 - protein, 160 aa, Neisseria meningitidis; identical to SEQ ID NO: 4185

SEQ ID NO: 32570 - protein, 134 aa, Neisseria meningitidis; identical to SEQ ID NO: 6040

SEQ ID NO: 32571 - protein, 365 aa, Neisseria meningitidis; identical to SEQ ID NO: 11

SEQ ID NO: 32572 - protein, 69 aa, Neisseria meningitidis; identical to SEQ ID NO: 3057

SEQ ID NO: 32573 - protein, 431 aa, Neisseria meningitidis; identical to SEQ ID NO: 25075

SEQ ID NO: 32574 - protein, 641 aa, Neisseria meningitidis
VTVGYGFSAGGDYSQSKIRADHASVTEQSGIYAGEDGYQINVQNHTDLKGGLITSTQKSEDDGKNTFSTGTLTFEDLANHAEYKGEAIGLGVSGSVAGDNPNQNSRIYTVNQSGMSSTMGYGKDSDKQYATTHSGINTANITIRDNEKQQQITGISAEEAKRAVKADVTTDNYAEHSGSLKNNFDKDKVQSEIDLQVKVTQEFDSNRKALRAEINKAADEKRQKAEDIRRENYIDGKNGYNTAESLALDKSADKLEKVAFYTDLALGGLYGIGDSTALTYVTGSAVANPAIRAGTRPRQFWFEKCDGDSLYCSNRNYDDTADRKIYDKNGQEIDTKDPNYTGMVEIGDKRQISDLNEIEPNKVTGSIVTTNDGILNPRNDALKNGIKQQKWEVDKEGILLIYNPPTGNSISELLYAAYDKTNDLLGGRLPLASAQKANLELNQYAESKGYKIDSNNHSRGGLTRSVSDKYSVRHNLPLPYNNVQFFGSAANVDDYTNYMNEYGRKDFNISATTHYTDFVGRTPLVALRSKHIVGGNEPTGGVEDKWFLYSHSSYFAEKPTPYLVNEHGFYMDKNGDLIKDNSGNPIKMTEENKLEYSTKVPNPYLDDFEQKWIKGQTHNKVSGDNPSLPVPVRTKKQQGER

SEQ ID NO: 32575 - protein, 252 aa, Neisseria meningitidis; identical to SEQ ID NO: 25755

SEQ ID NO: 32576 - protein, 261 aa, Neisseria meningitidis; identical to SEQ ID NO: 19636

SEQ ID NO: 32577 - protein, 121 aa, Neisseria meningitidis; identical to SEQ ID NO: 1865

SEQ ID NO: 32578 - protein, 644 aa, Neisseria meningitidis
MSLIECKNINRYFGSGENRVHILKDISLSIEKGDFVAIIGQSGSGKSTLMNILGCLDTAGSGSYRIDGIETAKMQPDELAALRRERFGFIFQRYNLLSSLTARDNVALPAVYMGAGGKERSARAEKLLQDLGLASKEGNKPGELSGGQQQRVSIARALMNGGEIIFADEPTGALDTASGKNVMEIIHKLHEAGHTVIMVTHDPGIAANANRVIEIRDGEIISDTSKNPEIPASNVGRIQEKASWSFYYDQFVEAFRMSVQAVLAHKMRSLLTMLGIIIGIASVVSVVALGNGSQKKILEDISSIGTNTISIFPGRGFGDRRSGRIKTLTIDDAKIIAKQSYVASATPMTSSGGTLTYRNTDLTASLYGVGEQYFDVRGLKLETGRLFDENDVKEDAQVVVIDQNVKDKLFADSDPLGKTILFRKRPLTVIGVMKKDENAFGNSDVLMLWSPYTTVMHQITGESHTNSITVKIKDNANTQVAEKGLTDLLKARHGTEDFFMNNSDSIRQIVESTTGTMKLLISSIALISLVVGGIGVMNIMLVSVTERTKEIGIRMAIGARRGNILQQFLIEAVLICVIGGLVGVGLSAAVSLVFNHFVTDFPMDISAMSVIGAVACSTGIGIAFGFMPANKAAKLNPIDALAQD

SEQ ID NO: 32579 - protein, 244 aa, Neisseria meningitidis; identical to SEQ ID NO: 19407

SEQ ID NO: 32580 - protein, 119 aa, Neisseria meningitidis; identical to SEQ ID NO: 6320

SEQ ID NO: 32581 - protein, 417 aa, Neisseria meningitidis
MRKPRITHLDVWANDERIGTLEKGAMYRFTYDNPGSPLLGLHYQDRGKVYISNNMPHIFAQYFPEGFLDAHITSKYAFHDAPFEDNEMLRLAILGRETLGRIHVRCNDPLFNEWIDGLEMKNPRILTERDLLGINARQVFQQYMAEIFHHGRFVSVSGIQQKMSLDAISRNTKQTASYIAKGFDASEYPCLAANEFLCMQTIKQAGIPVAQTSLSEDSSVLLVRRFDVSEQEYFLGMEDFTSLRQYSAEDKYKGSYAAIAQIIRQISGRPDEDLIHFFNQLAASCILKNGDAHLKNFSVLYHDEYDVRLAPTYDVLDTSIYRVGTQGIFDAYDDTLALNLTNHGKKTYPSKNTLLDFAEKYCDLGREDASFMIDTIVQAKEQVLVKYSDVLRENEWLAQKWHFIPDENEEGLPFTFR

SEQ ID NO: 32582 - protein, 172 aa, Neisseria meningitidis; identical to SEQ ID NO: 601

SEQ ID NO: 32583 - protein, 415 aa, Neisseria meningitidis; identical to SEQ ID NO: 19640

SEQ ID NO: 32584 - protein, 317 aa, Neisseria meningitidis; identical to SEQ ID NO: 4876

SEQ ID NO: 32585 - protein, 95 aa, Neisseria meningitidis; identical to SEQ ID NO: 738

SEQ ID NO: 32586 - protein, 285 aa, Neisseria meningitidis; identical to SEQ ID NO: 18795

SEQ ID NO: 32587 - protein, 307 aa, Neisseria meningitidis; identical to SEQ ID NO: 19720

SEQ ID NO: 32588 - protein, 281 aa, Neisseria meningitidis; identical to SEQ ID NO: 19438

SEQ ID NO: 32589 - protein, 206 aa, Neisseria meningitidis; identical to SEQ ID NO: 18030

SEQ ID NO: 32590 - protein, 206 aa, Neisseria meningitidis; identical to SEQ ID NO: 4459

SEQ ID NO: 32591 - protein, 457 aa, Neisseria meningitidis; identical to SEQ ID NO: 2036

SEQ ID NO: 32592 - protein, 333 aa, Neisseria meningitidis; identical to SEQ ID NO: 19210

SEQ ID NO: 32593 - protein, 737 aa, Neisseria meningitidis; identical to SEQ ID NO: 18766

SEQ ID NO: 32594 - protein, 300 aa, Neisseria meningitidis; identical to SEQ ID NO: 25760

SEQ ID NO: 32595 - protein, 196 aa, Neisseria meningitidis
MLLFIDNYDSFTYNIVQYFAELGQEVAVRRNDDITLEEIEALNPQYLVIGPGPCSPKEAGISVAAMRHFAGRLPIMGVCLGHQTIGEAFGGRIVRAKTLMHGKVSPVSHSGKGMFKGLPNPVTCTRYHSLVIERGTLPECLEITAWTEDGEIMGVRHKEYAVEGVQFHPEALLTEHGHDMLNNFLIEFQNFKPQKI

SEQ ID NO: 32596 - protein, 64 aa, Neisseria meningitidis; identical to SEQ ID NO: 24869

SEQ ID NO: 32597 - protein, 287 aa, Neisseria meningitidis; identical to SEQ ID NO: 26348

SEQ ID NO: 32598 - protein, 207 aa, Neisseria meningitidis; identical to SEQ ID NO: 24453

SEQ ID NO: 32599 - protein, 336 aa, Neisseria meningitidis; identical to SEQ ID NO: 1943

SEQ ID NO: 32600 - protein, 344 aa, Neisseria meningitidis; identical to SEQ ID NO: 19264

SEQ ID NO: 32601 - protein, 160 aa, Neisseria meningitidis; identical to SEQ ID NO: 2526

SEQ ID NO: 32602 - protein, 329 aa, Neisseria meningitidis; identical to SEQ ID NO: 247

SEQ ID NO: 32603 - protein, 85 aa, Neisseria meningitidis; identical to SEQ ID NO: 19866

SEQ ID NO: 32604 - protein, 296 aa, Neisseria meningitidis; identical to SEQ ID NO: 25108

SEQ ID NO: 32605 - protein, 658 aa, Neisseria meningitidis
MNEFSLAPIVVVLLVSVITVILCRKFNIPSMLGYLLVGFLAGPGMLSLIPKSHATDYLGEIGIVFLMFSIGLEFSLPKLRAMRRLVFGLGGLQVGVTMLSVMGILMLTGVPFNWAFAVSGALAMSSTAIVSRILSEKTELGQPHGQMAMGVLLMQDIAVVPLMILIPALAGGGDGNIWAALGLAFAKMLLTLGLLFFVGSKIMSRWFRMVAKRKSSELFMINVLLVTLGVAYLTELEGLSMALGAFVAGMLLSETEYRFQVEDDIRPFRDILLGFFFITVGMKLDIQALIGGWRQVLMLLVMLLVLKALVVFAIAFKMKHSVGDSLKTALYLAQGGEFGFVMLAIAGQLDMVSPEWEQAATAAVLLSMIIAPFLLGGSDALVGRLVKSSWDMKSLDLHSMLVETMSKSDHVLIVGFGRGGQTVGRVLAQEDIPYFALDLDIARVQVARSAGEPVSFGDAKRREVLEAAGLGRAKMVVLTLNNMHETQHVLDNVLSMYPNMPVYVRATNDDYVKTFTDIGAEEAVSDTKETGLVLAGYAMLGNGASYRHVYQTMANIRHSRYAALEGLFVGSDDEAGFGENGETVRHAFPLAAEAYAVGKTVGTLPMAAYGIKLLFVRRRTGRIENPDASFTLEGGDVLVVAGKKEEIISFENWSLQGI

SEQ ID NO: 32606 - protein, 989 aa, Neisseria meningitidis; identical to SEQ ID NO: 19335

SEQ ID NO: 32607 - protein, 354 aa, Neisseria meningitidis; identical to SEQ ID NO: 25837

SEQ ID NO: 32608 - protein, 144 aa, Neisseria meningitidis; identical to SEQ ID NO: 3188

SEQ ID NO: 32609 - protein, 397 aa, Neisseria meningitidis; identical to SEQ ID NO: 25291

SEQ ID NO: 32610 - protein, 236 aa, Neisseria meningitidis; identical to SEQ ID NO: 25351

SEQ ID NO: 32611 - protein, 376 aa, Neisseria meningitidis; identical to SEQ ID NO: 23439

SEQ ID NO: 32612 - protein, 106 aa, Neisseria meningitidis; identical to SEQ ID NO: 3331

SEQ ID NO: 32613 - protein, 366 aa, Neisseria meningitidis; identical to SEQ ID NO: 25346

SEQ ID NO: 32614 - protein, 78 aa, Neisseria meningitidis; identical to SEQ ID NO: 1246

SEQ ID NO: 32615 - protein, 102 aa, Neisseria meningitidis; identical to SEQ ID NO: 16090

SEQ ID NO: 32616 - protein, 238 aa, Neisseria meningitidis; identical to SEQ ID NO: 24875

SEQ ID NO: 32617 - protein, 208 aa, Neisseria meningitidis; identical to SEQ ID NO: 2285

SEQ ID NO: 32618 - protein, 271 aa, Neisseria meningitidis; identical to SEQ ID NO: 23470

SEQ ID NO: 32619 - protein, 163 aa, Neisseria meningitidis; identical to SEQ ID NO: 6300

SEQ ID NO: 32620 - protein, 701 aa, Neisseria meningitidis; identical to SEQ ID NO: 1407

SEQ ID NO: 32621 - protein, 160 aa, Neisseria meningitidis; identical to SEQ ID NO: 1377

SEQ ID NO: 32622 - protein, 150 aa, Neisseria meningitidis; identical to SEQ ID NO: 3757

SEQ ID NO: 32623 - protein, 416 aa, Neisseria meningitidis
MTKLTRRQIIRRTAGTLFALSPIASAVAKTVRVPQFTAARIWPSHTYTRLTLESTAALKYQHFALDNPGRLVVDIQNANINTVLHGLSQKVMADDPFIRSIRAGQNTPDTVRLVIDLKQPSYAQVFSLPPVGGFKNRLVVDLYPQGMDPDDPMMALLNGSLNKTRRGSPEADLAQNTPAQTERGKNGRRPVIMIDPGHGGEDPGAVSPGGLQEKHVVLSIARETKKQLEALGYNVFMTRNEDVFIPLGVRVAKGRARRADVFVSIHADAFTSPSARGTGVYMLNTKGATSSAAKFLEQTQNNADAVGGVPTSGNRNVDTALLDMTQTATLRDSRKLGKLVLEELGRLNHLHKGRVDEANFAVLRAPDMPSILVETAFLSNPAEEKLLGSESFRRQCAQSIASGVQRYLNTSVLKRG

SEQ ID NO: 32624 - protein, 315 aa, Neisseria meningitidis; identical to SEQ ID NO: 5319

SEQ ID NO: 32625 - protein, 371 aa, Neisseria meningitidis; identical to SEQ ID NO: 19086

SEQ ID NO: 32626 - protein, 581 aa, Neisseria meningitidis; identical to SEQ ID NO: 24246

SEQ ID NO: 32627 - protein, 266 aa, Neisseria meningitidis; identical to SEQ ID NO: 8298

SEQ ID NO: 32628 - protein, 181 aa, Neisseria meningitidis; identical to SEQ ID NO: 18427

SEQ ID NO: 32629 - protein, 671 aa, Neisseria meningitidis; identical to SEQ ID NO: 25421

SEQ ID NO: 32630 - protein, 1491 aa, Neisseria meningitidis; identical to SEQ ID NO: 19610

SEQ ID NO: 32631 - protein, 167 aa, Neisseria meningitidis; identical to SEQ ID NO: 18369

SEQ ID NO: 32632 - protein, 216 aa, Neisseria meningitidis; identical to SEQ ID NO: 13452

SEQ ID NO: 32633 - protein, 794 aa, Neisseria meningitidis; identical to SEQ ID NO: 19836

SEQ ID NO: 32634 - protein, 447 aa, Neisseria meningitidis; identical to SEQ ID NO: 19427

SEQ ID NO: 32635 - protein, 144 aa, Neisseria meningitidis; identical to SEQ ID NO: 4312

SEQ ID NO: 32636 - protein, 205 aa, Neisseria meningitidis; identical to SEQ ID NO: 18580

SEQ ID NO: 32637 - protein, 48 aa, Neisseria meningitidis
MKTLFFDCSIIHKREKTITCPVYQNLPCRMKGITGRDGVNTIWGYGFS

SEQ ID NO: 32638 - protein, 418 aa, Neisseria meningitidis; identical to SEQ ID NO: 18114

SEQ ID NO: 32639 - protein, 317 aa, Neisseria meningitidis; identical to SEQ ID NO: 11285

SEQ ID NO: 32640 - protein, 358 aa, Neisseria meningitidis; identical to SEQ ID NO: 24171

SEQ ID NO: 32641 - protein, 78 aa, Neisseria meningitidis; identical to SEQ ID NO: 3909

SEQ ID NO: 32642 - protein, 157 aa, Neisseria meningitidis; identical to SEQ ID NO: 24436

SEQ ID NO: 32643 - protein, 218 aa, Neisseria meningitidis; identical to SEQ ID NO: 19343

SEQ ID NO: 32644 - protein, 119 aa, Neisseria meningitidis; identical to SEQ ID NO: 2176

SEQ ID NO: 32645 - protein, 129 aa, Neisseria meningitidis
MPKPYPARYRANPNRKGKIMSSELIIHTSDAAFEKDVLNSDTPVLLDFWAPWCGPCKMIAPILDDIAAEFEGRLKVVKINIDDNEATPSRFGVRGIPTLMVFKNGEVVATKVGALAKGQLTAFVEASIA

SEQ ID NO: 32646 - protein, 469 aa, Neisseria meningitidis; identical to SEQ ID NO: 9639

SEQ ID NO: 32647 - protein, 210 aa, Neisseria meningitidis; identical to SEQ ID NO: 14345

SEQ ID NO: 32648 - protein, 169 aa, Neisseria meningitidis; identical to SEQ ID NO: 18610

SEQ ID NO: 32649 - protein, 153 aa, Neisseria meningitidis; identical to SEQ ID NO: 750

SEQ ID NO: 32650 - protein, 180 aa, Neisseria meningitidis; identical to SEQ ID NO: 5949

SEQ ID NO: 32651 - protein, 488 aa, Neisseria meningitidis; identical to SEQ ID NO: 24184

SEQ ID NO: 32652 - protein, 71 aa, Neisseria meningitidis; identical to SEQ ID NO: 2650

SEQ ID NO: 32653 - protein, 327 aa, Neisseria meningitidis
VLLTLHGTDKFCIVNNFHTNRNTAYKALKDTCNNLFERQFSFIEKTPKGEKVVRTRWVSQVAYIEQQATVELVFAPNVAPLITMLEKNFTSYELDQVSSLSSKYAVRLYEIIISWRAAGKTPMFSTMELRERLGMMPDEYQKMELFKRKVLDFAVKQINDKTDISITYEQHKEGRKIVGFTFSILHKIGSKDIPLENQSELFAGMTDLEAGTIRVRAEAYIASLIAKGQNVTKAHRLNILKKAVEERWGFEDVAKDNGAKNPENKNAKVVLNEWEKISNGTRFKDKDGTIWVKDSGMLRTEGTNRWIADSQIAKLFPMLTVMVEEGI

SEQ ID NO: 32654 - protein, 92 aa, Neisseria meningitidis; identical to SEQ ID NO: 419

SEQ ID NO: 32655 - protein, 408 aa, Neisseria meningitidis; identical to SEQ ID NO: 2386

SEQ ID NO: 32656 - protein, 367 aa, Neisseria meningitidis; identical to SEQ ID NO: 6599

SEQ ID NO: 32657 - protein, 626 aa, Neisseria meningitidis; identical to SEQ ID NO: 25429

SEQ ID NO: 32658 - protein, 325 aa, Neisseria meningitidis; identical to SEQ ID NO: 19566

SEQ ID NO: 32659 - protein, 77 aa, Neisseria meningitidis; identical to SEQ ID NO: 19615

SEQ ID NO: 32660 - protein, 328 aa, Neisseria meningitidis; identical to SEQ ID NO: 991

SEQ ID NO: 32661 - protein, 363 aa, Neisseria meningitidis; identical to SEQ ID NO: 19294

SEQ ID NO: 32662 - protein, 394 aa, Neisseria meningitidis; identical to SEQ ID NO: 18778

SEQ ID NO: 32663 - protein, 94 aa, Neisseria meningitidis; identical to SEQ ID NO: 11561

SEQ ID NO: 32664 - protein, 185 aa, Neisseria meningitidis; identical to SEQ ID NO: 19919

SEQ ID NO: 32665 - protein, 316 aa, Neisseria meningitidis; identical to SEQ ID NO: 5301

SEQ ID NO: 32666 - protein, 352 aa, Neisseria meningitidis; identical to SEQ ID NO: 6199

SEQ ID NO: 32667 - protein, 320 aa, Neisseria meningitidis; identical to SEQ ID NO: 18996

SEQ ID NO: 32668 - protein, 537 aa, Neisseria meningitidis; identical to SEQ ID NO: 32391

SEQ ID NO: 32669 - protein, 141 aa, Neisseria meningitidis; identical to SEQ ID NO: 6006

SEQ ID NO: 32670 - protein, 254 aa, Neisseria meningitidis
MPTEDIEEIFMSANVSRLVVQNLQKSFKKRQVVKSFSLEIESGEVIGLLGPNGAGKTTSFYMIVGLIAADAGSVMLDGQELRHLPIHERARLGVGYLPQEASIFRKMTVEQNIRAILEIRTKDKNQIDREIEKLLADLNIGHLRRSPAPSLSGGERRRVEIARVLAMKPHFILLDEPFAGVDPIAVIDIQKIIGFLKSRGIGVLITDHNVRETLSICDRAYIISDGAVLASGKPDDLVGNEQVRSVYLGKNFKY

SEQ ID NO: 32671 - protein, 194 aa, Neisseria meningitidis; identical to SEQ ID NO: 6623

SEQ ID NO: 32672 - protein, 559 aa, Neisseria meningitidis; identical to SEQ ID NO: 25719

SEQ ID NO: 32673 - protein, 138 aa, Neisseria meningitidis; identical to SEQ ID NO: 937

SEQ ID NO: 32674 - protein, 117 aa, Neisseria meningitidis; identical to SEQ ID NO: 1331

SEQ ID NO: 32675 - protein, 291 aa, Neisseria meningitidis; identical to SEQ ID NO: 24754

SEQ ID NO: 32676 - protein, 409 aa, Neisseria meningitidis; identical to SEQ ID NO: 2282

SEQ ID NO: 32677 - protein, 725 aa, Neisseria meningitidis; identical to SEQ ID NO: 18113

SEQ ID NO: 32678 - protein, 487 aa, Neisseria meningitidis; identical to SEQ ID NO: 9402

SEQ ID NO: 32679 - protein, 180 aa, Neisseria meningitidis
VQSWKARRDFNIVKQDLDFSCGAASVATLLNNFYGQTLTEEEVLKKLDKEQMRASFEDMRRIMPDLGFEAKGYALSFEQLAQLKIPVIVYLKYRKDDHFSVLRGIDGNTVLLADPSLGHVSMSRAQFLDAWQTREGNLAGKILAVVPKKAETISNKLFFTHHPKRQTEFAVGQIRQARAE

SEQ ID NO: 32680 - protein, 558 aa, Neisseria meningitidis; identical to SEQ ID NO: 24634

SEQ ID NO: 32681 - protein, 115 aa, Neisseria meningitidis; identical to SEQ ID NO: 2034

SEQ ID NO: 32682 - protein, 269 aa, Neisseria meningitidis; identical to SEQ ID NO: 18121

SEQ ID NO: 32683 - protein, 155 aa, Neisseria meningitidis; identical to SEQ ID NO: 18444

SEQ ID NO: 32684 - protein, 204 aa, Neisseria meningitidis; identical to SEQ ID NO: 504

SEQ ID NO: 32685 - protein, 1101 aa, Neisseria meningitidis
MNEGEVVLTPEQIQTLYGYASRGDTYGGWRYLANLGDRYADNAAAIVGKDANLNGLNLWMKKGVENLWDDTVGKKTRLEKFDRVALQHFSQYVDLINENNGRLPNTSEIERSYYKAVTYHGVSSSAAIDLVINRSLPDMADGYWALGLGIEAERIHNEQAVNNPNGSESDNRKQLISALDKGFDGSFKEKHFTFLQSVIMDVTKLGVEYTIDGWQKIGGWGNGIINDLYKSVAKREWTGIFEIVNNNIKQFRDLFPNPEGWIDDGHQCFAPWVKETKKRNGKYHVYDPLALDLDGDGIETVAAKGFSGSLFDHNGNGIRTATGWVSADDGLLVRDLNGNGIIDNGAELFGDNTKLADGSFAKHGYAALAELDSNGDNIINAADAAFQSLRVWQDLNQDGISQTNELRTLEELGIQSLDLAYKDVNKNLGNGNTLAQQGSYTKTNGTTAKMGDLLLAADNLHSRFKDKVELTAEQAKAANLAGIGRLRDLREAAALSGDLANMLKAYSAAETKEAQLALLDNLIHKWAETDSNWGKKSPMRLSTDWTQTANEGIALTPSQVAQLKKNALVSLSDKAKATIDAARDRIAVLDAYTGQDSNTLYYMSEEDALNIVKVTNDTYDHLAKNIYQNLLFQTRLQPYLNQISFKMENDTFTLDFSGLVQAFNHVKETNPQKAFVDLAEMLAYGELRSWYEGRRLMADYVEEAKKAGKFEDYQKVLGQETVALLAKTSGTQADDILQNVGFGHNKNVSLYGNDGNDTLIGGAGNDYLEGGSGSDTYVFGKGFGQDTVYNYDYATGRKDIIRFTDGITADMLTFTREGNHLLIKAKDGSGQVTVQSYFNDGSGAYRIDEIHFDNGKVLDVATVKKLVQQSTDGSDRLYAYQSGSTLNGGLGDDYLYGADGNDLLNGDAGNDSIYSGNGNDTLNGGEGNDALYGYNGNDALNGGEGNDHLNGEDGNDTLIGGAGNDYLEGGSGSDTYVFGEGFGQDTVYNYHVDKNSDTMHFKGFKAADVHFIRSGSDLVLSASEQDNVRISGFFYGENHRVDTFVFDDAAISNPDFAKYINAGNNLVQSMSVFGSNTAATGGNVDANIQSVQQPLLVTPSA

SEQ ID NO: 32686 - protein, 255 aa, Neisseria meningitidis; identical to SEQ ID NO: 24883

SEQ ID NO: 32687 - protein, 235 aa, Neisseria meningitidis
MEKMSFEIYRYNPDVDAKPYMQRYELELEPTDVKLLDALVRLKAQDDTLSFRRSCREGICGSDGMNINGKNGLACLTDLRGLKQPVKIRPLPGLPVIRDLIVDMTQFFKQYHSVKPYVVNDNPIDADKERLQTQEERKELDGLYECILCACCSTACPSFWWNPDKFVGPSGLLNAYRFIADSRDTITNERLDDLNDPYRLFRCHTIMNCVDVCPKHLNPTRAIGKIKEIMLKRAV

SEQ ID NO: 32688 - protein, 449 aa, Neisseria meningitidis; identical to SEQ ID NO: 481

SEQ ID NO: 32689 - protein, 407 aa, Neisseria meningitidis; identical to SEQ ID NO: 19083

SEQ ID NO: 32690 - protein, 98 aa, Neisseria meningitidis; identical to SEQ ID NO: 10634

SEQ ID NO: 32691 - protein, 105 aa, Neisseria meningitidis; identical to SEQ ID NO: 10058

SEQ ID NO: 32692 - protein, 332 aa, Neisseria meningitidis; identical to SEQ ID NO: 24463

SEQ ID NO: 32693 - protein, 81 aa, Neisseria meningitidis; identical to SEQ ID NO: 2079

SEQ ID NO: 32694 - protein, 786 aa, Neisseria meningitidis
MLPIAALVGSIFGNPVLAADEAATETTPVKAEIKAVRVKGQRNAPAAVERVNLNRIKQEMIRDNKDLVRYSTDVGLSDSGRHQKGFAVRGVEGNRVGVSIDGVNLPDSEENSLYARYGNFNSSRLSIDPELVRNIEIVKGADSFNTGSGALGGGVNYQTLQGRDLLLDDRQFGVMMKNGYSTRNREWTNTLGFGVSNDRVDAALLYSQRRGHETESAGNRGYAVEGEGSGANIRGSARGIPDSSKHKYHSFLGKIAYQINDNHRIGASLNGQQGHNYTVEESYNLTASSWREADDVNRRRNANLFYEWMPDSNWLSSLKADFDYQKTKVAAVNNKGSFPMDYSTWTRNYNQKDLDEIYNRSMDTRFKRFTLRLDSHPLQLGGGRHRLSFKTFVSRRDFENLNRDDYYFSGRVVRTTSSIQHPVKTTNYGFSLSDQIQWNDVFSSRAGIRYDHTKMTPQELNAECHACDKTPPAANTYKGWSGFVGLAAQLNQAWHVGYDITSGYRVPNASEVYFTYNHGSGNWLPNPNLKAERSTTHTLSLQGRSEKGMLDANLYQSNYRNFLSEEQKLTTSGTPGCTEENAYYGICSDPYKEKLDWQMKNIDKARIRGIELTGRLNVDKVASFVPEGWKLFGSLGYAKSKLSGDNSLLSTQPLKVIAGIDYESPSEKWGVFSRLTYLGAKKAKDAQYTVYENKGWGTPLQKKVKDYPWLNKSAYVFDMYGFYKPAKNLTLRAGVYNVFNRKYTTWDSLRGLYSYSTTNSVDRDGKGLDRYRAPSRNYAVSLEWKF

SEQ ID NO: 32695 - protein, 370 aa, Neisseria meningitidis
MSTFFQQTAQAMIAKHIDRFPLLKLDQVIDWQPIEQYLNRQRTRYLRDHRGRPAYPLLSMFKAVLLGQWHSLSDPELEHSLITRIDFNLFCRFDELSIPDYSTLCRYRNWLAQDNTLSELLELINRQLTEKGLKVEKASAAVIDATIIQTAGSKQRQAIEVDEEGQVSGQTTLSKDKNARWTKKNGLYKLGYKQHTRTDAEGYIEKLHITPANAHECKHLSPLLEGLPKGTTVYADKGYDSAENRQHLEEHQLQDGIMRKACRNRPLTETQTKRNRYLSKTRYSGLNLNQDKATKPQTVQIVRQGEATPYWFKFNPLYVVEQSFGTLHRKFRYARAAYFGLLKVSAQSHLKAMCLNLLKAANKLSAPAAA

SEQ ID NO: 32696 - protein, 100 aa, Neisseria meningitidis; identical to SEQ ID NO: 1890

SEQ ID NO: 32697 - protein, 143 aa, Neisseria meningitidis; identical to SEQ ID NO: 26178

SEQ ID NO: 32698 - protein, 171 aa, Neisseria meningitidis; identical to SEQ ID NO: 19365

SEQ ID NO: 32699 - protein, 59 aa, Neisseria meningitidis; identical to SEQ ID NO: 7121

SEQ ID NO: 32700 - protein, 233 aa, Neisseria meningitidis; identical to SEQ ID NO: 18301

SEQ ID NO: 32701 - protein, 156 aa, Neisseria meningitidis; identical to SEQ ID NO: 7655

SEQ ID NO: 32702 - protein, 95 aa, Neisseria meningitidis; identical to SEQ ID NO: 589

SEQ ID NO: 32703 - protein, 216 aa, Neisseria meningitidis; identical to SEQ ID NO: 7775

SEQ ID NO: 32704 - protein, 337 aa, Neisseria meningitidis; identical to SEQ ID NO: 24761

SEQ ID NO: 32705 - protein, 98 aa, Neisseria meningitidis; identical to SEQ ID NO: 1735

SEQ ID NO: 32706 - protein, 163 aa, Neisseria meningitidis; identical to SEQ ID NO: 26039

SEQ ID NO: 32707 - protein, 269 aa, Neisseria meningitidis; identical to SEQ ID NO: 1709

SEQ ID NO: 32708 - protein, 240 aa, Neisseria meningitidis; identical to SEQ ID NO: 18055

SEQ ID NO: 32709 - protein, 267 aa, Neisseria meningitidis; identical to SEQ ID NO: 2269

SEQ ID NO: 32710 - protein, 542 aa, Neisseria meningitidis
MISTNGITMQFGAKPLFENVSVKFGEGSRYGLIGANGSGKSTFMKILGGDLEQTAGEVAIENGVRLGKLRQDQFAYEDMRVLDVVMMGHTEMWAAMTERDAIYANPEATEDDYMKAAELEAKFAEYDGYTAEARAAELLSGVGISEDLHNAKMAEVAPGFKLRVLLAQALFSKPDVLLLDEPTNNLDINTIRWLEGVLNQYDSTMIIISHDRHFLNEVCTHMADLDYNTITIYPGNYDDYMLASAQSRERALKDNAKAKEKLQELQEFVARFSANKSKARQATSRLKQADKIKSEMVEVKPSTRQNPYIRFEADEKAKLHRQAVEVEKLAKRFETQLFKNLNFILEAGQRLAIIGPNGAGKSTLLKLLAGAYNPEYSDGLLPDEGSIKWAEKASVGYYPQDHENDFDVDMDLSEWMRQWGQEGDDEQVIRGTLGRLLFGSNDVVKKVKVLSGGEKGRMLYGKLLLLKPNVLVMDEPTNHMDMESIESLNMALEKYNGTLIFVSHDRQFVSSLATQIIELDGKGGYEHYLGDYESYLEKKGVA

SEQ ID NO: 32711 - protein, 291 aa, Neisseria meningitidis; identical to SEQ ID NO: 18768

SEQ ID NO: 32712 - protein, 513 aa, Neisseria meningitidis
MKIGIPRESLSGETRVACTPATVALLGKLGFETVVESGAGLAASLDDAAYQTAGATVADKAAVWACPLIYKVNAPSEGELPLLNEGQTIVSFLWPRQNEALVEALRAKKVNALAMDMVPRISRAQALDALSSMANISGYRAVIEAANAFGRFFTGQITAAGKVPPAQVLVIGAGVAGLAAIGTANSLGAVVRAFDTRLEVAEQIESMGGKFLKLDFPQESGGSGDGYAKVMSDEFIAAEMKLFAEQAKEVDIIITTAAIPGKPAPKLITKEMVESMKSGSVIVDLAAATGGNCELTRPGELSVTGNGVKIIGYTDMANRLAGQSSQLYATNLVNLTKLLSPNKDGEITLDFEDVIIRNMTVTHDGEITFPPPPIQVSAQPQQTPSEKAAPAAKPEPKPVSLWKKLAPAVIAAVLVLWVGAVAPAAFLNHFIVFVLACVIGYYVVWNVSHSLHTPLMSVTNAISGIIVVGALLQISQGNGFVTLLAFIAILIASINIFGGFFVTRRMLNMFKKG

SEQ ID NO: 32713 - protein, 132 aa, Neisseria meningitidis; identical to SEQ ID NO: 25534

SEQ ID NO: 32714 - protein, 71 aa, Neisseria meningitidis; identical to SEQ ID NO: 3926

SEQ ID NO: 32715 - protein, 503 aa, Neisseria meningitidis; identical to SEQ ID NO: 8447

SEQ ID NO: 32716 - protein, 284 aa, Neisseria meningitidis; identical to SEQ ID NO: 6145

SEQ ID NO: 32717 - protein, 242 aa, Neisseria meningitidis; identical to SEQ ID NO: 107

SEQ ID NO: 32718 - protein, 336 aa, Neisseria meningitidis; identical to SEQ ID NO: 24987

SEQ ID NO: 32719 - protein, 516 aa, Neisseria meningitidis
MKKPLISVAAALLGVALGTPYYLGVKAEESLTQQQKILQETGFLTVESHQYERGWFTSMETTVIRLKPELLNNAQKYLPDNLKTVLEQPVTLVNHITHGPFAGGFGTQAHIETEFKYAPETEKVLERFFGKQAPVSLANTVYFNGSGKMEVSVPAFDYEELSGIRLHWEGLTGKTVYQKGFKSYRNSYDAPLFKIKLADKGDAAFEKAHFDSETSDGINPLALGSSNLTLEKFSLEWKEGVDYNVKLNELVNLVTDLQIGAFINPNGSIAPSKIEVGKLAFSTKTGESGSFINSEGQFRFDTLVYGNEKYGPLDIHIAAEHLDASALTVLKRKFAQISAKKMTEEQIRNDLIAAVKGEASGLFTNNPVLDIKTFRFTQPSGKIDVGGKIMFKDMKKEDLNQLGLMLKKTEADIRMSIPQKMLEDLAVSQAGNIFSVNAEDEAEGRASLDDINETLRLMVDSTVQSMAREKYLTLNGDQIDTAISLKNNQLKLNGKTLQNEPEPDFDEGGMVSEPQQ

SEQ ID NO: 32720 - protein, 197 aa, Neisseria meningitidis; identical to SEQ ID NO: 1551

SEQ ID NO: 32721 - protein, 207 aa, Neisseria meningitidis; identical to SEQ ID NO: 3013

SEQ ID NO: 32722 - protein, 262 aa, Neisseria meningitidis; identical to SEQ ID NO: 24738

SEQ ID NO: 32723 - protein, 123 aa, Neisseria meningitidis; identical to SEQ ID NO: 1296

SEQ ID NO: 32724 - protein, 210 aa, Neisseria meningitidis; identical to SEQ ID NO: 5679

SEQ ID NO: 32725 - protein, 171 aa, Neisseria meningitidis; identical to SEQ ID NO: 24572

SEQ ID NO: 32726 - protein, 414 aa, Neisseria meningitidis; identical to SEQ ID NO: 19743

SEQ ID NO: 32727 - protein, 668 aa, Neisseria meningitidis; identical to SEQ ID NO: 24263

SEQ ID NO: 32728 - protein, 177 aa, Neisseria meningitidis; identical to SEQ ID NO: 1513

SEQ ID NO: 32729 - protein, 121 aa, Neisseria meningitidis; identical to SEQ ID NO: 10590

SEQ ID NO: 32730 - protein, 500 aa, Neisseria meningitidis; identical to SEQ ID NO: 9448

SEQ ID NO: 32731 - protein, 260 aa, Neisseria meningitidis; identical to SEQ ID NO: 25021

SEQ ID NO: 32732 - protein, 137 aa, Neisseria meningitidis; identical to SEQ ID NO: 9005

SEQ ID NO: 32733 - protein, 436 aa, Neisseria meningitidis; identical to SEQ ID NO: 1523

SEQ ID NO: 32734 - protein, 258 aa, Neisseria meningitidis; identical to SEQ ID NO: 25644

SEQ ID NO: 32735 - protein, 262 aa, Neisseria meningitidis
MSTFFQQTAQAMIAKHIGRFPLLKLDQVIDWQPIEQYLNRQKTRYLRDHRGRPACPLLSMFKAVLLGQWHSLSDPELEHSLITRIDFNLFCRFDELSIPDYSTLCRYRNRLAQDDTLSELLKLINRQLTEKGLKVEKASAAVIDATIIQTAGSKQRQAIEVDEEGQISGQTTPSKDSDARWIKKNGLYKLGYKQHTRTDAEGYIEKLHITPANAHECKHLSPLLEGIAEGTTVYADKGYDSAENRQHLEEHQLQDGIMRKAT

SEQ ID NO: 32736 - protein, 160 aa, Neisseria meningitidis; identical to SEQ ID NO: 18607

SEQ ID NO: 32737 - protein, 179 aa, Neisseria meningitidis; identical to SEQ ID NO: 25135

SEQ ID NO: 32738 - protein, 90 aa, Neisseria meningitidis; identical to SEQ ID NO: 8632

SEQ ID NO: 32739 - protein, 658 aa, Neisseria meningitidis; identical to SEQ ID NO: 25555

SEQ ID NO: 32740 - protein, 481 aa, Neisseria meningitidis; identical to SEQ ID NO: 24478

SEQ ID NO: 32741 - protein, 544 aa, Neisseria meningitidis; identical to SEQ ID NO: 7248

SEQ ID NO: 32742 - protein, 459 aa, Neisseria meningitidis; identical to SEQ ID NO: 19449

SEQ ID NO: 32743 - protein, 327 aa, Neisseria meningitidis; identical to SEQ ID NO: 294

SEQ ID NO: 32744 - protein, 122 aa, Neisseria meningitidis; identical to SEQ ID NO: 19534

SEQ ID NO: 32745 - protein, 318 aa, Neisseria meningitidis; identical to SEQ ID NO: 46

SEQ ID NO: 32746 - protein, 232 aa, Neisseria meningitidis
VQADLAYAAERITHDYPKATGANNTSTVSDYFRNIRAHSIHPRVSVGYDFGDWRIAADYASYRKWNNNKYSVNTKEVGRNNNNNIDIWKELKTENQENGSFHAASSLGLSAIYDFKLNDKFDKFKPYIGARVAYGHVKHQVHSVRKETTTVFSKPSGSVTKPGEIVETPTSKPAYHESHSISSLGLGVIAGVGFDITPKLTLDTGYRYHNWGRLENTRFKTHEVSLGMRYHF

SEQ ID NO: 32747 - protein, 71 aa, Neisseria meningitidis; identical to SEQ ID NO: 6296

SEQ ID NO: 32748 - protein, 735 aa, Neisseria meningitidis; identical to SEQ ID NO: 19384

SEQ ID NO: 32749 - protein, 706 aa, Neisseria meningitidis; identical to SEQ ID NO: 19807

SEQ ID NO: 32750 - protein, 245 aa, Neisseria meningitidis; identical to SEQ ID NO: 4045

SEQ ID NO: 32751 - protein, 275 aa, Neisseria meningitidis; identical to SEQ ID NO: 18182

SEQ ID NO: 32752 - protein, 383 aa, Neisseria meningitidis; identical to SEQ ID NO: 24662

SEQ ID NO: 32753 - protein, 1227 aa, Neisseria meningitidis; identical to SEQ ID NO: 25370

SEQ ID NO: 32754 - protein, 157 aa, Neisseria meningitidis; identical to SEQ ID NO: 3094

SEQ ID NO: 32755 - protein, 962 aa, Neisseria meningitidis; identical to SEQ ID NO: 25404

SEQ ID NO: 32756 - protein, 249 aa, Neisseria meningitidis; identical to SEQ ID NO: 18550

SEQ ID NO: 32757 - protein, 264 aa, Neisseria meningitidis; identical to SEQ ID NO: 19309

SEQ ID NO: 32758 - protein, 614 aa, Neisseria meningitidis; identical to SEQ ID NO: 25217

SEQ ID NO: 32759 - protein, 170 aa, Neisseria meningitidis; identical to SEQ ID NO: 1267

SEQ ID NO: 32760 - protein, 76 aa, Neisseria meningitidis; identical to SEQ ID NO: 19491

SEQ ID NO: 32761 - protein, 123 aa, Neisseria meningitidis; identical to SEQ ID NO: 1024

SEQ ID NO: 32762 - protein, 112 aa, Neisseria meningitidis; identical to SEQ ID NO: 8651

SEQ ID NO: 32763 - protein, 370 aa, Neisseria meningitidis; identical to SEQ ID NO: 852

SEQ ID NO: 32764 - protein, 787 aa, Neisseria meningitidis; identical to SEQ ID NO: 19161

SEQ ID NO: 32765 - protein, 169 aa, Neisseria meningitidis; identical to SEQ ID NO: 5718

SEQ ID NO: 32766 - protein, 558 aa, Neisseria meningitidis; identical to SEQ ID NO: 14733

SEQ ID NO: 32767 - protein, 411 aa, Neisseria meningitidis; identical to SEQ ID NO: 3347

SEQ ID NO: 32768 - protein, 160 aa, Neisseria meningitidis; identical to SEQ ID NO: 6404

SEQ ID NO: 32769 - protein, 203 aa, Neisseria meningitidis; identical to SEQ ID NO: 19191

SEQ ID NO: 32770 - protein, 303 aa, Neisseria meningitidis; identical to SEQ ID NO: 18645

SEQ ID NO: 32771 - protein, 283 aa, Neisseria meningitidis; identical to SEQ ID NO: 19904

SEQ ID NO: 32772 - protein, 343 aa, Neisseria meningitidis; identical to SEQ ID NO: 12509

SEQ ID NO: 32773 - protein, 105 aa, Neisseria meningitidis; identical to SEQ ID NO: 895

SEQ ID NO: 32774 - protein, 464 aa, Neisseria meningitidis; identical to SEQ ID NO: 19187

SEQ ID NO: 32775 - protein, 161 aa, Neisseria meningitidis; identical to SEQ ID NO: 7269

SEQ ID NO: 32776 - protein, 141 aa, Neisseria meningitidis; identical to SEQ ID NO: 26

SEQ ID NO: 32777 - protein, 158 aa, Neisseria meningitidis; identical to SEQ ID NO: 9372

SEQ ID NO: 32778 - protein, 48 aa, Neisseria meningitidis; identical to SEQ ID NO: 6016

SEQ ID NO: 32779 - protein, 408 aa, Neisseria meningitidis; identical to SEQ ID NO: 3316

SEQ ID NO: 32780 - protein, 111 aa, Neisseria meningitidis; identical to SEQ ID NO: 233

SEQ ID NO: 32781 - protein, 763 aa, Neisseria meningitidis; identical to SEQ ID NO: 19416

SEQ ID NO: 32782 - protein, 123 aa, Neisseria meningitidis; identical to SEQ ID NO: 3099

SEQ ID NO: 32783 - protein, 166 aa, Neisseria meningitidis; identical to SEQ ID NO: 13557

SEQ ID NO: 32784 - protein, 136 aa, Neisseria meningitidis
LAEGQKSAVTEYYLNHGEWPANNSSAGVATSADIKGKYVKSVEVKNGVVTAQMASSNVNNEIKGKKLSLWAKRQAGSVKWFCGQPVTRDATASADAVKADTATTKKIDTKHLPSTCRDAASAVCIETPPTAFYKNT

SEQ ID NO: 32785 - protein, 126 aa, Neisseria meningitidis
LAEGQKSAVTEYYLNHGIWPANNNSAGVATSTDIKGKYVQSVEVKNGVVTATMASSNVNNEIKGKKLSLWAKRQNGSVKWFCGQPVERTAPTTTNDDVKADTAANGKQIDTKHLPSTASTRKSTPN

SEQ ID NO: 32786 - protein, 274 aa, Neisseria meningitidis
VNRTAFCCFSLTAALILTACSSGGGGVAADIGAGLADALTAPLDHKDKSLQSLTLDQSVRKNEKLKLAAQGAEKTYGNGDSLNTGKLKNDKVSRFDFIRQIEVDGQLITLESGEFQVYKQSHSALTALQTEQEQDPEHSGKMVAKRRFKIGDIAGEHTSFDKLPKDVMATYRGTAFGSDDAGGKLTYTIDFAAKQGHGKIEHLKSPELNVELATAYIKPDEKHHAVISGSVLYNQDEKGSYSLGIFGGQAQEVAGSAEVETANGIHHIGLAAKQ

SEQ ID NO: 32787 - protein, 223 aa, Neisseria meningitidis; identical to SEQ ID NO: 1391

SEQ ID NO: 32788 - protein, 183 aa, Neisseria meningitidis; identical to SEQ ID NO: 24113

SEQ ID NO: 32789 - protein, 177 aa, Neisseria meningitidis; identical to SEQ ID NO: 19230

SEQ ID NO: 32790 - protein, 369 aa, Neisseria meningitidis; identical to SEQ ID NO: 18918

SEQ ID NO: 32791 - protein, 321 aa, Neisseria meningitidis; identical to SEQ ID NO: 24689

SEQ ID NO: 32792 - protein, 417 aa, Neisseria meningitidis; identical to SEQ ID NO: 9265

SEQ ID NO: 32793 - protein, 217 aa, Neisseria meningitidis
MKITHCKLKKKVQKELLRFFVLEVTARSAADILGIHPNSAALFYRKIRTVINHHLALAADEVFEGPVEPDESDFGGRRKGRRGRGAAGKVVVFGILKRNGRVYTVVVDNAKSDTLMPVIKQKIMPDSIVYTDSLSSCDKLDVSGFIHYRINHSKEFADRQNHINGIENFWNQAKRVLRKYNGIDRKSFPLCLKECEFRFNFGTPSQQLKILRDWCGI

SEQ ID NO: 32794 - protein, 83 aa, Neisseria meningitidis; identical to SEQ ID NO: 5347

SEQ ID NO: 32795 - protein, 54 aa, Neisseria meningitidis; identical to SEQ ID NO: 18285

SEQ ID NO: 32796 - protein, 107 aa, Neisseria meningitidis; identical to SEQ ID NO: 23266

SEQ ID NO: 32797 - protein, 228 aa, Neisseria meningitidis; identical to SEQ ID NO: 2979

SEQ ID NO: 32798 - protein, 342 aa, Neisseria meningitidis
MDLSIVVPIYNVESYLEACLNSIEPILSNENVELILVNDGSKDGSEDICYKYIDKTTNNKQQTTNNKQQTTNNTRYRTPNIKYIYQDNQGTAEARNTGIKNSNGKYIVFIDSDDFINCQVLLDFLSKDDIDMPDVVFLNAVKYDKGSVSHFGEDYQPEKILKQSKVEVLKGLCRFRKFPGSACNKIIKRELIIKEKLFFEKEVYAEDIEWSMRLFNAATTFSYLDGCYYYYRQGRKDSKTGTVSEKSIKSLLYILEKNAEMEFDRDISSYLYSFLSYEYLVLLFIMTSKNIECDADIKRRAYHLRFMLLKSNKLIYKLIFPIITLFGVDITGRILKAIRGNI

SEQ ID NO: 32799 - protein, 338 aa, Neisseria meningitidis; identical to SEQ ID NO: 18219

SEQ ID NO: 32800 - protein, 268 aa, Neisseria meningitidis; identical to SEQ ID NO: 18441

SEQ ID NO: 32801 - protein, 70 aa, Neisseria meningitidis; identical to SEQ ID NO: 232

SEQ ID NO: 32802 - protein, 107 aa, Neisseria meningitidis; identical to SEQ ID NO: 19842

SEQ ID NO: 32803 - protein, 484 aa, Neisseria meningitidis; identical to SEQ ID NO: 18202

SEQ ID NO: 32804 - protein, 214 aa, Neisseria meningitidis; identical to SEQ ID NO: 18686

SEQ ID NO: 32805 - protein, 497 aa, Neisseria meningitidis; identical to SEQ ID NO: 1619

SEQ ID NO: 32806 - protein, 434 aa, Neisseria meningitidis; identical to SEQ ID NO: 7859

SEQ ID NO: 32807 - protein, 213 aa, Neisseria meningitidis; identical to SEQ ID NO: 6185

SEQ ID NO: 32808 - protein, 531 aa, Neisseria meningitidis; identical to SEQ ID NO: 4228

SEQ ID NO: 32809 - protein, 255 aa, Neisseria meningitidis; identical to SEQ ID NO: 23840

SEQ ID NO: 32810 - protein, 655 aa, Neisseria meningitidis; identical to SEQ ID NO: 9708

SEQ ID NO: 32811 - protein, 416 aa, Neisseria meningitidis; identical to SEQ ID NO: 19980

SEQ ID NO: 32812 - protein, 462 aa, Neisseria meningitidis; identical to SEQ ID NO: 24644

SEQ ID NO: 32813 - protein, 54 aa, Neisseria meningitidis; identical to SEQ ID NO: 18285

SEQ ID NO: 32814 - protein, 116 aa, Neisseria meningitidis; identical to SEQ ID NO: 5541

SEQ ID NO: 32815 - protein, 715 aa, Neisseria meningitidis
LLPLLLASCIGGNFGVQPVVESTPTAYPVTFKSKDVPTSPPAKPSIETTPVNQPAVGAAMRLPRRNIAAFDKNGNEIPDSKQAEEYLPLKEEDILFLDGTPKEQADKLKKEINGRYPNVTIYTSDLKDAVYKYEHVRAGYVYTRFGTDEIEQNSGGKQVTHRLGYDGFVYYSGERPSQSLPSAGTVKYSGNWQYMTDVKRHRAGKAVGIDNLGYITFYGNDVGATSYAAKDVDEREKHPAKYTVDFDKKTLTGQLIKNQYVQKKTDEKKPLTIYNITAKLDGNRFTGSAKVNPDLAKNPAGNERLFFHADADQRLEGGFFGDNGEELAGRFISNDNSVFGVFAGKKTETANAADTKPALPSGKHTKILDSLKISVDEATDGHARKFAISSMPDFGHPDKLLVEGREIPLVNKEQIIKLADGRKMTVSACCDFLTYVKLGRIKTDRPAAKPKAQDEDSEDEIGESEENEDEISDEEGTEDEVVEDEGSEEDEVSEGDNGENEEEIAEEETEEEVDEAEEEKVEEPEEELPAEEGNGGSGSILPTPEAPKGRDIDLFLKGIRTAEADIPKTGKAHYTGTWEARIGVPDKKDDQPGTTFIQKDSYANQGAKAEFDVDFGAKSLSGKLTEKNDTHPAVYIENGVIDGNGFHATARTRDNGIDLSGQGSTSPQSFKANNLLVTGGFYGPQAAELGGNIIDSDRKFGAVFGAKKDNKEVEK

SEQ ID NO: 32816 - protein, 182 aa, Neisseria meningitidis; identical to SEQ ID NO: 4199

SEQ ID NO: 32817 - protein, 123 aa, Neisseria meningitidis; identical to SEQ ID NO: 7208

SEQ ID NO: 32818 - protein, 197 aa, Neisseria meningitidis; identical to SEQ ID NO: 6180

SEQ ID NO: 32819 - protein, 412 aa, Neisseria meningitidis; identical to SEQ ID NO: 2406

SEQ ID NO: 32820 - protein, 67 aa, Neisseria meningitidis; identical to SEQ ID NO: 86

SEQ ID NO: 32821 - protein, 205 aa, Neisseria meningitidis; identical to SEQ ID NO: 8342

SEQ ID NO: 32822 - protein, 115 aa, Neisseria meningitidis; identical to SEQ ID NO: 19291

SEQ ID NO: 32823 - protein, 1466 aa, Neisseria meningitidis
MKTTDKRTTETHRKAPKTGRIRFSPAYLAICLSFGILPQAWAGHTYFGINYQYYRDFAENKGKFAVGAKDIEVYNKKGELVGKSMTKAPMIDFSVVSRNGVAALVGDQYIVSVAHNGGYNNVDFGAEGSNPDQHRFSYQIVKRNNYKAGTKGHPYGGDYHMPRLHKFVTDAEPVEMTSYMDGWKYTDQNNYPDRVRIGAGRQYWRSDEDEPNNRESSYHIASAYSWLVGGNTFAQNGSGGGTVNLGSEKIKHSPYGFLPTGGSFGDSGSPMFIYDAQKQKWLINGVLQTGNPYIGKSNGFQLVRKNWFYDEIFTGDTHSVFYEPHQNGKYTFHDNNNGTGKINAKHEHNSLPNRLKTRTVQLFNVSLSETAREPVYHAAGGVNSYRPRLNNGENISFIDEGKGELILTSNINQGAGGLYFQGDFTVSPENNETWQGAGVHISEDSTVTWKVNGVANDRLSKIGKGTLHVQAKGENQGSISVGDGTVILDQQADDKGKKQAFSEIGLVSGRGTVQLNADNQFNPDKLYFGFRGGRLDLNRHSLSFHRIQNTDEGAMIVNHNATTTSTVTITGNESITQPSGKNINRLNYSKEIAYNGWFGEKDATKTNGRLNLVYQPAAEDRTLLLSGGTNLNGNITQTNGKLFFSGRPTPHAYNHLNNHWSQKEGIPHGEIVWDNDWINRTFKAENFHIQGGQAVISRNVAKVEGDWHLSNHAQAVFGVAPHQSHTICTRSDWTGLTNCVENTITDDKVIASLTNTDISGNVDLADHAHLNLTGLATLNGNLTAGGDTHYEVTHNATQRGNLSLVGNAQATFNQATLNGNTSASGNASFNLSNNAVQNGSLTLSGNAKANVSHSALNGNVSLADKAVFHFENSRLTGQISGGKDTALHLKDSEWTLPSGTELGNLNLDNATITLNSAYRHDAAGAQTGSVSDTPRRRSRRSRRSRRSLLSVTPPTSAESRFNTLTVNGKLNGQGTFRFMSELFGYRSDKLKLAESSEGTYTLAVNNTGNEPASLEQLTVVEGKDNKPLSENLNFTLQNEHVDAGAWRYQLIRKDGEFRLHNPVKEQELSDKLGKAEAKKQAGKDNAQSLDALIAAGRDAVEKTESVAEPARQAGGENVGIMQAEEEKKRVQADKDSALAKQREAETRPATTAFPRARRARRDLPQPQPQPQPQPQPQPQRDLISRYANSGLSEFSATLNSVFAVQDELDRVFAEDRRNAVWTSGIRDTKHYRSQDFRAYRQQTDLRQIGMQKNLGSGRVGILFSHNRTENTFDDGIGNSARLAHGAVFGQYGIDRFYIGISAGAGFSSGSLSDGIGGKIRRRVLHYGIQARYRAGFGGFGIEPHIGATRYFVQKADYRYENVNIATPGLSFNRYRAGIKADYSFKPAQHISITPYLSLSYTDAASGKVRTRVNTAVLAQDFGKTRSAEWGVNAEIKGFMLSLHAAAAKGPQLEAQHSAGIKLGYRW

SEQ ID NO: 32824 - protein, 114 aa, Neisseria meningitidis
MLPNKVLGKYDWNVDGKTGIGAAWVVAAFILPILVWAIFMLSRMQGWLAPTKANPIWALVWLLICMPCLLIASKCLGWKGWRLLANVLACLAVRALLSVPAALLIAFTLQDLLK

SEQ ID NO: 32825 - protein, 265 aa, Neisseria meningitidis; identical to SEQ ID NO: 2138

SEQ ID NO: 32826 - protein, 720 aa, Neisseria meningitidis; identical to SEQ ID NO: 25673

SEQ ID NO: 32827 - protein, 361 aa, Neisseria meningitidis; identical to SEQ ID NO: 19986

SEQ ID NO: 32828 - protein, 222 aa, Neisseria meningitidis
MCTRKQQGFTLTELLIVMVIAAIMAMIALPNMSQWIASRRIASHAERIANLLRFSRGEAVRLNLPVYICPVQVKKDGTVNNKCDSGKKGQGMLAFGDKNGNKGYDNDTADVLLRSVVLNDDINDKRINYAFNHIAFGQTQPTTDRVVWTFNQNGTFGYTKDQHLTKQSSFFYSDGYIQIVLTDARAVSDADKKFRSAVVLIDSSGRVEVCPRNDRRTVCQYK

SEQ ID NO: 32829 - protein, 464 aa, Neisseria meningitidis; identical to SEQ ID NO: 4310

SEQ ID NO: 32830 - protein, 125 aa, Neisseria meningitidis; identical to SEQ ID NO: 24723

SEQ ID NO: 32831 - protein, 132 aa, Neisseria meningitidis; identical to SEQ ID NO: 18357

SEQ ID NO: 32832 - protein, 154 aa, Neisseria meningitidis; identical to SEQ ID NO: 741

SEQ ID NO: 32833 - protein, 123 aa, Neisseria meningitidis; identical to SEQ ID NO: 130

SEQ ID NO: 32834 - protein, 61 aa, Neisseria meningitidis; identical to SEQ ID NO: 2615

SEQ ID NO: 32835 - protein, 162 aa, Neisseria meningitidis; identical to SEQ ID NO: 911

SEQ ID NO: 32836 - protein, 475 aa, Neisseria meningitidis; identical to SEQ ID NO: 18624

SEQ ID NO: 32837 - protein, 110 aa, Neisseria meningitidis; identical to SEQ ID NO: 149

SEQ ID NO: 32838 - protein, 206 aa, Neisseria meningitidis; identical to SEQ ID NO: 320

SEQ ID NO: 32839 - protein, 1201 aa, Neisseria meningitidis; identical to SEQ ID NO: 24234

SEQ ID NO: 32840 - protein, 394 aa, Neisseria meningitidis; identical to SEQ ID NO: 24788

SEQ ID NO: 32841 - protein, 76 aa, Neisseria meningitidis; identical to SEQ ID NO: 3053

SEQ ID NO: 32842 - protein, 66 aa, Neisseria meningitidis; identical to SEQ ID NO: 1185

SEQ ID NO: 32843 - protein, 446 aa, Neisseria meningitidis; identical to SEQ ID NO: 18727

SEQ ID NO: 32844 - protein, 319 aa, Neisseria meningitidis; identical to SEQ ID NO: 19713

SEQ ID NO: 32845 - protein, 434 aa, Neisseria meningitidis; identical to SEQ ID NO: 18191

SEQ ID NO: 32846 - protein, 283 aa, Neisseria meningitidis; identical to SEQ ID NO: 18857

SEQ ID NO: 32847 - protein, 221 aa, Neisseria meningitidis; identical to SEQ ID NO: 109

SEQ ID NO: 32848 - protein, 589 aa, Neisseria meningitidis; identical to SEQ ID NO: 24323

SEQ ID NO: 32849 - protein, 335 aa, Neisseria meningitidis; identical to SEQ ID NO: 25394

SEQ ID NO: 32850 - protein, 144 aa, Neisseria meningitidis; identical to SEQ ID NO: 3606

SEQ ID NO: 32851 - protein, 70 aa, Neisseria meningitidis; identical to SEQ ID NO: 18924

SEQ ID NO: 32852 - protein, 143 aa, Neisseria meningitidis; identical to SEQ ID NO: 2619

SEQ ID NO: 32853 - protein, 66 aa, Neisseria meningitidis; identical to SEQ ID NO: 1185

SEQ ID NO: 32854 - protein, 473 aa, Neisseria meningitidis
MDTKEILGYAAGSIGSAVLAVIILPLLSWYFPTDDIGRIVLMQTAAGLTVSALCLGLDQAYVREYYAAADKDTLFKTLFLPPLLSAAAIAALLLSRPSLPSEILFSLDDAAAGIGLVLFELSFLPIRFLLLVLRMEGRALAFSSAQLVPKLAILLLLPLTVGLLHFPANTAVLTAVYALANLAAAAFLLFQNRCRLKAVRHAPFSPAVLHRGLRYGIPIALSSIAYWGLASADRLFLKKYAGLEQLGVYSMGISFGGAALLFQSIFSTVWTPYIFRAIEENAPPARLSATAESAAALLASALCLTGIFSPLASLLLPENYAAVRFIVVSCMLPPLFCTLVEISGIGLNVVRKTRPIALATLGALAANLLLLGLAVPSGGARGAAVACATSFWLFFAFKTESSCRLWQPLKRLPLYTHTLLCLTSSAAYTCFGTPANYPLFAGVWAVYLAGCILRHWKDLHKLFHYLKKQGFPL

SEQ ID NO: 32855 - protein, 130 aa, Neisseria meningitidis; identical to SEQ ID NO: 18694

SEQ ID NO: 32856 - protein, 482 aa, Neisseria meningitidis; identical to SEQ ID NO: 25629

SEQ ID NO: 32857 - protein, 215 aa, Neisseria meningitidis; identical to SEQ ID NO: 4487

SEQ ID NO: 32858 - protein, 220 aa, Neisseria meningitidis; identical to SEQ ID NO: 2583

SEQ ID NO: 32859 - protein, 112 aa, Neisseria meningitidis; identical to SEQ ID NO: 3481

SEQ ID NO: 32860 - protein, 502 aa, Neisseria meningitidis; identical to SEQ ID NO: 25608

SEQ ID NO: 32861 - protein, 177 aa, Neisseria meningitidis
MFPPDKPLFLCLSALLLASCGTTSGKHRQPKPKQTVRQIQAVRISHIDRTQGSQELMLHSLGLIGTPYKWGGSSTATGFDCSGMIQFVYKNALNVKLPRTARDMAAASRKIPDSRLKAGDLVFFNTGGTHRYSHVGLYIGNGEFIHAPSSGKTIKTEKLSTPFYAKNYLGAHTFFTE

SEQ ID NO: 32862 - protein, 1010 aa, Neisseria meningitidis; identical to SEQ ID NO: 26049

SEQ ID NO: 32863 - protein, 47 aa, Neisseria meningitidis; identical to SEQ ID NO: 2624

SEQ ID NO: 32864 - protein, 120 aa, Neisseria meningitidis; identical to SEQ ID NO: 19563

SEQ ID NO: 32865 - protein, 134 aa, Neisseria meningitidis; identical to SEQ ID NO: 18811

SEQ ID NO: 32866 - protein, 291 aa, Neisseria meningitidis; identical to SEQ ID NO: 18657

SEQ ID NO: 32867 - protein, 944 aa, Neisseria meningitidis
VIASRLSGNISSAIQEHKDGKVNINRFQNILADLYSLGGLGSTLIEKNGNMQSWGIPLAIAGDIIAATAIATGDTGTISTEEFYNFDNWKGFGYELFEDWSRWVYDWLPDGWNLWKELDRNRSGQYHIYDPLALDLDGDGIETVAAKGFSGSLFDHNGNGIRTATGWVSADDGLLVRDLNGNGIIDNGAELFGDNTKLADGSFAKHGYAALAELDSNGDNIINAADAAFQSLRVWQDLNQDGISQTNELRTLEELGIQSLDLAYKDVNKNLGNGNTLAQQGSYTKTNGTTAKMGDLLLAADNLHSRFKDKVELTAEQAKAANLAGIGRLRDLREAAALSGDLANMLKAYSAAETKEAQLALLDNLIHKWAETDSNWGKKSPMRLSTDWTQTANEGIALTPSQVAQLKKNALVSLSDKAKATIDAARDRIAVLDAYTGQDSNTLYYMSEEDALNIVKVTNDTYDHLAKNIYQNLLFQTRLQPYLNQISFKMENDTFTLDFSGLVQAFNHVKETNPQKAFVDLAEMLAYGELRSWYEGRRLMADYVEEAKKAGKFEDYQKVLGQETVALLAKTSGTQADDILQNVGFGHNKNVSLYGNDGNDTLIGGAGNDYLEGGSGSDTYVFGKGFGQDTVYNYDYATGRKDIIRFTDGITADMLTFTREGNHLLIKAKDGSGQVTVQSYFNDGSGAYRIDEIHFDNGKVLDVATVKKLVQQSTDGSDRLYAYQSGSTLNGGLGDDYLYGADGNDLLNGDAGNDSIYSGNGNDTLNGGEGNDALYGYNGNDALNGGEGNDHLNGEDGNDTLIGGAGNDYLEGGSGSDTYVFGEGFGQDTVYNYHVDKNSDTMHFKGFKAADVHFIRSGSDLVLSASEQDNVRISGFFYGENHRVDTFVFDDAAISNPDFAKYINAGNNLVQSMSVFGSNTAATGGNVDANIQSVQQPLLVTPSA

SEQ ID NO: 32868 - protein, 294 aa, Neisseria meningitidis
VVGNGKKYAAPLLVLGCVVFGLGSLIVRSVPVGSYAIAFWRLLISVFVFWFLARFFRQKFPKNRKTVRYALTAGVFLAFDLALWHESIHAVGPGISTLLNSLQIFFLSAIGVFFFGERLSGLKKAGLISAVAGVAMIAGAEFGYNGNAVWGFVSGLVSGLMLALSMVFVRKTHEIETVALFPSMMILSLGGAVSLVVPALLMDGGALYPTTWKDAGLVLVYGVVMQCFAWAMVAYAIPLLSLSLTGLLLLSEPVAALFIDYFGLGKPIEGVQWAGVALTLSAIYLGSLKQQSEP

SEQ ID NO: 32869 - protein, 273 aa, Neisseria meningitidis; identical to SEQ ID NO: 14267

SEQ ID NO: 32870 - protein, 258 aa, Neisseria meningitidis; identical to SEQ ID NO: 5438

SEQ ID NO: 32871 - protein, 419 aa, Neisseria meningitidis; identical to SEQ ID NO: 18862

SEQ ID NO: 32872 - protein, 563 aa, Neisseria meningitidis; identical to SEQ ID NO: 4061

SEQ ID NO: 32873 - protein, 883 aa, Neisseria meningitidis; identical to SEQ ID NO: 24735

SEQ ID NO: 32874 - protein, 594 aa, Neisseria meningitidis; identical to SEQ ID NO: 19641

SEQ ID NO: 32875 - protein, 197 aa, Neisseria meningitidis; identical to SEQ ID NO: 19286

SEQ ID NO: 32876 - protein, 161 aa, Neisseria meningitidis; identical to SEQ ID NO: 24964

SEQ ID NO: 32877 - protein, 150 aa, Neisseria meningitidis; identical to SEQ ID NO: 25586

SEQ ID NO: 32878 - protein, 178 aa, Neisseria meningitidis; identical to SEQ ID NO: 25251

SEQ ID NO: 32879 - protein, 492 aa, Neisseria meningitidis; identical to SEQ ID NO: 18142

SEQ ID NO: 32880 - protein, 51 aa, Neisseria meningitidis; identical to SEQ ID NO: 5732

SEQ ID NO: 32881 - protein, 209 aa, Neisseria meningitidis; identical to SEQ ID NO: 4591

SEQ ID NO: 32882 - protein, 93 aa, Neisseria meningitidis; identical to SEQ ID NO: 24308

SEQ ID NO: 32883 - protein, 433 aa, Neisseria meningitidis
MTESLRLPAASLKPSTVALPGSKSISNRTLLLAALSDNTCEIHSLLKSDDTDRMLEALDKLGVEIEYLAEDRLKVHGTGGRFPNRTADLFLGNAGTAFRPLTAALAVLGGDYHLHGVPRMHERPIGDLADALRIAGADVEYLGKEHYPPLHIGKRQDNGERVIPIKGNVSSQFLTALLMALPLTGQAFEIRMVGELISKPYIDITLKLMAQFGVQVANENYRVFKIPADAHYHAPEHLHVEGDASSASYFLAAGLIAATPVCVIGIGANSIQGDVAFARELEKIGADVVWGENFVEVSRPKERAVQSFDLDANHIPDAAMTLAIVALATGQTCTLRNIGSWRVKETDRIAAMANELRKLGAKVVEEAEAIHITPPETLTPDAVIDTYDDHRMAMCFSLVSLLGVPVVINDPKCTHKTFPTYFDVFSSLTETTE

SEQ ID NO: 32884 - protein, 231 aa, Neisseria meningitidis; identical to SEQ ID NO: 3708

SEQ ID NO: 32885 - protein, 66 aa, Neisseria meningitidis; identical to SEQ ID NO: 421

SEQ ID NO: 32886 - protein, 253 aa, Neisseria meningitidis; identical to SEQ ID NO: 24378

SEQ ID NO: 32887 - protein, 228 aa, Neisseria meningitidis; identical to SEQ ID NO: 4833

SEQ ID NO: 32888 - protein, 93 aa, Neisseria meningitidis; identical to SEQ ID NO: 3660

SEQ ID NO: 32889 - protein, 288 aa, Neisseria meningitidis; identical to SEQ ID NO: 2832

SEQ ID NO: 32890 - protein, 130 aa, Neisseria meningitidis; identical to SEQ ID NO: 7797

SEQ ID NO: 32891 - protein, 418 aa, Neisseria meningitidis; identical to SEQ ID NO: 18725

SEQ ID NO: 32892 - protein, 98 aa, Neisseria meningitidis; identical to SEQ ID NO: 18505

SEQ ID NO: 32893 - protein, 601 aa, Neisseria meningitidis; identical to SEQ ID NO: 18531

SEQ ID NO: 32894 - protein, 187 aa, Neisseria meningitidis; identical to SEQ ID NO: 18399

SEQ ID NO: 32895 - protein, 352 aa, Neisseria meningitidis; identical to SEQ ID NO: 25433

SEQ ID NO: 32896 - protein, 94 aa, Neisseria meningitidis; identical to SEQ ID NO: 11561

SEQ ID NO: 32897 - protein, 357 aa, Neisseria meningitidis; identical to SEQ ID NO: 25335

SEQ ID NO: 32898 - protein, 61 aa, Neisseria meningitidis; identical to SEQ ID NO: 1836

SEQ ID NO: 32899 - protein, 245 aa, Neisseria meningitidis
MLLIPAIDLKEGRCVRLRQGLMEEATVFSDSPAETALHWFKQGARRLHLVDLNGAFAGVPQNLPAIKDILAAVAKDIPVQLGGGIRDLKTIGQYLDLGLNDVIIGTAAVKNPDFVREACKAFPGRIIVGLDAKDGMAAIDGWATVTGHHVIDLAKRFEDDGVNSIIYTDIGRDGMMSGVNIDATVKLAQTVRIPVIASGGLTGLDDIRALCAAEKHGVAGAITGRAIYEGSIDFAQAQQLADSLD

SEQ ID NO: 32900 - protein, 2799 aa, Neisseria meningitidis
MNRTLYKVVFNKHRNCMIVVAENAKREGKNTADTQAVGILPNDIAGFAGFIHSISVISFSLSLLLGSALILTSSSANAQGIVADKSAPAQQQPTILQTGNGIPQVNIQTPTSAGVSVNQYAQFDVGNRGAILNNSRSNTQTQLGGWIQGNPWLARGEARVVVNQINSSHSSQMNGYIEVGGRRAEVVIANPAGIAVNGGGFINASRATLTTGQPQYQAGDLSGFKIRQGNVVIAGHGLDARDTDFTQILSHAVKIDGPVWGKDVRVSAGKNDVSADGSIRSSHSPATNINSDNSLYAIDTGALGGMYAGKITLISTDRDASVRNQGQWFASAGNVAVNAEGKLVNTGMIAATGENHAVSLHARNVHNSGTVASQDDANIHSQTLDNSGTVLSSGQLTVRNLGRLKNHNNGTIQAARLDMSTGGLDNTGNITQTGSQALDLVSAGKFDNSGKIGVSDVPQTGLNPNPSVIPQIPSTATGSGSSTVLASKPGSNNPVSPTAPAKNYAGGRIQTTGAFDNAGSINAGGQIDIAAQNGLENSGSLNAAKLRVSGDSFNNTVKGKLQAHDLAVNTQTAKNSGHLLTLTGKIDNRELHNAGEIAANNLTLIHSGRLSNDKKGNIRAAHLQLDTAGLHNAGNILADSGTVTTKNNLRNTGKVSVARLNTEGQTLDNTHGHIEAETVNIQSQQLTNQSGHITATEQLTINSRNVDNQNGKLLSANQAQLAVSDGLYNQHGEIATNRQLSIHDKNQNTLALNNADGTIQSAGNVSLQAKSLANNGTLTAGNKLDIALTDDFVVERDLTAGKQLNLSIKGRLKNTHTLQASHTLKLNAGNIDNQVTGKIIGGEQTDITSEQHVDNRGLINSDGLTHIGAGQTLTNTGTGKIYGNHIALDAQILLNREETTEGSTKAGAIAARKRLDIGAKEIHNQEGALLSSEGIFAVGNRLDEQHHAAGMADTFVNGSAGLEVQGDALMSVRNMQNINNHFKTETYLAKAEKQVRDYTVLGQNTYYQAGKDGLFDNSQGQKDQTTATFHLKNGSRIEANQWHVRDYHIETYKERIIENRPAHITVGGDLTASGQNWLNKDSRIVVGGRIITDDLNQKEITNQSTTGKGRTDAVGTQWDSVTKKGWYSGRKRQRRTERNHTPYHDTQLFTHDFDTPVSVIQQNAASPSFQPAASAIKLIDGVSTAAVNGQRIHTGNVVSLNNATVTLPNSSLYTTHPDNKGWLVETDPQFADYRRWLGSDYMLQQLQLDTNHLHKRLGDGYYEQKLVNEQIHQLTGYRRLDGYRSDEEQFKALMDNGLTAAKTFGLTPGIALSAEQVARLTSDIVWMENQTVTLSDGSTQTVLVPKVYALARKGDLNTSGGLISAEQVLLKLQNGNLTNSGTIAGRQAVLIQARNINSNGNIQADQIGLKAEKSINIDGGQVQAGRLLTAQAQNINLNGTTQTSGNERNGNTAIDRMAGINVVGSHTEQVDNRTSDGILSLHAGNDINLNAATVSNQVKGGTTQITAGNNLNLGTIHTEHREAYGTLDDENHRHVRQSTEVGSSIRTQNGALLRAGNDLKIRQGELEAEEGKTVLAAGRDVTISEGRQITELDTSVSGKSKGILSSTKTQDRYRFSHDEAVGSNIGGGKMIVAAGQDINVRGSNLISDKGIVLKAGHDIDISTAHNRYTGNEYHESKKSGVMGTGGLGFTIGNRKTTDDTDRTNIVHTGSIIGSLNGDTVTVAGNRYRQTGSTVSSPEGRNTVTAKSIDVEFANNRYATDYAHTQEQKGLTVALNVPVVQAAQNFIQAAQNVGKSKNKRVNAMAAANAAWQSYQAAQQMQQFAPSSSAGQGQNNNQSPSISVSITYGEQKSRNEQKRHYTEAAASQIIGKGQTTLAATGSGEQSNINITGSDVIGHAGTALIADNHIRLQSAKQDGSEQSKNKSSGWNAGVAVKIGNGIRFGITAGGNIGKGKEQGGNTTHRHTHVGSTAGQTTIRSGGDTTLKGAQLIGKGIQADTRNLHIESVQDTETYQSKQQNGNVQVTVGYGFSASGSYRQSKVKADHASVTEQSGIYTGEDGYQIKVRDNTDLKGGIITSTRSAESKGKNRFQTATLTHRDIQNHSRYEGRSFGIGGSFDLNGGWDGTVTDKQGRPTDRISPAAGYGSDGDSKNSTTRSGINTRNIHITDEAGQLARTGRTAKETEARIYTGIDTETADQHSGRLKNSFDKDAVAKEINLQREVTKEFGRNAAQAVAAVADKLGNTQSYERYQEARTLLEAELQNTDSEAEKAAIRASLGQVNAYLAENQSRYDTWKEGGIGRSILHGAAGGLTTGSLGGILAGSGTSLAAPYLDKAAENLGTAGKAAVNALGGAAIGYATGGSGGAVVGANVDWHNRQLHPSERDWIRKNAQAFAKQEVGGREPTIDEIALAEKRLAQQAAKETDLFWMLTLEKVTDLSAQKFLRQAKGTFTNENGTQQQFFTTQGKQFMRPELFANEVYDLSFYKNHLQSPKNSSISKGTGELARRVTSSTWDKAKQDPILTGLQIAASPVHLVRDVGKASWQCVSGFGQCLQQGKENFVETGSAIGTGTASFQLNDLKPIYGQDVRGAQAGLVALQTADGITTALGAAKALNVAGKGSRYFINEWASSPPSGSRAAQRGAVGNLTHSQQVLTDGSHIQRGGKLLPNIRYKAGEFDYLYETDTLGRIKSFETDNLQLTQRDRLKHNSKTPDKVKGQDHAGHLIGDRFGGSPNLDNLVSQHKDVNLSAYKVLENKWAEAIKSGKNVKIQMQIEYAAGTRHPTRFVGYYWIDGKPTRININNL

SEQ ID NO: 32901 - protein, 65 aa, Neisseria meningitidis; identical to SEQ ID NO: 127

SEQ ID NO: 32902 - protein, 354 aa, Neisseria meningitidis; identical to SEQ ID NO: 14207

SEQ ID NO: 32903 - protein, 295 aa, Neisseria meningitidis; identical to SEQ ID NO: 25387

SEQ ID NO: 32904 - protein, 168 aa, Neisseria meningitidis; identical to SEQ ID NO: 19661

SEQ ID NO: 32905 - protein, 318 aa, Neisseria meningitidis; identical to SEQ ID NO: 3091

SEQ ID NO: 32906 - protein, 307 aa, Neisseria meningitidis
MTKTEPNNAQLDWLESESIHIIREVAAECENPALLFSGGKDSVVLLALACKAFRLGSRPVKLPFPLVHIDTGHNYPEVIAFRDAQAAKLNARLIVGRVEDSIAKGTVVLRKETDSRNAAQAVTLLETIEANGFDALMGGARRDEEKARAKERIFSFRDEFGQWNPKAQRPELWSLYNTRLHKGENMRVFPISNWTELDIWQYIARENLELPPIYYSHRREVVRRRGLLVSVTPLTPKMPSETSEILDVRFRTVGDISCTCPVESTASTPTEIIRETAVADISERSATRLDDQASEAAMEKRKKEGYF

SEQ ID NO: 32907 - protein, 222 aa, Neisseria meningitidis; identical to SEQ ID NO: 19273

SEQ ID NO: 32908 - protein, 145 aa, Neisseria meningitidis; identical to SEQ ID NO: 24906

SEQ ID NO: 32909 - protein, 442 aa, Neisseria meningitidis; identical to SEQ ID NO: 24918

SEQ ID NO: 32910 - protein, 131 aa, Neisseria meningitidis; identical to SEQ ID NO: 18033

SEQ ID NO: 32911 - protein, 404 aa, Neisseria meningitidis; identical to SEQ ID NO: 756

SEQ ID NO: 32912 - protein, 92 aa, Neisseria meningitidis; identical to SEQ ID NO: 10783

SEQ ID NO: 32913 - protein, 482 aa, Neisseria meningitidis; identical to SEQ ID NO: 13382

SEQ ID NO: 32914 - protein, 1328 aa, Neisseria meningitidis; identical to SEQ ID NO: 24921

SEQ ID NO: 32915 - protein, 52 aa, Neisseria meningitidis; identical to SEQ ID NO: 7295

SEQ ID NO: 32916 - protein, 475 aa, Neisseria meningitidis; identical to SEQ ID NO: 3229

SEQ ID NO: 32917 - protein, 753 aa, Neisseria meningitidis; identical to SEQ ID NO: 24520

SEQ ID NO: 32918 - protein, 118 aa, Neisseria meningitidis; identical to SEQ ID NO: 367

SEQ ID NO: 32919 - protein, 945 aa, Neisseria meningitidis; identical to SEQ ID NO: 24236

SEQ ID NO: 32920 - protein, 311 aa, Neisseria meningitidis; identical to SEQ ID NO: 25402

SEQ ID NO: 32921 - protein, 587 aa, Neisseria meningitidis; identical to SEQ ID NO: 24424

SEQ ID NO: 32922 - protein, 611 aa, Neisseria meningitidis; identical to SEQ ID NO: 8062

SEQ ID NO: 32923 - protein, 259 aa, Neisseria meningitidis; identical to SEQ ID NO: 24660

SEQ ID NO: 32924 - protein, 272 aa, Neisseria meningitidis; identical to SEQ ID NO: 1395

SEQ ID NO: 32925 - protein, 217 aa, Neisseria meningitidis; identical to SEQ ID NO: 19279

SEQ ID NO: 32926 - protein, 390 aa, Neisseria meningitidis
MNITIVAPYCSLPSEPHFNRFWYLAELLSQSHDVLLITSNFKHYDKSFRRPEDAEAASQGRLKVMLLEESGYSKNVSLGRVTSHHRFVKHFEKWLENCRPGEQDVVFSAYPLIATNLLLGKHKARLGYKLIVDVQDVWPESFSSVVPFLKKVPHKLLPFASRANRAYRYADALVAVSQTYLDRAKETNPNVPGEVIYIGADFPKLDAAPAKDFGDDKTRFFYLGTLSYSYDVETVCKGVRKLLDDGENVELHIMGGGPDLDRLKQYACDGIKFYGYIPYAEMMSVAKGCDIAINAIQSYSMASITNKLSDYMALQKPILNSQVNDEVAEVLTLLPHANYRSGDVDGFVQAAKDILKRKSDPVQSDEIVRRFKRDVAYQKIVNLIERLAHE

SEQ ID NO: 32927 - protein, 245 aa, Neisseria meningitidis; identical to SEQ ID NO: 2457

SEQ ID NO: 32928 - protein, 103 aa, Neisseria meningitidis; identical to SEQ ID NO: 1278

SEQ ID NO: 32929 - protein, 313 aa, Neisseria meningitidis; identical to SEQ ID NO: 24599

SEQ ID NO: 32930 - protein, 227 aa, Neisseria meningitidis; identical to SEQ ID NO: 5897

SEQ ID NO: 32931 - protein, 215 aa, Neisseria meningitidis; identical to SEQ ID NO: 19614

SEQ ID NO: 32932 - protein, 238 aa, Neisseria meningitidis; identical to SEQ ID NO: 3469

SEQ ID NO: 32933 - protein, 916 aa, Neisseria meningitidis; identical to SEQ ID NO: 25149

SEQ ID NO: 32934 - protein, 592 aa, Neisseria meningitidis; identical to SEQ ID NO: 3087

SEQ ID NO: 32935 - protein, 262 aa, Neisseria meningitidis; identical to SEQ ID NO: 24387

SEQ ID NO: 32936 - protein, 331 aa, Neisseria meningitidis; identical to SEQ ID NO: 24755

SEQ ID NO: 32937 - protein, 849 aa, Neisseria meningitidis
LALKYSFGRDLCLSAPYRPYCRCLMTKFTDCTRSNRIQPPTHRGYILKNNRQIKLIAASVALAASFQAHAGLGGLNIRSNLDEPFSGSITVTGEEAKALLGGGSVTVSEKGLTAKVHKLGDKAVIAVSSAQAVRDPVLVFRIGAGAQVREYTAILDPVGYSPKTKSALSDGKTHRKTAPTAESQENQNAKALRKTDKKDSANAAVKPAHNGKTHTVRKGETLKQIAAAIRPKHLTLEQVADALLKANPNVSAHGRLRAGSVLHIPNLNRIKAEQPKPQTAKPKAETASMPSEPSKQATVEKPVEKPEAKVAAPEAKAEKPAVRPEPVPAANTAASETAAESAPQEAAASAIDTPTDETGNAVSEPVEQVSAEEETESGLFDGLFGGSYTLLLAGGGAALIALLLLLRLAQSKRARRTEESVPEEEPDLDDAADDGIEITFAEVETPATPEPAPKNDVNDTLALDGESEEELSAKQTFDVETDTPSNRIDLDFDSLAAAQNGILSGALTQDEETQKRADADWNAIESTDSVYEPETFNPYNPVEIVIDTPEPESVAQTAENKPETVDTDFSDNLPSNNHIGTEETASAKPASPSGLAGFLKASSPETILEKTVAEVQTPEELHDFLKVYETDAADDLSALLQPAEALSVEENITETVAETPDFNATADDLSALLQPSEVPAVEENAAETVADDLSALLQPAEAPAVEENVTETVAETPDFNATADDLSALLQPAEVPAVEENAAEITLETPDSNTSEADALPDFLKDGEEETVDWSIYLSEENIPNNADTSFPSESVGSDAPSEAKYDLAEMYLEIGDRDAAAETVQKLLEEAEGDVLKRAQALAQELGI

SEQ ID NO: 32938 - protein, 131 aa, Neisseria meningitidis; identical to SEQ ID NO: 5580

SEQ ID NO: 32939 - protein, 176 aa, Neisseria meningitidis; identical to SEQ ID NO: 3632

SEQ ID NO: 32940 - protein, 358 aa, Neisseria meningitidis; identical to SEQ ID NO: 18266

SEQ ID NO: 32941 - protein, 419 aa, Neisseria meningitidis; identical to SEQ ID NO: 6995

SEQ ID NO: 32942 - protein, 236 aa, Neisseria meningitidis; identical to SEQ ID NO: 2130

SEQ ID NO: 32943 - protein, 293 aa, Neisseria meningitidis; identical to SEQ ID NO: 24777

SEQ ID NO: 32944 - protein, 229 aa, Neisseria meningitidis; identical to SEQ ID NO: 524

SEQ ID NO: 32945 - protein, 861 aa, Neisseria meningitidis; identical to SEQ ID NO: 354

SEQ ID NO: 32946 - protein, 375 aa, Neisseria meningitidis; identical to SEQ ID NO: 8635

SEQ ID NO: 32947 - protein, 174 aa, Neisseria meningitidis
MVLFYRLLKNMSSSVSSKTRYWVLALAAIVLDQWSKWAVLSSFQYRERVNVIPSFFDLTLVYNPGAAFSFLADQGGWQKYFFLVLAVAVSAYLVRAILRDEFAALGKTGAAMIIGGALGNVIDRLIHGHVVDFLLFYWQNWFYPAFNIADSFICVGAVLAVLDNIVHRKDGKKT

SEQ ID NO: 32948 - protein, 710 aa, Neisseria meningitidis
MSIVSAPLPALSALIILAHYHGIAANPADIQHEFCTSAQSDLNETQWLLAAKSLGLKAKVVRQPVKRLAMATLPALVWCDDGNHFILAKTDGGGEHAQYLIQDLTTNKSAVLSFAEFSNRYSGKLILVASRASVLGSLAKFDFTWFIPAVIKYRRLFFEVLVVSVVLQLFALITPLFFQVVMDKVLVHRGFSTLDVVSVALLVVSLFEIVLGGLRTYLFAHTTSRIDVELGARLFRHLLSLPLSYFEHRRVGDTVARVRELEQIRNFLTGQALTSVLDLAFSFIFLAVMWYYSSTLTWVVLASLPAYAFWSAFISPILRTRLNDKFARNADNQSFLVESITAVGTVKAMAVEPQMTQRWDNQLAAYVASGFRVTKLAVVGQQGVQLIQKLVTVATLWIGARLVIEGKLTVGQLIAFNMLSGQVAAPVIRLAQLWQDFQQVGISVARLGDILNAPTENASSHLALPDIRGEITFEHVDFRYKADGRLILQDLNLRIRAGEVLGIVGRSGSGKSTLTKLVQRLYVPEQGRVLVDGNDLALAAPAWLRRQVGVVLQENVLLNRSIRDNIALTDTGMPLERIIEAAKLAGAHEFIMELPEGYGTVVGEQGAGLSGGQRQRIAIARALITNPRILIFDEATSALDYESERAIMQNMQAICANRTVLIIAHRLSTVKTAHRIIAMDKGRIVEAGTQQELLAKPNGYYRYLYDLQNG

SEQ ID NO: 32949 - protein, 103 aa, Neisseria meningitidis; identical to SEQ ID NO: 392

SEQ ID NO: 32950 - protein, 522 aa, Neisseria meningitidis; identical to SEQ ID NO: 14570

SEQ ID NO: 32951 - protein, 139 aa, Neisseria meningitidis; identical to SEQ ID NO: 18668

SEQ ID NO: 32952 - protein, 282 aa, Neisseria meningitidis; identical to SEQ ID NO: 1323

SEQ ID NO: 32953 - protein, 286 aa, Neisseria meningitidis; identical to SEQ ID NO: 19802

SEQ ID NO: 32954 - protein, 174 aa, Neisseria meningitidis; identical to SEQ ID NO: 3281

SEQ ID NO: 32955 - protein, 192 aa, Neisseria meningitidis; identical to SEQ ID NO: 18256

SEQ ID NO: 32956 - protein, 444 aa, Neisseria meningitidis
VGEPENKSSEPVREIQASKEMPSETSSPRKENETEVHIPAAPFIVKQSGSNALAVCALVLAALGLGTSGFLFVQGQNVLKNQELAFNQKIDKAALGESENAALLKDNLNRQAAIQSELDRLDGNVKANGEQILEMQKSYRELTKGRADWLVDETETILNLAAQQLVLTGNIQTAVGVLEHIDSRLSRFNQAELLPIKQAVSSDLAELKNRPYVDISGTALRLDRLEIAVSGLPLILDGVLKPSVQARNEAVSASWWQNVWEKSLGTLKGLVEIRRLENNDAMLISPEQAYFVRENLRLRLLDARTALMQRNSEVYQGDLNNAETAVRQYFDAKSPATQSWLKELAELKALDVRMTADDGLKNSLNAVRAYRDGTRMTTAENQEAEQATSEPANENTASEPAAASDVKTIEAPSLPSERKPEQPAKKQPVPEKAGRSPSAKGERA

SEQ ID NO: 32957 - protein, 426 aa, Neisseria meningitidis; identical to SEQ ID NO: 85

SEQ ID NO: 32958 - protein, 423 aa, Neisseria meningitidis; identical to SEQ ID NO: 18241

SEQ ID NO: 32959 - protein, 350 aa, Neisseria meningitidis; identical to SEQ ID NO: 16166

SEQ ID NO: 32960 - protein, 339 aa, Neisseria meningitidis; identical to SEQ ID NO: 18070

SEQ ID NO: 32961 - protein, 437 aa, Neisseria meningitidis; identical to SEQ ID NO: 24759

SEQ ID NO: 32962 - protein, 591 aa, Neisseria meningitidis; identical to SEQ ID NO: 15053

SEQ ID NO: 32963 - protein, 581 aa, Neisseria meningitidis; identical to SEQ ID NO: 2972

SEQ ID NO: 32964 - protein, 273 aa, Neisseria meningitidis; identical to SEQ ID NO: 221

SEQ ID NO: 32965 - protein, 241 aa, Neisseria meningitidis; identical to SEQ ID NO: 18462

SEQ ID NO: 32966 - protein, 313 aa, Neisseria meningitidis; identical to SEQ ID NO: 18749

SEQ ID NO: 32967 - protein, 765 aa, Neisseria meningitidis; identical to SEQ ID NO: 24693

SEQ ID NO: 32968 - protein, 349 aa, Neisseria meningitidis; identical to SEQ ID NO: 18430

SEQ ID NO: 32969 - protein, 60 aa, Neisseria meningitidis
LEMFDGEVEADESYFGGQRKGKRGRGAAGKVAVFGLLKRNGKVYTVTVPNSNRYFISYYP

SEQ ID NO: 32970 - protein, 702 aa, Neisseria meningitidis; identical to SEQ ID NO: 25960

SEQ ID NO: 32971 - protein, 527 aa, Neisseria meningitidis
LGTIATSVFQVGKAMDGRRWAVWGAFALLPSAFLAVMVVAPLWAVAAYDGLAWRAVLSDAYMLKRLAWTVFQAAATCVLVLPLGVPVAWVLARLAFPGRALVLRLLMLPFVMPTLVAGVGVLALFGADGLLWRGRQDTPYLLLYGNVFFNLPVLVRAAYQGFVQVPAARLQTARTLGAGAWRRFWDIEMPVLRPWLAGGVCLVFLYCFSGFGLALLLGGSRYATVEVEIYQLVMFELDMAVASVLVWLVLGVTAAAGLLYAWFGRRAVSDKAVSPVMPSPPQSVGEYVLLAFAAEVLSVCCLFPLLAIVVKAWSAGESWRVLMESETWQAVWNTLRFSAAAVFAAAVLGVVYAAAARRSAWMRGLMFLPFMVSPVCVSAGVLLLYPQWTASLPLLLAMYALLAYPFVAKDVLSAWDALPPDYGRAAAGLGANGFQTACRITFPLLKPALRRGLTLAAATCVGEFAATLFLSRPEWQTLTTLIYAYLGRAGEDNYARAMVLTLLLSAFALGIFLLLDNGEGGKQTETL

SEQ ID NO: 32972 - protein, 163 aa, Neisseria meningitidis; identical to SEQ ID NO: 2563

SEQ ID NO: 32973 - protein, 167 aa, Neisseria meningitidis; identical to SEQ ID NO: 189

SEQ ID NO: 32974 - protein, 57 aa, Neisseria meningitidis; identical to SEQ ID NO: 6070

SEQ ID NO: 32975 - protein, 128 aa, Neisseria meningitidis; identical to SEQ ID NO: 1074

SEQ ID NO: 32976 - protein, 290 aa, Neisseria meningitidis; identical to SEQ ID NO: 10998

SEQ ID NO: 32977 - protein, 259 aa, Neisseria meningitidis; identical to SEQ ID NO: 25190

SEQ ID NO: 32978 - protein, 65 aa, Neisseria meningitidis; identical to SEQ ID NO: 981

SEQ ID NO: 32979 - protein, 100 aa, Neisseria meningitidis; identical to SEQ ID NO: 1023

SEQ ID NO: 32980 - protein, 395 aa, Neisseria meningitidis; identical to SEQ ID NO: 18316

SEQ ID NO: 32981 - protein, 144 aa, Neisseria meningitidis; identical to SEQ ID NO: 19736

SEQ ID NO: 32982 - protein, 234 aa, Neisseria meningitidis; identical to SEQ ID NO: 1195

SEQ ID NO: 32983 - protein, 201 aa, Neisseria meningitidis; identical to SEQ ID NO: 24910

SEQ ID NO: 32984 - protein, 169 aa, Neisseria meningitidis; identical to SEQ ID NO: 219

SEQ ID NO: 32985 - protein, 192 aa, Neisseria meningitidis; identical to SEQ ID NO: 746

SEQ ID NO: 32986 - protein, 232 aa, Neisseria meningitidis; identical to SEQ ID NO: 24621

SEQ ID NO: 32987 - protein, 54 aa, Neisseria meningitidis
MAEKLGHKVLPLAPYSPELNPIEKVWANIKRYLRTVLSDYARFDDALLSYFDFN

SEQ ID NO: 32988 - protein, 186 aa, Neisseria meningitidis; identical to SEQ ID NO: 1480

SEQ ID NO: 32989 - protein, 394 aa, Neisseria meningitidis; identical to SEQ ID NO: 277

SEQ ID NO: 32990 - protein, 242 aa, Neisseria meningitidis; identical to SEQ ID NO: 4670

SEQ ID NO: 32991 - protein, 169 aa, Neisseria meningitidis; identical to SEQ ID NO: 18087

SEQ ID NO: 32992 - protein, 355 aa, Neisseria meningitidis; identical to SEQ ID NO: 19392

SEQ ID NO: 32993 - protein, 227 aa, Neisseria meningitidis; identical to SEQ ID NO: 2905

SEQ ID NO: 32994 - protein, 65 aa, Neisseria meningitidis; identical to SEQ ID NO: 1389

SEQ ID NO: 32995 - protein, 310 aa, Neisseria meningitidis
MYEIKQPFHSGYLQVSEIHQIYWEESGNPDGVPVIFLHGGPGAGASPECRGFFNPDVFRIVIIDQRGCGRSRPYACAEDNTTWDLVADIEKVREMLGIGKWLVFGGSWGSTLSLAYAQTHPERVKGLVLRGIFLCRPSETAWLNEAGGVSRIYPEQWQKFVAPIAENRRNRLIEAYHGLLFHQDEEVCLSAAKAWADWESYLIRFEPEEVDEDAYASLAIARLENHYFVNGGWLQGDRAILNNIGKIRNIPTIIVQGRYDLCTPMQSAWALSKAFPEAELRVVQAGHRAFDPPLADALVQAVEDILPRLL

SEQ ID NO: 32996 - protein, 127 aa, Neisseria meningitidis; identical to SEQ ID NO: 22161

SEQ ID NO: 32997 - protein, 220 aa, Neisseria meningitidis; identical to SEQ ID NO: 24227

SEQ ID NO: 32998 - protein, 384 aa, Neisseria meningitidis; identical to SEQ ID NO: 3177

SEQ ID NO: 32999 - protein, 319 aa, Neisseria meningitidis; identical to SEQ ID NO: 18435

SEQ ID NO: 33000 - protein, 143 aa, Neisseria meningitidis; identical to SEQ ID NO: 4713

SEQ ID NO: 33001 - protein, 263 aa, Neisseria meningitidis; identical to SEQ ID NO: 24639

SEQ ID NO: 33002 - protein, 183 aa, Neisseria meningitidis; identical to SEQ ID NO: 19567

SEQ ID NO: 33003 - protein, 221 aa, Neisseria meningitidis
VQADLTYAAERITHNYPEATGADKGKISTVSDYFKNIRTHSVQPRLSLGYDFGNWRIAADYTRYRKWNESNSSTKKVTERINDNNKETKTEHQENGSFHAASSLGLSAIYDFQISDKFKPYIGARVAYGHVKHQVNSVNKETITVTPVASGGPVITGPTSKPAYHESHSIRRLGLGVIAGVGFDITSNLTLDAGYRYHNWGRLENTRFKTHEASLGVRYRF

SEQ ID NO: 33004 - protein, 321 aa, Neisseria meningitidis; identical to SEQ ID NO: 24628

SEQ ID NO: 33005 - protein, 642 aa, Neisseria meningitidis; identical to SEQ ID NO: 19246

SEQ ID NO: 33006 - protein, 274 aa, Neisseria meningitidis; identical to SEQ ID NO: 5218

SEQ ID NO: 33007 - protein, 311 aa, Neisseria meningitidis; identical to SEQ ID NO: 5677

SEQ ID NO: 33008 - protein, 143 aa, Neisseria meningitidis; identical to SEQ ID NO: 28

SEQ ID NO: 33009 - protein, 437 aa, Neisseria meningitidis; identical to SEQ ID NO: 1149

SEQ ID NO: 33010 - protein, 269 aa, Neisseria meningitidis; identical to SEQ ID NO: 24629

SEQ ID NO: 33011 - protein, 166 aa, Neisseria meningitidis; identical to SEQ ID NO: 1498

SEQ ID NO: 33012 - protein, 129 aa, Neisseria meningitidis; identical to SEQ ID NO: 14100

SEQ ID NO: 33013 - protein, 716 aa, Neisseria meningitidis
MKTPLLKPLLITSLPVFASVFTAASIVWQLGEPKLAMPFVLGIIAGGLVDLDNRLTGRLKNIIATVALFTLSSLTAQSTLGTGLPFILAMTLMTFGFTILGAVGLKYRTFAFGALAVATYTTLTYTPETYWLTNPFMILCGTVLYSTAIILFQIILPHRPVQESVANAYDALGGYLEAKADFFDPDEAAWIGNRHIDLAMSNTGVITAFNQCRSALFYRLRGKHRHPRTAKMLRYYFAAQDIHERISSAHVDYQEMSEKFKNTDIIFRIHRLLEMQGQACRNTAQALRASKDYVYSKRLGRAIEGCRQSLRLLYDGNDSPDIRHLRRLLDNLGSVDQQFRQLQHNGLQAENDRMGDTRIAALETGSLKNTWQAIRPQLNLESGVFRHAVRLSLVVAAACTIVEALNLNLGYWILLTALFVCQPNYTATKSRVRQRIAGTVLGVIVGSLVPYFTPSVETKLWIVIASTTLFFMTRTYKYSFSTFFITIQALTSLSLAGLDVYAAMPVRIIDTIIGASLAWAAVSYLWPDWKYLTLERTAALAVCSNGAYLEKITERLKSGETGDDVEYRATRRRAHEHTAALSSTLSDMSSEPAKFADSLQPGFTLLKTGYALTGYISALGAYRSEMHEECSPDFTAQFHLAAEHTAHIFQHLPETEPDDFQTALDTLRGELDTLRTHSSGTQSHILLQQLQLIARQLEPYYRAYRQIPHRQPQNAA

SEQ ID NO: 33014 - protein, 239 aa, Neisseria meningitidis; identical to SEQ ID NO: 24333

SEQ ID NO: 33015 - protein, 158 aa, Neisseria meningitidis; identical to SEQ ID NO: 6684

SEQ ID NO: 33016 - protein, 94 aa, Neisseria meningitidis; identical to SEQ ID NO: 23891

SEQ ID NO: 33017 - protein, 255 aa, Neisseria meningitidis; identical to SEQ ID NO: 3233

SEQ ID NO: 33018 - protein, 59 aa, Neisseria meningitidis
MPSEALSDGICILRQNEHTPHPALPLRIRHKLRPLQNSFPSRQPKPKHRFSAVFAPNTS

SEQ ID NO: 33019 - protein, 508 aa, Neisseria meningitidis; identical to SEQ ID NO: 9065

SEQ ID NO: 33020 - protein, 193 aa, Neisseria meningitidis
MKIRWRYGIAFPLILAVALGSLSAWLGRISEVEIEEVRLNPDEPQYTMDGLDGRRFDEQGYLKEHLSAKGAKQFPESSDIHFDSPHLVFFQEGRLLYEVGSDEAVYHTENKQVLFKNNVVLTKTADGKRQAGKVEAEKLHVDTESQYAQTDTPVSFQYGASHGQAGGMTYDHKTGMLNFSSKVKATIYDTKDM

SEQ ID NO: 33021 - protein, 308 aa, Neisseria meningitidis; identical to SEQ ID NO: 18204

SEQ ID NO: 33022 - protein, 289 aa, Neisseria meningitidis; identical to SEQ ID NO: 2681

SEQ ID NO: 33023 - protein, 144 aa, Neisseria meningitidis; identical to SEQ ID NO: 5717

SEQ ID NO: 33024 - protein, 445 aa, Neisseria meningitidis; identical to SEQ ID NO: 18905

SEQ ID NO: 33025 - protein, 258 aa, Neisseria meningitidis; identical to SEQ ID NO: 25851

SEQ ID NO: 33026 - protein, 59 aa, Neisseria meningitidis; identical to SEQ ID NO: 642

SEQ ID NO: 33027 - protein, 104 aa, Neisseria meningitidis
MKLIYTVIKIIILLLFLLLAVINTDAVTFSYLPGQKFDLPLIVVLFGAFVVGIVFGMFALFGRLLSLRGENGRLRAEVKKNARLTGKELTAPPAQNAPESAKQP

SEQ ID NO: 33028 - protein, 309 aa, Neisseria meningitidis; identical to SEQ ID NO: 9408

SEQ ID NO: 33029 - protein, 186 aa, Neisseria meningitidis; identical to SEQ ID NO: 24825

SEQ ID NO: 33030 - protein, 281 aa, Neisseria meningitidis
MNKFSQSGKGLSGFFFGLILATVIIAGILFYLNQSGQNAFKIPVPSKQPAETEILKPKNQPKEDIQPEPADQNALSEPDAATEAEQSDAEKAADKADEVEEKAGEPEREEPDGQAVRKKVLTEEREQTVREKAQKKDAETVKKQAVKPSKETEKKAPKEEKKAEKEKVAPKPTPEQILNSGSIEKARSAAAKEVQKMKTSDKAEATHYLQMGAYADRRSAEGQRVKLAILGISSKVVGYQAGHKTLYRVQSGNMSADAVKKMQDELKKHEVASLIRSIESK

SEQ ID NO: 33031 - protein, 198 aa, Neisseria meningitidis; identical to SEQ ID NO: 6940

SEQ ID NO: 33032 - protein, 68 aa, Neisseria meningitidis; identical to SEQ ID NO: 531

SEQ ID NO: 33033 - protein, 129 aa, Neisseria meningitidis; identical to SEQ ID NO: 1031

SEQ ID NO: 33034 - protein, 233 aa, Neisseria meningitidis; identical to SEQ ID NO: 25609

SEQ ID NO: 33035 - protein, 312 aa, Neisseria meningitidis; identical to SEQ ID NO: 1570

SEQ ID NO: 33036 - protein, 139 aa, Neisseria meningitidis
LAEGQKSAVTEYYLNHGEWPGDNSSAGVASSTDIKGKYVAGVKVEKGVITATMASSNVNNEIKDKKLSLWAKRQDGSVKWFCGQPVARANANGANNDEVTAANGKGTANIDTKHLPSTCRDASSAVCIETPPTAFYKNT

SEQ ID NO: 33037 - protein, 928 aa, Neisseria meningitidis; identical to SEQ ID NO: 25077

SEQ ID NO: 33038 - protein, 383 aa, Neisseria meningitidis; identical to SEQ ID NO: 19587

SEQ ID NO: 33039 - protein, 154 aa, Neisseria meningitidis; identical to SEQ ID NO: 18643

SEQ ID NO: 33040 - protein, 103 aa, Neisseria meningitidis; identical to SEQ ID NO: 4598

SEQ ID NO: 33041 - protein, 370 aa, Neisseria meningitidis
MSTFFQQTAQAMIARHIDRFPLLKLDQVIDWQPIEQYLNRQKTRYLRDHRGRPACPLLSMFKAVLLGQWHNLSDPELEHSLITRIDFNLFCRFDELSIPDYSTLCRYRNWLAQDDTLSELLELINCQLTEKGLKVEKASAAVIDATIIQTAGSEQRQAIEVDEEGQVSGQTTLSKDKNARWTKKNSLYKLGYKQHTRTDAEGYIEKLYITPTNAHECTHLSPLLEGLPKGTTVYADKGYDSKENRQHLKEHRLQNGIMRKACRNRPLTETQTKRNRYLSKTRYSGLNLNQDKATKPQTVQIVRQGEATPYWFKFNPLYVVEQSFGTLHRKFRYARAAYFGLSKVSAQSHLKAMCLNLLKAANRLSAPAAA

SEQ ID NO: 33042 - protein, 469 aa, Neisseria meningitidis; identical to SEQ ID NO: 19069

SEQ ID NO: 33043 - protein, 500 aa, Neisseria meningitidis; identical to SEQ ID NO: 3049

SEQ ID NO: 33044 - protein, 259 aa, Neisseria meningitidis; identical to SEQ ID NO: 6563

SEQ ID NO: 33045 - protein, 469 aa, Neisseria meningitidis
MTAQTLYDKLWNSHVVREEEDGTVLLYIDRHLVHEVTSPQAFEGLKMAGRKLWRIDSVVSTADHNTPTGDWDKGIQDPISKLQVDTLDKNIKEFGALAYFPFMDKGQGIVHVMGPEQGATLPGMTVVCGDSHTSTHGAFGALAHGIGTSEVEHTMATQCITAKKSKSMLIAVDGKLKAGVTAKDVALYIIGQIGTAGGTGYAIEFGGEAIRSLSMESRMTLCNMAIEAGARSGMVAVDQTTIDYVKDKPFAPEGEAWDKAVEYWRTLVSDEGAVFDKEYRFNAEDIEPQVTWGTSPEMVLDISSKVPNPAEETDPVKRSGMERALEYMGLEAGTPLNEIPVDIVFIGSCTNSRIEDLREAAAIAKDRKKAANVQRVLIVPGSGLVKEQAEKEGLDKIFIEAGFEWREPGCSMCLAMNADRLTPGQRCASTSNRNFEGRQGNGGRTHLVSPAMAAAAAVTGRFTDIRMMA

SEQ ID NO: 33046 - protein, 268 aa, Neisseria meningitidis; identical to SEQ ID NO: 3556

SEQ ID NO: 33047 - protein, 163 aa, Neisseria meningitidis; identical to SEQ ID NO: 24545

SEQ ID NO: 33048 - protein, 796 aa, Neisseria meningitidis; identical to SEQ ID NO: 25312

SEQ ID NO: 33049 - protein, 176 aa, Neisseria meningitidis; identical to SEQ ID NO: 3131

SEQ ID NO: 33050 - protein, 687 aa, Neisseria meningitidis
MMTQTLLIELLTEELPPKALNNLGNHFAASVAEGLEKAQLIAGAAEFTAYASPRRLAVQVKNVKAVQADQKIVKKGPAVANAVKDGAPTKALEGFARGAGAKIEDLTIVHDGKQDVYAYEYVQTGKPLGGLLEDIINAAVKKLPIPKVMRWGSSTFTFVRPVHGLIVLHGGDIVNVSVLGLQSSNQTLGHRFLSNGEITIENADSYAAQMREQGKVVASFAERKAAIQTALEGQARRLNATVAADEALLDEVTALVEYPVVLEAGFEEHFLAVPQECLILTMQQNQKYFPLLDQNGKLMNRFLLVSNLQTEDPSHIIRGNERVLRARLSDAEFFYKQDQKATLESRLPKLANVVYHNKIGSQAERIERLQSIAAHIAKALGADAAAAERAARLAKADLVTEMVGEFPELQGTMGKYYARLDGETEEIAEAVEQHYQPRFAGDKLPESKIATAVALADKLETLVGIWGIGLIPTGDKDPYALRRAALGILRMLMQYGLDVNELIQTAFDSFPKGLLNEKTPSETADFMQARLAVLLQNDYPQDIVAAVLAKQPRRLDDVVAKLQAVAAFKQLPEAAALAAANKRVQNLLKKADAELGAVNESLLQQDEEKALFAAAQGLQPKIAAAVAEGNFQTALSELASVKPQVDAFFDGVMVMAEDAAVKQNRLNLLNRLAEQMNAVADIALLGE

SEQ ID NO: 33051 - protein, 161 aa, Neisseria meningitidis; identical to SEQ ID NO: 3482

SEQ ID NO: 33052 - protein, 49 aa, Neisseria meningitidis; identical to SEQ ID NO: 5144

SEQ ID NO: 33053 - protein, 421 aa, Neisseria meningitidis; identical to SEQ ID NO: 4874

SEQ ID NO: 33054 - protein, 129 aa, Neisseria meningitidis; identical to SEQ ID NO: 25813

SEQ ID NO: 33055 - protein, 157 aa, Neisseria meningitidis; identical to SEQ ID NO: 140

SEQ ID NO: 33056 - protein, 161 aa, Neisseria meningitidis; identical to SEQ ID NO: 25806

SEQ ID NO: 33057 - protein, 172 aa, Neisseria meningitidis; identical to SEQ ID NO: 2773

SEQ ID NO: 33058 - protein, 242 aa, Neisseria meningitidis; identical to SEQ ID NO: 24854

SEQ ID NO: 33059 - protein, 194 aa, Neisseria meningitidis; identical to SEQ ID NO: 15809

SEQ ID NO: 33060 - protein, 158 aa, Neisseria meningitidis; identical to SEQ ID NO: 19791

SEQ ID NO: 33061 - protein, 428 aa, Neisseria meningitidis; identical to SEQ ID NO: 24208

SEQ ID NO: 33062 - protein, 752 aa, Neisseria meningitidis; identical to SEQ ID NO: 25314

SEQ ID NO: 33063 - protein, 166 aa, Neisseria meningitidis; identical to SEQ ID NO: 19699

SEQ ID NO: 33064 - protein, 249 aa, Neisseria meningitidis; identical to SEQ ID NO: 131

SEQ ID NO: 33065 - protein, 72 aa, Neisseria meningitidis; identical to SEQ ID NO: 18381

SEQ ID NO: 33066 - protein, 353 aa, Neisseria meningitidis; identical to SEQ ID NO: 19269

SEQ ID NO: 33067 - protein, 852 aa, Neisseria meningitidis; identical to SEQ ID NO: 18475

SEQ ID NO: 33068 - protein, 155 aa, Neisseria meningitidis
MIGVAWYLGANIRFEEQWVLYEALRTTASIIFAVVGVWLAIVYPERLKSPFSQTFSSPVYRRGFKQLFSPVISSIFILSIVLLVGLLAPLLKHIEAIIQYIPLCRKISFSLLASLTMWQIYTVLSVLVPLLNILSKNENDCHASNIINKLKGEQN

SEQ ID NO: 33069 - protein, 107 aa, Neisseria meningitidis; identical to SEQ ID NO: 1793

SEQ ID NO: 33070 - protein, 85 aa, Neisseria meningitidis; identical to SEQ ID NO: 19361

SEQ ID NO: 33071 - protein, 97 aa, Neisseria meningitidis; identical to SEQ ID NO: 910

SEQ ID NO: 33072 - protein, 92 aa, Neisseria meningitidis; identical to SEQ ID NO: 19825

SEQ ID NO: 33073 - protein, 107 aa, Neisseria meningitidis; identical to SEQ ID NO: 4094

SEQ ID NO: 33074 - protein, 166 aa, Neisseria meningitidis; identical to SEQ ID NO: 18838

SEQ ID NO: 33075 - protein, 256 aa, Neisseria meningitidis; identical to SEQ ID NO: 18157

SEQ ID NO: 33076 - protein, 145 aa, Neisseria meningitidis; identical to SEQ ID NO: 1767

SEQ ID NO: 33077 - protein, 436 aa, Neisseria meningitidis; identical to SEQ ID NO: 25179

SEQ ID NO: 33078 - protein, 335 aa, Neisseria meningitidis
MSTFFQQTAQAMIAKHINRFPLLKLDQVIDWQPIEQYLNRQRTRYLRDHRGRPAYPLLSMFKAVLLGQWHSLSDPELEHSLITRIDFNLFCRFDELSIPDYSTLCRYRNWLAQDDTLSELLKLINRQLTEKGLKVEKASAAVIDATIIQTAGSKQRQAIEVDEEGQISGQTTPSKDSDARWIKKNGLYKLGYKQHTRTDAEGYIEKLHITPANAHECKHLPPLLEGLPKGTTVYADKGYDSAENRQHLEERQLLDGIMRKACRNRPLTETQTKHNRYLSKIRYVVEQSFGTLHRKFRYARAAYFGLIKVSAQSHLKAMCLNLLKAANRLSAPAAA

SEQ ID NO: 33079 - protein, 405 aa, Neisseria meningitidis; identical to SEQ ID NO: 13355

SEQ ID NO: 33080 - protein, 485 aa, Neisseria meningitidis; identical to SEQ ID NO: 2552

SEQ ID NO: 33081 - protein, 81 aa, Neisseria meningitidis; identical to SEQ ID NO: 7714

SEQ ID NO: 33082 - protein, 461 aa, Neisseria meningitidis; identical to SEQ ID NO: 24559

SEQ ID NO: 33083 - protein, 327 aa, Neisseria meningitidis; identical to SEQ ID NO: 25917

SEQ ID NO: 33084 - protein, 76 aa, Neisseria meningitidis; identical to SEQ ID NO: 3053

SEQ ID NO: 33085 - protein, 87 aa, Neisseria meningitidis; identical to SEQ ID NO: 1364

SEQ ID NO: 33086 - protein, 389 aa, Neisseria meningitidis; identical to SEQ ID NO: 3056

SEQ ID NO: 33087 - protein, 97 aa, Neisseria meningitidis; identical to SEQ ID NO: 2609

SEQ ID NO: 33088 - protein, 114 aa, Neisseria meningitidis; identical to SEQ ID NO: 565

SEQ ID NO: 33089 - protein, 188 aa, Neisseria meningitidis; identical to SEQ ID NO: 19683

SEQ ID NO: 33090 - protein, 46 aa, Neisseria meningitidis; identical to SEQ ID NO: 18455

SEQ ID NO: 33091 - protein, 169 aa, Neisseria meningitidis; identical to SEQ ID NO: 2049

SEQ ID NO: 33092 - protein, 294 aa, Neisseria meningitidis
MTSIILELQSLAANPNSDVEELVSKTLMVARKLKINELTEWCNNELQGYLSKNLPKYRIFYGELKAFNPYRGDVPFMLPDELRERVTRVEYTSSISEIRNLLKTKNNNFIRILSSKEKQFLMNLQDTPFPLEPKIIIYPINLMNIQSKVRQLILAWALRLEEEGILGDGIQFTKSKQEKAMSNQFNIQNMQGFIGDIFGGNVQQNIQDGIHIEKENFNKLANFLAKNGIPSAELEDLRNALIEDGQPTDKKFGSKVSAWIGNIITKASTGAIDVSVGTIAGILTNAISKYYGLM

SEQ ID NO: 33093 - protein, 123 aa, Neisseria meningitidis; identical to SEQ ID NO: 25295

SEQ ID NO: 33094 - protein, 287 aa, Neisseria meningitidis; identical to SEQ ID NO: 25611

SEQ ID NO: 33095 - protein, 448 aa, Neisseria meningitidis; identical to SEQ ID NO: 2224

SEQ ID NO: 33096 - protein, 461 aa, Neisseria meningitidis; identical to SEQ ID NO: 4603

SEQ ID NO: 33097 - protein, 139 aa, Neisseria meningitidis; identical to SEQ ID NO: 160

SEQ ID NO: 33098 - protein, 410 aa, Neisseria meningitidis; identical to SEQ ID NO: 446

SEQ ID NO: 33099 - protein, 100 aa, Neisseria meningitidis; identical to SEQ ID NO: 3450

SEQ ID NO: 33100 - protein, 124 aa, Neisseria meningitidis; identical to SEQ ID NO: 215

SEQ ID NO: 33101 - protein, 311 aa, Neisseria meningitidis; identical to SEQ ID NO: 19942

SEQ ID NO: 33102 - protein, 480 aa, Neisseria meningitidis; identical to SEQ ID NO: 3699

SEQ ID NO: 33103 - protein, 314 aa, Neisseria meningitidis; identical to SEQ ID NO: 1612

SEQ ID NO: 33104 - protein, 759 aa, Neisseria meningitidis; identical to SEQ ID NO: 18665

SEQ ID NO: 33105 - protein, 63 aa, Neisseria meningitidis; identical to SEQ ID NO: 5865

SEQ ID NO: 33106 - protein, 490 aa, Neisseria meningitidis; identical to SEQ ID NO: 18335

SEQ ID NO: 33107 - protein, 106 aa, Neisseria meningitidis; identical to SEQ ID NO: 853

SEQ ID NO: 33108 - protein, 213 aa, Neisseria meningitidis; identical to SEQ ID NO: 24494

SEQ ID NO: 33109 - protein, 218 aa, Neisseria meningitidis; identical to SEQ ID NO: 19582

SEQ ID NO: 33110 - protein, 331 aa, Neisseria meningitidis; identical to SEQ ID NO: 25084

SEQ ID NO: 33111 - protein, 154 aa, Neisseria meningitidis; identical to SEQ ID NO: 4442

SEQ ID NO: 33112 - protein, 138 aa, Neisseria meningitidis; identical to SEQ ID NO: 489

SEQ ID NO: 33113 - protein, 488 aa, Neisseria meningitidis; identical to SEQ ID NO: 7364

SEQ ID NO: 33114 - protein, 215 aa, Neisseria meningitidis; identical to SEQ ID NO: 2727

SEQ ID NO: 33115 - protein, 64 aa, Neisseria meningitidis; identical to SEQ ID NO: 2003

SEQ ID NO: 33116 - protein, 288 aa, Neisseria meningitidis; identical to SEQ ID NO: 18304

SEQ ID NO: 33117 - protein, 107 aa, Neisseria meningitidis
LVEGQKSAVTEYYLNHGEWPANNSSAGVATSASDIKGKYVQSVEVKNGVITATMLSSGVNNEIKGKKLSLWATRQDGSVKWFCGQPVTRDAATDKKIDTKLEKPFSR

SEQ ID NO: 33118 - protein, 492 aa, Neisseria meningitidis; identical to SEQ ID NO: 19231

SEQ ID NO: 33119 - protein, 113 aa, Neisseria meningitidis; identical to SEQ ID NO: 1729

SEQ ID NO: 33120 - protein, 370 aa, Neisseria meningitidis; identical to SEQ ID NO: 1989

SEQ ID NO: 33121 - protein, 73 aa, Neisseria meningitidis; identical to SEQ ID NO: 227

SEQ ID NO: 33122 - protein, 309 aa, Neisseria meningitidis; identical to SEQ ID NO: 24667

SEQ ID NO: 33123 - protein, 79 aa, Neisseria meningitidis; identical to SEQ ID NO: 3404

SEQ ID NO: 33124 - protein, 257 aa, Neisseria meningitidis; identical to SEQ ID NO: 18793

SEQ ID NO: 33125 - protein, 217 aa, Neisseria meningitidis; identical to SEQ ID NO: 10605

SEQ ID NO: 33126 - protein, 251 aa, Neisseria meningitidis; identical to SEQ ID NO: 15704

SEQ ID NO: 33127 - protein, 433 aa, Neisseria meningitidis
MPSETARPLYADTCAAHTLVWFRQNLRIRDNAALCTAVAEGLPVIGIWIDDAETDNPRRAAFYRQSAAELAQGLAGRGIPLYTAASPAELVRLAVRLNIRAVIADESHTFADKLADNALWHELDKHGIALTFVNDRAVFGKTDLIPDGGTAHTDFDRYREVWLDRFSKQPPAGPDLFAAYRQPFPENLSAPPPAALSDGIFLPQNSGETAAWRQWRRFLEQADSYSVLKDFPSRKHTSLMGAYLSAGCISPRLLARESLERRLNAWADNIIRRDFFLQLALQHTDDDPSDGNPEHTLRLTLWQQGQTGIPIIDAAMRCLHKTGSLHPALRRLSADFFCHVLNLPRREGEIWFARQLTDFDAAINQGNWWLAASRHTCPDIAAASYRTDPDGTFIKRHIPELAHLSADTVHTPWRFACSVDTHGYPAYPVAGIP

SEQ ID NO: 33128 - protein, 582 aa, Neisseria meningitidis; identical to SEQ ID NO: 18200

SEQ ID NO: 33129 - protein, 242 aa, Neisseria meningitidis
MGGKMSDKKYNVDEGEIAKFSRIADKWWDKSGEFKTLHDINPLRLDYIDGHADLCGKRVLDVGCGGGILAESMARRGAAFVKGIDMAEQSLETARLHAALNNVADIEYECIRVEDLAEAEPHSFDVVTCMEMMEHVPDPAAIVRACAKLVKPDGMVFFSTINKNPKSYLHLIVAAEYLLKFVPKGTHDWKKFIAPAELARMCRQAGLDVADTKGMTYHVLSQTYALCDSTDVNYMFACRPAF

SEQ ID NO: 33130 - protein, 76 aa, Neisseria meningitidis; identical to SEQ ID NO: 3053

SEQ ID NO: 33131 - protein, 170 aa, Neisseria meningitidis; identical to SEQ ID NO: 1571

SEQ ID NO: 33132 - protein, 336 aa, Neisseria meningitidis; identical to SEQ ID NO: 19047

SEQ ID NO: 33133 - protein, 116 aa, Neisseria meningitidis
MENVMKKIEAIVKPFKLDDVREALTEIGITGMTVSEVKGFGRQKGHTEIYRGAEYAVDFLPKVKIELVLADDAVERAIDVIVEVARSGKIGDGKIFVLPVEEAIRIRTGERADAAV

SEQ ID NO: 33134 - protein, 68 aa, Neisseria meningitidis; identical to SEQ ID NO: 4044

SEQ ID NO: 33135 - protein, 193 aa, Neisseria meningitidis; identical to SEQ ID NO: 1322

SEQ ID NO: 33136 - protein, 279 aa, Neisseria meningitidis; identical to SEQ ID NO: 8587

SEQ ID NO: 33137 - protein, 389 aa, Neisseria meningitidis; identical to SEQ ID NO: 25888

SEQ ID NO: 33138 - protein, 105 aa, Neisseria meningitidis; identical to SEQ ID NO: 18770

SEQ ID NO: 33139 - protein, 418 aa, Neisseria meningitidis; identical to SEQ ID NO: 19761

SEQ ID NO: 33140 - protein, 251 aa, Neisseria meningitidis; identical to SEQ ID NO: 4289

SEQ ID NO: 33141 - protein, 166 aa, Neisseria meningitidis; identical to SEQ ID NO: 1240

SEQ ID NO: 33142 - protein, 291 aa, Neisseria meningitidis; identical to SEQ ID NO: 18636

SEQ ID NO: 33143 - protein, 154 aa, Neisseria meningitidis; identical to SEQ ID NO: 1226

SEQ ID NO: 33144 - protein, 289 aa, Neisseria meningitidis
MKPIKKAVFPVAGMGTRFLPATKASPKEMLPIVDKPLIQYAVEEAVEAGCTEMVFVTGRNKRSIEDHFDKAYELETELEMRHKDKLLEHVRNILPPNITCLYIRQAEALGLGHAVLCARAAIGDEPFAVILADDLIDAPKGALKQMVEVYGRSGNSILGVETVEASQTGSYGIVETEQLKQFQRIIGIVEKPKPEDAPSNLAVVGRYILTPRIFDLLTGLPRGAGNEIQLTDGIAKLLDHEFVLAHPFEGTRYDCGSKLGYLEATVAYGLKHPETGEPFRRLLEKYRTE

SEQ ID NO: 33145 - protein, 107 aa, Neisseria meningitidis; identical to SEQ ID NO: 2524

SEQ ID NO: 33146 - protein, 107 aa, Neisseria meningitidis; identical to SEQ ID NO: 2467

SEQ ID NO: 33147 - protein, 478 aa, Neisseria meningitidis; identical to SEQ ID NO: 9742

SEQ ID NO: 33148 - protein, 408 aa, Neisseria meningitidis; identical to SEQ ID NO: 19585

SEQ ID NO: 33149 - protein, 1389 aa, Neisseria meningitidis; identical to SEQ ID NO: 25589

SEQ ID NO: 33150 - protein, 79 aa, Neisseria meningitidis; identical to SEQ ID NO: 1083

SEQ ID NO: 33151 - protein, 158 aa, Neisseria meningitidis; identical to SEQ ID NO: 2965

SEQ ID NO: 33152 - protein, 528 aa, Neisseria meningitidis; identical to SEQ ID NO: 24881

SEQ ID NO: 33153 - protein, 761 aa, Neisseria meningitidis; identical to SEQ ID NO: 19322

SEQ ID NO: 33154 - protein, 153 aa, Neisseria meningitidis; identical to SEQ ID NO: 19769

SEQ ID NO: 33155 - protein, 729 aa, Neisseria meningitidis
MIYHRIAVNVPLSDGLLTYSHSEPLPQGMRVLVPFRNKTVVGMVWETDIAPDMDTARILSIQTTFLDEPPLPESWRDLLSFTSRYYHYPTGQAVFAALPQGLKETRAVEMPQPPLFYALNEAGRAQTPPPARFNKKAALWDALLSGEMTMAALKQVNAQAVKLIENWAEQGWIETTEAAKPVLRSCNGQASHSEFVLNADQQKASDAIQTALGRFQPFLLYGITGSGKTEVYFDAMAKVLAQGRQVLFLLPEINLTPQLLKRVENRFADVPTAVLHSQMAAGRRTQDYLRAMLGQAKLVIGTRLAVFTPMDDVGLIVVDEEHDGSFKQDNELRYHARDLAVWRAKQSGCPVVLGSATPSLESWHKVQSGAYRLLQLTERAHTAAQLPQVDILNVGRLKLDNGFSPQALQLLKQNFEAGGMSLVYLNRRGFAPALFCGDCGHTFGCPNCSAKMVLHQRVRQLRCHHCDHREPIPFKCPDCGNQDLTAVGHGTQRVEETLRAFLPKAAVVRVDRDSTAHKNDWADLYRRIADNEIDILVGTQMLAKGHDFARLNLVIVLNADGSLYSADFRAPERLFAELMQVSGRAGRADKPGKVLIQTQLPEHPVFAAVKAQDYAVFAENELNERQMFAMPPFGFQTAVRADAPRVADALEFLNAAKETLAPLLPASVSQFGAAPMLMVRLAERERAQIFLESPSRQDLHRAVSLWVQVLQQNRDGKIRWSVDVDPQEA

SEQ ID NO: 33156 - protein, 264 aa, Neisseria meningitidis; identical to SEQ ID NO: 25301

SEQ ID NO: 33157 - protein, 130 aa, Neisseria meningitidis; identical to SEQ ID NO: 4345

SEQ ID NO: 33158 - protein, 444 aa, Neisseria meningitidis; identical to SEQ ID NO: 2522

SEQ ID NO: 33159 - protein, 100 aa, Neisseria meningitidis; identical to SEQ ID NO: 3450

SEQ ID NO: 33160 - protein, 318 aa, Neisseria meningitidis; identical to SEQ ID NO: 18259

SEQ ID NO: 33161 - protein, 219 aa, Neisseria meningitidis
MKITHCKLKKKVQKELLRFFVLEVTARSAADILGIHPNSAALFYRKIRTVINHHLALAADEVFEGPVEPDESDFGGRRKGRRGRGAAGKVVVFGILKRNGRVYTVVVDNAKSDTLMPVIKQKIMPDSIVYTDSLSSYDKLDVSGFIHYRINHSKEFADRQNHINGIENFWNQAKRVLRKYNGIDCKSFPLFLKECEFRFNFGTPSQQLKILRDWCGIGS

SEQ ID NO: 33162 - protein, 427 aa, Neisseria meningitidis; identical to SEQ ID NO: 24603

SEQ ID NO: 33163 - protein, 156 aa, Neisseria meningitidis; identical to SEQ ID NO: 18642

SEQ ID NO: 33164 - protein, 258 aa, Neisseria meningitidis; identical to SEQ ID NO: 2774

SEQ ID NO: 33165 - protein, 71 aa, Neisseria meningitidis; identical to SEQ ID NO: 1238

SEQ ID NO: 33166 - protein, 47 aa, Neisseria meningitidis
MCKPNRKCEIPSENLSDGIYCLYCRFSSVSGFLFGAEQIGSQIAIEE

SEQ ID NO: 33167 - protein, 864 aa, Neisseria meningitidis; identical to SEQ ID NO: 24816

SEQ ID NO: 33168 - protein, 133 aa, Neisseria meningitidis; identical to SEQ ID NO: 2967

SEQ ID NO: 33169 - protein, 96 aa, Neisseria meningitidis; identical to SEQ ID NO: 4410

SEQ ID NO: 33170 - protein, 390 aa, Neisseria meningitidis; identical to SEQ ID NO: 19414

SEQ ID NO: 33171 - protein, 305 aa, Neisseria meningitidis; identical to SEQ ID NO: 14673

SEQ ID NO: 33172 - protein, 187 aa, Neisseria meningitidis; identical to SEQ ID NO: 9755

SEQ ID NO: 33173 - protein, 135 aa, Neisseria meningitidis; identical to SEQ ID NO: 803

SEQ ID NO: 33174 - protein, 133 aa, Neisseria meningitidis; identical to SEQ ID NO: 6682

SEQ ID NO: 33175 - protein, 156 aa, Neisseria meningitidis; identical to SEQ ID NO: 25826

SEQ ID NO: 33176 - protein, 816 aa, Neisseria meningitidis
VSISAPYANENSRILLSTTDISSENGKIKIQSYGDQYYYARQSELYTFERRSYKTGKWYNRKHITEVKEHKNAKPDAVNLSASQGIDIKSGGSIDAYATAFDAPKGSINIEAGRKLTLYAVEELNYDKLDSQKRRRFLGISYSKAHDTTTQVMKTALPSRVVAESANLQSGWDTKLQGTQFETTLGGATIRAGVGEQARADAKIILEGIKTTIHNETVSSSKSALWQKQAGRGSNIETLQLPSFTGPVAPVLSAPGGYIADIPKGNLKTEIEKLAKQPEYAYLKQLQVAKNINWNQVQLAYDKWDYKQEGMTPAAAAVVVIVVTVLTYGALSAPAAAGTAGAAGAGAGGAAAGTAAGTGVAAGTAATTGVAAGTSAAAITTAAGKAALASLASQAAVSLINNKGDINHTLKELGKSSTVRQAATAAVTAGVLQGISGLNTQAAEAVSKHFHSPAAGKLTANLINSTAAASVHTAINGGSLKDNLGDAALGAIVSTVHGEVASKIKFNLSEDYIAHKIAHAVAGCASAVANKGKCRDGAIGAAVGEMVGETLLDGRDVGKLSPQERQKVIAYSQIIAGSVVALVKGDVNTAANAATVAVENNSLLARRRVNIRWTPRQELEHEYAILEIQAITNQIRRLDPKFNGIAILRTPGEPWTRHDVQTYRQYYNQLRESRGFAVDPIYRIRINNGNEFNRIMSSKYPYNELYVANPKSATGYFRVDSYNPATEEIISRKFTQFSQIQESTGIGYIKEAVRKYSPGAVISNVPSTPTTIRGRKLEGKLILEVPAQVNPIPQSVLRAAQEENVIIRDTTGRIYK

SEQ ID NO: 33177 - protein, 378 aa, Neisseria meningitidis; identical to SEQ ID NO: 19519

SEQ ID NO: 33178 - protein, 266 aa, Neisseria meningitidis; identical to SEQ ID NO: 19024

SEQ ID NO: 33179 - protein, 444 aa, Neisseria meningitidis; identical to SEQ ID NO: 25338

SEQ ID NO: 33180 - protein, 138 aa, Neisseria meningitidis; identical to SEQ ID NO: 15462

SEQ ID NO: 33181 - protein, 124 aa, Neisseria meningitidis; identical to SEQ ID NO: 19700

SEQ ID NO: 33182 - protein, 107 aa, Neisseria meningitidis; identical to SEQ ID NO: 24524

SEQ ID NO: 33183 - protein, 77 aa, Neisseria meningitidis; identical to SEQ ID NO: 14102

SEQ ID NO: 33184 - protein, 502 aa, Neisseria meningitidis; identical to SEQ ID NO: 25168

SEQ ID NO: 33185 - protein, 728 aa, Neisseria meningitidis
LPRCLKQAVRHVMPSETGADAAKPSDGIACPLRPNNNHLWENLMPEQNRILCRELSLLAFNRRVLAQAEDKNVPLLERLRFLCIVSSNLDEFFEVRMAWLKRENKLHPRRRLDNGKMPSETIADVTEAARSLIRHQYDLFNNVLQPELARESIHFYRRRNWTGAQKKWIEDYFDRELLPILTPIGLDPSHPFPRPLNKSLNFAVELDGTDAFGRPSGMAIVQAPRILPRVVPLPSELCGGGHGFVFLSSILHAHVGKLFPGMNVKGCHQFRLTRDSDLNVDEEDVQNLRAAVQNELHDREYGDGVRLEVADTCPARIRDFLLSQFRLTADELYQVKGPVNLVRLNAVPDLVNRPDLKFPPHTPGRLKALGKTASIFDLVRQSPILLHHPYQSFDPVVEMMREAAADPAVLAVKMTIYRTGTRSELVRALMKAALAGKQVTVVVELMARFDEANNVNWAKQLEEAGAHVVYGVFGYKIHAKMALVIRREDGVLKRYAHLGTGNYHQGTSRIYTDFGIITADEQITADVNTLFMEITGLGKPGRLNKLYQSPFTLHKMVIGRIRQETEHAKAGKPARITAKMNSLIEPTVIEALYRASAAGVQIDLIVRGMCTLRPGVKGLSENIRVRSIVGRQLEHARVYCFHNNGADDTFISSADWMGRNFFRRIETAAPITAPELKKRVIREGLEMALADNTHAWLMQPDGGYIRAAPAEGESEADLQNDLWTLLGG

SEQ ID NO: 33186 - protein, 81 aa, Neisseria meningitidis; identical to SEQ ID NO: 1361

SEQ ID NO: 33187 - protein, 351 aa, Neisseria meningitidis; identical to SEQ ID NO: 15425

SEQ ID NO: 33188 - protein, 124 aa, Neisseria meningitidis; identical to SEQ ID NO: 10071

SEQ ID NO: 33189 - protein, 633 aa, Neisseria meningitidis; identical to SEQ ID NO: 24207

SEQ ID NO: 33190 - protein, 336 aa, Neisseria meningitidis; identical to SEQ ID NO: 25612

SEQ ID NO: 33191 - protein, 459 aa, Neisseria meningitidis
MQHLTERMTQIAKLLNSSANNPDIDIPDFLTEIKDYSEFSVTDENGTYLHWDKFRQIHTEDTRMKWRAVKESRKKIQKPIDFPFEHQFWFCIPDSLQARLHLIDKSCGSSIGTSSLGGFGRSEQNRFLLKSLIMEEAITSAQLEGAATTRKVAKDMLKSQRKPKTKDEIMIVNNYHLMKKAVELKNTPLSVEMILDLHRIATSNAIENKADPGQFRRDDEIFIADNDGNSLYQPPPHGQVHTLMEAVCTFANNTYDGVENPFIHPVVQAIILHFLIGYIHPFGDGNGRIARALFYWFMLKNSYWLFEYISISRLLKNAPAQYAKSYLYAETDDSDLTYFIYYQCDIIKRAVADLEHYISDKQKHQQEFKAAIAQYTEKIGKLNQRQIGILQKAVEESGKIFTALEIANQYGISLNTARSDLSKLGEYRFLVPFKSGNALEYVAPQDLLERLEKKNSLLA

SEQ ID NO: 33192 - protein, 208 aa, Neisseria meningitidis; identical to SEQ ID NO: 24661

SEQ ID NO: 33193 - protein, 277 aa, Neisseria meningitidis; identical to SEQ ID NO: 18591

SEQ ID NO: 33194 - protein, 154 aa, Neisseria meningitidis; identical to SEQ ID NO: 6562

SEQ ID NO: 33195 - protein, 208 aa, Neisseria meningitidis; identical to SEQ ID NO: 25993

SEQ ID NO: 33196 - protein, 252 aa, Neisseria meningitidis; identical to SEQ ID NO: 25815

SEQ ID NO: 33197 - protein, 324 aa, Neisseria meningitidis
MTEYPGIGSPLFYGVFFAAVLVMIALDMFSLKKNGSHKVGIKEALAWSGLWVAVSCLFAGWLYFELAGNPGYGAAVAKEKVLEFFTGYILEKSLAVDNIFVFLMIFGYFKVAPQFQHRVLLYGVLGALVLRTVMIFVGAALVRQFEWILYLFGAFLLYTGIHMMKPKGDEKEDLANSRLLNAVKKVVPVGTEFHGEKFFTVENGKKIATPLFLVLVMIELSDVVFAVDSIPAVFAVTTDPFIVLTSNIFAILGLRAMYFLLADVAERFIFLKYGLAFVLSFIGVKMLVMHWVHIPISVSLSVVFGALGASILTSLIYTKKQPDK

SEQ ID NO: 33198 - protein, 630 aa, Neisseria meningitidis; identical to SEQ ID NO: 24215

SEQ ID NO: 33199 - protein, 201 aa, Neisseria meningitidis; identical to SEQ ID NO: 15193

SEQ ID NO: 33200 - protein, 88 aa, Neisseria meningitidis
LPSRSALKTAALAGLPSGKLFATCLIKEFYRHIQMAKTLKAETYFYRPYHSWEKGLNENTNGLIRQYSPNKPFSETSAIGRYVGFKMS

SEQ ID NO: 33201 - protein, 704 aa, Neisseria meningitidis; identical to SEQ ID NO: 25632

SEQ ID NO: 33202 - protein, 212 aa, Neisseria meningitidis; identical to SEQ ID NO: 18573

SEQ ID NO: 33203 - protein, 413 aa, Neisseria meningitidis; identical to SEQ ID NO: 963

SEQ ID NO: 33204 - protein, 443 aa, Neisseria meningitidis; identical to SEQ ID NO: 18835

SEQ ID NO: 33205 - protein, 246 aa, Neisseria meningitidis; identical to SEQ ID NO: 18931

SEQ ID NO: 33206 - protein, 231 aa, Neisseria meningitidis; identical to SEQ ID NO: 1993

SEQ ID NO: 33207 - protein, 239 aa, Neisseria meningitidis; identical to SEQ ID NO: 19502

SEQ ID NO: 33208 - protein, 174 aa, Neisseria meningitidis; identical to SEQ ID NO: 14426

SEQ ID NO: 33209 - protein, 209 aa, Neisseria meningitidis; identical to SEQ ID NO: 15159

SEQ ID NO: 33210 - protein, 489 aa, Neisseria meningitidis
MPSEADIFRVGSVSDENGRTKIMKKIQADVVVIGGGTAGMGAFRNARLHSDNVYLIENNVFGTTCARVGCMPSKLLIAAAEARHHALHTDPFGVHLDKDSIVVNGEEVMQRVKSERDRFVGFVVADVEEWPADKRIMGSAKFIDEHTVQIDDHTQITAKSFVIATGSRPVILPQWQSLGDRLIINDDVFSWDTLPKSVAVFGPGVIGLELGQALHRLGVKVEIFGLGGIIGGISDPVVSDEAKAVFGEELKLHLDAKTEVKLDADGNVEVYWEQDGEKGVFVAEYMLAAVGRRPNVDNIGLENINIDKDARGVPVADPLTMQTSIPHIFIAGDASNQLPLLHEAADQGKIAGDNAGRYPNIGGGLRRSTIGVVFTNPQIGFVGLKYAQVTAQYQPDEFVIGEVSFKNQGRSRVMLVNKGHMRLYAEKATGRFIGAEIVGPAAEHLAHLLAWAHQMKMTVPQMLDMPFYHPVIEEGLRTALRDADAKLKA

SEQ ID NO: 33211 - protein, 160 aa, Neisseria meningitidis; identical to SEQ ID NO: 236

SEQ ID NO: 33212 - protein, 101 aa, Neisseria meningitidis; identical to SEQ ID NO: 1118

SEQ ID NO: 33213 - protein, 503 aa, Neisseria meningitidis; identical to SEQ ID NO: 24254

SEQ ID NO: 33214 - protein, 259 aa, Neisseria meningitidis; identical to SEQ ID NO: 588

SEQ ID NO: 33215 - protein, 470 aa, Neisseria meningitidis; identical to SEQ ID NO: 14842

SEQ ID NO: 33216 - protein, 138 aa, Neisseria meningitidis; identical to SEQ ID NO: 774

SEQ ID NO: 33217 - protein, 192 aa, Neisseria meningitidis; identical to SEQ ID NO: 26629

SEQ ID NO: 33218 - protein, 98 aa, Neisseria meningitidis
MRMAESKRVQRLLRVFIALDEHPIIGLSNKDLSVGLGLTPSQVSRDIDDLVASGLVIKLENGNYAYGIKTLQIAERFRRQHERLQSKIAEIGKRVNAD

SEQ ID NO: 33219 - protein, 75 aa, Neisseria meningitidis; identical to SEQ ID NO: 8304

SEQ ID NO: 33220 - protein, 321 aa, Neisseria meningitidis; identical to SEQ ID NO: 24628

SEQ ID NO: 33221 - protein, 106 aa, Neisseria meningitidis; identical to SEQ ID NO: 18989

SEQ ID NO: 33222 - protein, 331 aa, Neisseria meningitidis
LQPLVSVLICAYNVEKYFAQSLAAVVNQTWCNLDILIVDDGSTDGTLAIAKDFQKRDSRIKILAQAQNSGLIPSLNIGLDELAKSGGEYIARTDADDIAAPDWIEKIVGEMEKDRSIIAMGAWLEVLSEEKDGNRLARHHRHGKIWKKPTRHEDIADFFPFGNPIHNNTMIMRRSVIDGGLRYNTERDWAEDYQFWYDVSKLGRLAYYPEALVKYRLHANQVSSKYSVRQHEIAQGIQKTARNDFLQSMGFKTRFDSLEYRQIKAVAYELLEKHLPEEDFERARRFLYQCFKRTDTLPAGAWLDFAADGRMRRLFTLRQYFGILHRLLKNR

SEQ ID NO: 33223 - protein, 158 aa, Neisseria meningitidis; identical to SEQ ID NO: 5652

SEQ ID NO: 33224 - protein, 217 aa, Neisseria meningitidis; identical to SEQ ID NO: 25753

SEQ ID NO: 33225 - protein, 463 aa, Neisseria meningitidis; identical to SEQ ID NO: 19954

SEQ ID NO: 33226 - protein, 237 aa, Neisseria meningitidis; identical to SEQ ID NO: 6270

SEQ ID NO: 33227 - protein, 369 aa, Neisseria meningitidis
LLIHYRNDGLKPATGNTHFKVQTMQPIRYRTDLTPYNTFGLRAQARAFIALEHADGLRDIVRLPEFNRDTVLWLGGGSNILLMEDYAGLVVHMENKGIREIARSDGMVLIEAQAGEIWHDFVLHAVALGLNGLENLSLIPGTVGASPVQNIGAYGVEAKDVIHSVRCFDLDTETFVTLSNADCRFAYRESLFKQEGKGRYVIVSVVFALKTHFVPNLGYGDLAAAVAELSAGRVPTAKDVSDAVCAIRNSKLPNPNVLGNVGSFFKNPVVSAEKAATLLQRHPDMPRYPQPDGSVKLAAGWLIDQCRLKGFQIGGAAVHDRQALVLVNKNNASANDVRQLAQHIKFTVFARFQVELHAEPNWLPASFSL

SEQ ID NO: 33228 - protein, 121 aa, Neisseria meningitidis; identical to SEQ ID NO: 5618

SEQ ID NO: 33229 - protein, 103 aa, Neisseria meningitidis; identical to SEQ ID NO: 1510

SEQ ID NO: 33230 - protein, 265 aa, Neisseria meningitidis; identical to SEQ ID NO: 24435

SEQ ID NO: 33231 - protein, 102 aa, Neisseria meningitidis; identical to SEQ ID NO: 18763

SEQ ID NO: 33232 - protein, 140 aa, Neisseria meningitidis; identical to SEQ ID NO: 4408

SEQ ID NO: 33233 - protein, 178 aa, Neisseria meningitidis; identical to SEQ ID NO: 5654

SEQ ID NO: 33234 - protein, 296 aa, Neisseria meningitidis; identical to SEQ ID NO: 25824

SEQ ID NO: 33235 - protein, 463 aa, Neisseria meningitidis; identical to SEQ ID NO: 2284

SEQ ID NO: 33236 - protein, 388 aa, Neisseria meningitidis; identical to SEQ ID NO: 25481

SEQ ID NO: 33237 - protein, 248 aa, Neisseria meningitidis; identical to SEQ ID NO: 14834

SEQ ID NO: 33238 - protein, 472 aa, Neisseria meningitidis; identical to SEQ ID NO: 19517

SEQ ID NO: 33239 - protein, 232 aa, Neisseria meningitidis; identical to SEQ ID NO: 18412

SEQ ID NO: 33240 - protein, 188 aa, Neisseria meningitidis; identical to SEQ ID NO: 7019

SEQ ID NO: 33241 - protein, 213 aa, Neisseria meningitidis; identical to SEQ ID NO: 18560

SEQ ID NO: 33242 - protein, 280 aa, Neisseria meningitidis; identical to SEQ ID NO: 25294

SEQ ID NO: 33243 - protein, 74 aa, Neisseria meningitidis; identical to SEQ ID NO: 801

SEQ ID NO: 33244 - protein, 425 aa, Neisseria meningitidis; identical to SEQ ID NO: 19625

SEQ ID NO: 33245 - protein, 468 aa, Neisseria meningitidis; identical to SEQ ID NO: 25286

SEQ ID NO: 33246 - protein, 88 aa, Neisseria meningitidis; identical to SEQ ID NO: 255

SEQ ID NO: 33247 - protein, 47 aa, Neisseria meningitidis
MARYRRNFIAGGTFFFTVKLADPKSRLLVEHIDFAGGLYGCAKTIFL

SEQ ID NO: 33248 - protein, 159 aa, Neisseria meningitidis; identical to SEQ ID NO: 929

SEQ ID NO: 33249 - protein, 185 aa, Neisseria meningitidis; identical to SEQ ID NO: 24513

SEQ ID NO: 33250 - protein, 356 aa, Neisseria meningitidis; identical to SEQ ID NO: 19837

SEQ ID NO: 33251 - protein, 598 aa, Neisseria meningitidis
MNTVSNYLSALREAMKAQGLDALVIPSADPHLSEYLPEHWQARRELSGFTGSVGTFVVTADEAGVWVDSRYWEQAAKQLAGSGIELQKSGQVPPYNEWLAANLPENAAVGILSDMVSLTGKRTLAQSLAAKNIRIEHPDGLLDQVWTSRPAIPAETVFVHDPAYVSETAAEKLARVRAVMAEKGADYHLVSSLDDIAWLTNLRGSDVPFNPVFVSFLLIGKDNAVLFTDRCRLNAEAAAALQTAGITVEPYAQVADKLAQIGGALLIEPNKTAVSTLVRLPESVRLIEGINPSTLFKSCKSEADIARIREAMEHDGAALCGFFAEFEDIIGNGGSLTEIDVDTMLYRHRSVRPGFISLSFDTIAGFNANGALPHYSATPESHSTISGNGLLLIDSGAQYKGGTTDITRVVPVGTPSAEQKSDNTLVLKAHIALAEAVFPENIPSPLIDAICRKPLWQAQCDYGHGTGHGVGYFLNVHEGPQRIAFAAPATPETAMKKGMVTSIEPGLYRPGKWGIRIENLAANQAVAAPQETEFGSFLCFETLTLCPIDTRLMDTALMTDGEIDWVNRYHAEVRRRLEPLTEGAAKAWLIKRTEPLAR

SEQ ID NO: 33252 - protein, 363 aa, Neisseria meningitidis; identical to SEQ ID NO: 22177

SEQ ID NO: 33253 - protein, 382 aa, Neisseria meningitidis; identical to SEQ ID NO: 3340

SEQ ID NO: 33254 - protein, 113 aa, Neisseria meningitidis; identical to SEQ ID NO: 6827

SEQ ID NO: 33255 - protein, 81 aa, Neisseria meningitidis; identical to SEQ ID NO: 7948

SEQ ID NO: 33256 - protein, 305 aa, Neisseria meningitidis; identical to SEQ ID NO: 19715

SEQ ID NO: 33257 - protein, 699 aa, Neisseria meningitidis
MPSERRFRPIPTTRFVRKRITGKIMEVIRYPDSPFKLHQPFPPAGDQPTAIADLLEGLSDGLAYQTLLGVTGSGKTYTMANVIAQSGRPAIIMAHNKTLAAQLYAEMREFFPENAVEYFVSYYDYYQPEAYVPSRDLFIEKDSAINEHIEQMRLSATKNLMTRDDVIIVATVSAIYGIGDPTEYQQMVLSVKEGDTIEQRDIIATLVSMQYERGDLDFKRGSFRVRGDVIDVYPAESSENALRISLFDDEIDRLDMFDPLSGSLHQRVGRYTVFPSSHYVTPRDTVLRACESIKEELRERIDFFTKENRPVEQQRIEQRTRFDLEMLYEMGFCKGIENYSRHFSGKKEGEPPPTLMDYLPDNAIMFIDESHVTVTQIGGMYKGDASRKQNLVDYGFRLPSARDNRPLKFHEFEKVMPQTVFVSATPAKYEEEHAGQVVEQVVRPTGLVDPQIIIRPVATQVDDLMSEINDRIQKGERVLVTTLTKRMAEQLTDYYSELGIKVRYLHSDIDTVERVEIIRDLRLGLFDVLVGINLLREGLDIPEVSLVAILDADKEGFLRSHRSLIQTIGRAARNVNGVAILYADKITDSMKAAIDETERRREKQIKFNEEHGIVPQQIKKQVKDIIDGVYHEEDSGKGRRQGKNKVKVGEIHNEEDTIKEIAKLEKAMQQAARDLQFEEAAVLRDRIRNIKESLLFGAE

SEQ ID NO: 33258 - protein, 316 aa, Neisseria meningitidis; identical to SEQ ID NO: 6852

SEQ ID NO: 33259 - protein, 122 aa, Neisseria meningitidis; identical to SEQ ID NO: 18664

SEQ ID NO: 33260 - protein, 471 aa, Neisseria meningitidis; identical to SEQ ID NO: 7428

SEQ ID NO: 33261 - protein, 83 aa, Neisseria meningitidis; identical to SEQ ID NO: 3011

SEQ ID NO: 33262 - protein, 364 aa, Neisseria meningitidis; identical to SEQ ID NO: 6346

SEQ ID NO: 33263 - protein, 335 aa, Neisseria meningitidis
MSTFFQQTAQAMIAKHINRFPLLKLDQVIDWQPIEQYLNRQKTRYLRDHRGRPAYPLLSMFKAVLLGQWHSLSDPELEHSLITRIDFNLFCRFDELSIPDYSTLCRYRNWLAQDNTLSELLELINRQLTEKGLKVEKASAAVIDATIIQTAGSKQRQAIEVDEEGQVSGQTTLSKDKNARWTKKNGLYKLGYKQHTRTDAEGYIEKLHITPANAHECKHLSPLLEGLPKGTTVYADKGYDSAENRQHLEEHQLQDGIMRKACRNRPLTETQTKHNRYLSKIRYVVEQSFGTLHRKFRYARAAYFGLIKVSAQSHLKAMCLNLLKAANRLSAPAAA

SEQ ID NO: 33264 - protein, 301 aa, Neisseria meningitidis; identical to SEQ ID NO: 24448

SEQ ID NO: 33265 - protein, 222 aa, Neisseria meningitidis; identical to SEQ ID NO: 24152

SEQ ID NO: 33266 - protein, 161 aa, Neisseria meningitidis; identical to SEQ ID NO: 1442

SEQ ID NO: 33267 - protein, 323 aa, Neisseria meningitidis; identical to SEQ ID NO: 3380

SEQ ID NO: 33268 - protein, 410 aa, Neisseria meningitidis; identical to SEQ ID NO: 14901

SEQ ID NO: 33269 - protein, 142 aa, Neisseria meningitidis; identical to SEQ ID NO: 18752

SEQ ID NO: 33270 - protein, 168 aa, Neisseria meningitidis; identical to SEQ ID NO: 18232

SEQ ID NO: 33271 - protein, 135 aa, Neisseria meningitidis
LAEGQKSAVTEYYLNHGEWPANNNSAGVATSADIKGKYVKSVEVKNGVVTAQMASSNVNNEIKDKKLSLWAKRQNGSVKWFCGQPVTRDANNADAVAAAKTGTNKIDTKHLPSTCRDAASAVCIETPPTAFYKNT

SEQ ID NO: 33272 - protein, 189 aa, Neisseria meningitidis; identical to SEQ ID NO: 25122

SEQ ID NO: 33273 - protein, 81 aa, Neisseria meningitidis; identical to SEQ ID NO: 6740

SEQ ID NO: 33274 - protein, 303 aa, Neisseria meningitidis; identical to SEQ ID NO: 31474

SEQ ID NO: 33275 - protein, 166 aa, Neisseria meningitidis; identical to SEQ ID NO: 1704

SEQ ID NO: 33276 - protein, 247 aa, Neisseria meningitidis; identical to SEQ ID NO: 18834

SEQ ID NO: 33277 - protein, 130 aa, Neisseria meningitidis; identical to SEQ ID NO: 18694

SEQ ID NO: 33278 - protein, 150 aa, Neisseria meningitidis; identical to SEQ ID NO: 25598

SEQ ID NO: 33279 - protein, 105 aa, Neisseria meningitidis; identical to SEQ ID NO: 895

SEQ ID NO: 33280 - protein, 124 aa, Neisseria meningitidis
LVEGQKSAVTEYYLNHGIWPGDNNSAGVATSTDIKGKYVKEVEVKNGVVTATMLSSGVNNEIKGKKLSLWAKRQNGSVKWFCGQPVQRNDTTTTNDDVNKATGNNEIDTKHLPSTAPTRKSTPN

SEQ ID NO: 33281 - protein, 65 aa, Neisseria meningitidis; identical to SEQ ID NO: 127

SEQ ID NO: 33282 - protein, 525 aa, Neisseria meningitidis; identical to SEQ ID NO: 24993

SEQ ID NO: 33283 - protein, 131 aa, Neisseria meningitidis; identical to SEQ ID NO: 12068

SEQ ID NO: 33284 - protein, 69 aa, Neisseria meningitidis; identical to SEQ ID NO: 24265

SEQ ID NO: 33285 - protein, 659 aa, Neisseria meningitidis; identical to SEQ ID NO: 25587

SEQ ID NO: 33286 - protein, 149 aa, Neisseria meningitidis; identical to SEQ ID NO: 13054

SEQ ID NO: 33287 - protein, 308 aa, Neisseria meningitidis; identical to SEQ ID NO: 24563

SEQ ID NO: 33288 - protein, 147 aa, Neisseria meningitidis; identical to SEQ ID NO: 2466

SEQ ID NO: 33289 - protein, 590 aa, Neisseria meningitidis; identical to SEQ ID NO: 25011

SEQ ID NO: 33290 - protein, 254 aa, Neisseria meningitidis; identical to SEQ ID NO: 25209

SEQ ID NO: 33291 - protein, 292 aa, Neisseria meningitidis; identical to SEQ ID NO: 3715

SEQ ID NO: 33292 - protein, 548 aa, Neisseria meningitidis; identical to SEQ ID NO: 5670

SEQ ID NO: 33293 - protein, 286 aa, Neisseria meningitidis; identical to SEQ ID NO: 10859

SEQ ID NO: 33294 - protein, 89 aa, Neisseria meningitidis; identical to SEQ ID NO: 1905

SEQ ID NO: 33295 - protein, 122 aa, Neisseria meningitidis; identical to SEQ ID NO: 3754

SEQ ID NO: 33296 - protein, 375 aa, Neisseria meningitidis; identical to SEQ ID NO: 3405

SEQ ID NO: 33297 - protein, 505 aa, Neisseria meningitidis; identical to SEQ ID NO: 2655

SEQ ID NO: 33298 - protein, 336 aa, Neisseria meningitidis
MSDTPATRDFGLIDGRAVTGYVLSNRRGTRVCVLDLGGIVQEFSVLADGVRENLVVSFDDAASYADNPFQINKQIGRVAGRIRGAAFDINGRTYRVEANEGRNALHGGSHGLAVTRFNAVAADGRSVVLRSRLQQSADGYPNDLDLDISYRLDEDDRLTVSYRATALGDTVFDPTLHIYWRLDAGLHDAVLHIPQGGHIPADAEKLPVSTVSDDLEVFDFSRPKPLDAAVAALRRETGRAGFDDAYRVPSDIGRPAAVLQAGRRRRISIYSDRNGLVIFTAAPQDFARHDAGVYDALATEAQTLPDSLHWPEFGNIRLNKGDTREATIAYGIESLS

SEQ ID NO: 33299 - protein, 513 aa, Neisseria meningitidis
MKFLDREASIAKPGFNRWLVPPAALAVHLAIGQIYAYSVFNAPLTKLIGITESAAGDWKLTTVGWIFSIALAMLGASAALFGTWMERVGPRKAIFAAACCFSLGFFVSAFGVSTHNLFLLYLGNGVIGGVGLGLGYIGPVSTLMKWFPDKPGMATGLAIMGFGGGAMLASPLSVSLMNAFSNAASVGVVETFAVLGLLYLALMMFGAFTICVPADGWKPEGYIAPKTQNKLVSSNHVNVSQAMKTPQFWLLFWVLCLNVTAGIGVLGQASVMIQELFSETSIGRQAAVGAGAAAGFVSLLSLFNMGGRFLWSSVSDKIGRKNTYTIFFVLGSLLYFAVPSIGEGGSKALFIIGFCVIISMYGGGFAAIPAYLKDLFGTYQVGAIHGRILLAWSTAAVIGPVLVNYIRQSQIDSGIPAAQAYSVTMYIMAGLLIIGLLCNLAVKSVHEKHHEKDIKTAAHSGNPDDETAISDAYLVGEKVSGGGISVWWRWALAVIPLAYGVVMVFVKALDLFS

SEQ ID NO: 33300 - protein, 671 aa, Neisseria meningitidis
MKSYPDPYRHFENLDSAETQNFAAEANAETRARFLNNDKARALSDGILAQLQDTRQIPFCQEHRARMYHFHQDTEYPKGVYRVCTAATYRSGYPEWKILFSVADFDELLGDDVYLGGVSHLVEQPNRALLTLSKSGGDTAYTLEVDLEAGELVEGGFHFPAGKNHVSWRDENSVWVCPAWDERQLTESGYPREVWLVERGKSFEESLPVYQIDKDAMMVNAWRYLDPQGSPIDLIEASDGFYTKTYLQVSSESEAKPLNLPNDCDVAGYLAGHLLLTLRKDWNRANQSYPSGALVAVKLNRGELGAAQLLFAPDETQALESVETTKRFVVASLLENVQGRLKAWRFADGKWQEAELPRLPSGALEMTDQPWGGDVVYLAASDFTTPLTLFALDLNVMELTVMRRQPQQFDSDGINVQQFWTTSADGERIPYFHVGKNAAPDMPTLVYAYGGFGIPELPHYLGSIGKYWLEEGNAFVLANIRGGGEFGPRWHQAAQGISKHKSVDDLLAVVRDLSERGMSSPRHIGLQGGSNGGLITAAAFVCEPQSIGALVCEVPLTDMIRYPLLSAGSSWTDEYGNPQKYEVCKRWLGELSPYHNLSDGIDYPPALITTSLSDDRVHPAHALKFYAKLHETSAQSWLYSPDGGGHTGNGTQRESADELACVLLFLKEFLG

SEQ ID NO: 33301 - protein, 591 aa, Neisseria meningitidis; identical to SEQ ID NO: 18870

SEQ ID NO: 33302 - protein, 62 aa, Neisseria meningitidis; identical to SEQ ID NO: 5951

SEQ ID NO: 33303 - protein, 165 aa, Neisseria meningitidis; identical to SEQ ID NO: 19855

SEQ ID NO: 33304 - protein, 542 aa, Neisseria meningitidis; identical to SEQ ID NO: 24553

SEQ ID NO: 33305 - protein, 305 aa, Neisseria meningitidis; identical to SEQ ID NO: 24946

SEQ ID NO: 33306 - protein, 207 aa, Neisseria meningitidis; identical to SEQ ID NO: 26030

SEQ ID NO: 33307 - protein, 164 aa, Neisseria meningitidis; identical to SEQ ID NO: 25956

SEQ ID NO: 33308 - protein, 45 aa, Neisseria meningitidis; identical to SEQ ID NO: 645

SEQ ID NO: 33309 - protein, 87 aa, Neisseria meningitidis; identical to SEQ ID NO: 205

SEQ ID NO: 33310 - protein, 222 aa, Neisseria meningitidis; identical to SEQ ID NO: 3618

SEQ ID NO: 33311 - protein, 467 aa, Neisseria meningitidis; identical to SEQ ID NO: 25792

SEQ ID NO: 33312 - protein, 263 aa, Neisseria meningitidis; identical to SEQ ID NO: 24551

SEQ ID NO: 33313 - protein, 201 aa, Neisseria meningitidis; identical to SEQ ID NO: 24252

SEQ ID NO: 33314 - protein, 160 aa, Neisseria meningitidis; identical to SEQ ID NO: 515

SEQ ID NO: 33315 - protein, 365 aa, Neisseria meningitidis; identical to SEQ ID NO: 24213

SEQ ID NO: 33316 - protein, 896 aa, Neisseria meningitidis; identical to SEQ ID NO: 19788

SEQ ID NO: 33317 - protein, 389 aa, Neisseria meningitidis; identical to SEQ ID NO: 19109

SEQ ID NO: 33318 - protein, 119 aa, Neisseria meningitidis; identical to SEQ ID NO: 121

SEQ ID NO: 33319 - protein, 39 aa, Neisseria meningitidis; identical to SEQ ID NO: 7406

SEQ ID NO: 33320 - protein, 473 aa, Neisseria meningitidis; identical to SEQ ID NO: 719

SEQ ID NO: 33321 - protein, 269 aa, Neisseria meningitidis
MAKIGDFAAKSMIEIRSKRMITLPSLNNLPSKWDEIRYWLETRVCECGVMPHPNLTECEAGQFDRDFWDNIGCAPEEYVRIRRAIRLLEARYPDSLNELVCAAIATPLGEMLAVFGNKGLCLLEFVGQKHMEQEIAAVQKALRGRFVFREDERTQLLRQELDLYFKGRLKTFATPLEQIGTEFQKQAWDALLAIPYGETRSYKEQAQRLGNPNAVRAVAAANGQNKVSILIPCHRVIGSDGKLTGYAGGLNRKQFLLALERGEVQTALF

SEQ ID NO: 33322 - protein, 275 aa, Neisseria meningitidis; identical to SEQ ID NO: 25105

SEQ ID NO: 33323 - protein, 65 aa, Neisseria meningitidis; identical to SEQ ID NO: 127

SEQ ID NO: 33324 - protein, 321 aa, Neisseria meningitidis; identical to SEQ ID NO: 24871

SEQ ID NO: 33325 - protein, 293 aa, Neisseria meningitidis
MCIEMKFIFFVLYVLQFLPFALLHKLADLTGLLAYLLVKPRRRIGEINLAKCFPEWSEEKRKTVLKQHFKHMAKLMLEYGLYWYAPAGRLKSLVRYRNKHYLDDALAAGEKVIILYPHFTAFEMAVYALNQDVPLISMYSHQKNKILDAQILKGRNRYDNVFLIGRTEGLRALVKQFRKSSAPFLYLPDQDFGRNDSVFVDFFGIRTATITGLSRIAALANAKVIPAIPVREADNTVTLQFYPAWKSFPGEDAQADAQRMNRFIEERVREHPEQYFWLHKRFKTRPEGSPDFY

SEQ ID NO: 33326 - protein, 447 aa, Neisseria meningitidis; identical to SEQ ID NO: 25735

SEQ ID NO: 33327 - protein, 209 aa, Neisseria meningitidis; identical to SEQ ID NO: 18646

SEQ ID NO: 33328 - protein, 404 aa, Neisseria meningitidis; identical to SEQ ID NO: 33

SEQ ID NO: 33329 - protein, 231 aa, Neisseria meningitidis; identical to SEQ ID NO: 10637

SEQ ID NO: 33330 - protein, 423 aa, Neisseria meningitidis; identical to SEQ ID NO: 18895

SEQ ID NO: 33331 - protein, 85 aa, Neisseria meningitidis; identical to SEQ ID NO: 19708

SEQ ID NO: 33332 - protein, 148 aa, Neisseria meningitidis; identical to SEQ ID NO: 14596

SEQ ID NO: 33333 - protein, 183 aa, Neisseria meningitidis; identical to SEQ ID NO: 18553

SEQ ID NO: 33334 - protein, 461 aa, Neisseria meningitidis; identical to SEQ ID NO: 25868

SEQ ID NO: 33335 - protein, 289 aa, Neisseria meningitidis
MKEWIVGQSGELFCFGQMPVWKAENLPEVLLSGYSSEGGEWVCLNVLQGDVEVRTQDGAAEVWSAESGDCVFAPQQVFSVKPKTDDAEIRLSMYCVAEDYFHKKYGMSATHSAVAAAQDIVPAGRALDMGCGQGRNALFLGLKGFEVTAVDHNPAALANVAELAEAEGLNVRTLEYDLNAAALQGEFDYIVATVVLMFLMPQRVPDVIADMQAHTAAGGYNLIVSAMDTADFPCPMPFPFKFKEGELKDYYRDWELVEYKEELGAMHAKDENGNPIRFKFVTMLAKRPE

SEQ ID NO: 33336 - protein, 216 aa, Neisseria meningitidis; identical to SEQ ID NO: 3431

SEQ ID NO: 33337 - protein, 125 aa, Neisseria meningitidis; identical to SEQ ID NO: 19924

SEQ ID NO: 33338 - protein, 216 aa, Neisseria meningitidis; identical to SEQ ID NO: 4887

SEQ ID NO: 33339 - protein, 1080 aa, Neisseria meningitidis; identical to SEQ ID NO: 19688

SEQ ID NO: 33340 - protein, 385 aa, Neisseria meningitidis; identical to SEQ ID NO: 25509

SEQ ID NO: 33341 - protein, 93 aa, Neisseria meningitidis; identical to SEQ ID NO: 2125

SEQ ID NO: 33342 - protein, 181 aa, Neisseria meningitidis; identical to SEQ ID NO: 2183

SEQ ID NO: 33343 - protein, 199 aa, Neisseria meningitidis; identical to SEQ ID NO: 25733

SEQ ID NO: 33344 - protein, 618 aa, Neisseria meningitidis
MMNRYPLWKYLLIVFTIAVAAVYSLPNLFGETPAVQVSTNRQAIIINEQTQFKVDAALQNAGIQTDGMFVVDNSLKVRFKDTETQLKARDVIENTLGEGYITALNLLADSPEWMAKIKANPMFLGLDLRGGVHFTMQVDMKAAMQKTFERYSGDIRRELRREKIRSGTVRQAGNSLTVPLQDAGDVQKALPQLRKLFPEATLNSDGSNIVLTLSEEAVNKVRSDAVKQNITTLHNRVNELGVAEPVIQQSGADRIVVQLPGVQDTAKAKDIIGRTATLELRMVEDDPAKLREALEGNVPSGYELLSSGGDRPETLLISKQVELTGDNINDAQPSFDQMGAPAVSLSLDSAGGSIFGELTAANVGKRMAMVLIDQGKSEVVTAPVIRTAITGGRVEISGSMTTAEANDTSLLLRAGSLAAPMQIVEERTIGPSLGKENIEKGFHSTLWGFAIVAAFMVVYYRLMGFFSTIALSANILFLIGILSAMQATLTLPGMAALALTLGMAIDSNVLINERIREELRAGVPPQQAINLGFQHAWATIVDSNLTSLIAGIALLVFGSGPVRGFAVVHCLGILTSMYSSVVVFRALVNLWYGRRRKLQNISIGAVWKPEAETAAGKE

SEQ ID NO: 33345 - protein, 217 aa, Neisseria meningitidis; identical to SEQ ID NO: 115

SEQ ID NO: 33346 - protein, 64 aa, Neisseria meningitidis; identical to SEQ ID NO: 28553

SEQ ID NO: 33347 - protein, 89 aa, Neisseria meningitidis; identical to SEQ ID NO: 494

SEQ ID NO: 33348 - protein, 335 aa, Neisseria meningitidis; identical to SEQ ID NO: 7988

SEQ ID NO: 33349 - protein, 321 aa, Neisseria meningitidis; identical to SEQ ID NO: 24871

SEQ ID NO: 33350 - protein, 117 aa, Neisseria meningitidis; identical to SEQ ID NO: 3438

SEQ ID NO: 33351 - protein, 266 aa, Neisseria meningitidis; identical to SEQ ID NO: 8747

SEQ ID NO: 33352 - protein, 511 aa, Neisseria meningitidis
VSDSKTKERATFGTRRAFMIAAIGSAVGLGNIWRFPYIAFENGGGAFILPYLVALLTAGIPLLLLDYAIGHRYRGSAPLAFRRLGRWFEPVGWWNVMTNIVICIYYAVIIGWAASYTYYSVNAAWGADPQGFFFKDFLQMEGPEALGLDFVGKVAGPLAGVWVFTAAIMALGVQKGVARASSFFMPLLLVMFLIMVGISLTLPGAAKGLDALFTPDWSKLADSKVWVAAYGQIFFSLSICFGIMVTYSSYLKKKTDLGGTGLVVGFANSSFELLAGIGVFAALGFMAQAGGKAVNEVASGGIGLAFIAFPTIINQAPMGWLIGILFFGSLVFAGVTSMISILEVIVAAIQDKLNIGRVNATLLVCIPMGIVSTLLFGTATGLPVLDVMDKFVNTYGIVAAGFVYVAAIIISGRLPELRKHLNALSSIRIGGLWTVCVVVTVVMLGYMLFKDTSGLMEKNYEGYPDGFLSIFGWGMSAALVVFGLLLSLLPWKHGQDFNVKDEHEHEQGEEK

SEQ ID NO: 33353 - protein, 330 aa, Neisseria meningitidis; identical to SEQ ID NO: 24556

SEQ ID NO: 33354 - protein, 760 aa, Neisseria meningitidis
MTVFRICFIIRLFLKYLGWGDVFRRWFLPCWVVGAAASFALPVVPHWLFWLAAFAVFAVFARRFAFAGLMLCVLAGAAYGVFRTEAALSSQWWAEAVSGVPLTVEVADMPRSDGRRVQFAAKAVDSGGRTFDLLLSDYKRREWAVGSRWRITARVHPVVGELNLRGLNREAWALSNGIGGAGTVGADRVLLHGGSGWGIAVWRSRISRNWQQADADGGLSDGIGLMRALSVGEQSALRPELWQAFRPLGLTHLVSISGLHVTMVAVMFAWLAKRLLACSPRLPARPRAWVLAAGCAGALFYALLAGFSVPTQRSVLMLAAFAWAWRRGRLSAWATWWQALAAVLLFDPSAVLGVGTWLSFGLVAALIWACSGRLHEGKRQTALRGQWAASVLSLVLLGYLFASLPLISPLVNAVAIPWFSWVLTPLALLGSVVPFAPLQQLGAFLAEYTLRFLVWLADVSPEFAVASAPLPLLVLAVCAALLLLLPRGLGLRPWAVLLLAGFVFYRSPGVPENEVAVTVWDAGQGLSVSVQTANHHLLFDTGTAAAAQMGIVPSLNASGIRYLDYLVLSHHDSDHDGGFQAVGKIPNGGIYAGQPEFYEGARHCAEQRWQWDGVDFEFLMPSERKNIDDNGKSCVLRVVAGGAALLVTGDLDTKGEESLVGKYGGNLYSQVLVLGHHGSNTSSSGVFLNAVSPEYAVASSGYANAYKHPTEAVQNRVRAHGIKLLRTDLSGALQFGLGRGGVKAQRLRGYKFYWQKKPFE

SEQ ID NO: 33355 - protein, 74 aa, Neisseria meningitidis; identical to SEQ ID NO: 15629

SEQ ID NO: 33356 - protein, 103 aa, Neisseria meningitidis; identical to SEQ ID NO: 1558

SEQ ID NO: 33357 - protein, 374 aa, Neisseria meningitidis; identical to SEQ ID NO: 24992

SEQ ID NO: 33358 - protein, 678 aa, Neisseria meningitidis; identical to SEQ ID NO: 24951

SEQ ID NO: 33359 - protein, 185 aa, Neisseria meningitidis; identical to SEQ ID NO: 24285

SEQ ID NO: 33360 - protein, 296 aa, Neisseria meningitidis; identical to SEQ ID NO: 19379

SEQ ID NO: 33361 - protein, 127 aa, Neisseria meningitidis; identical to SEQ ID NO: 4145

SEQ ID NO: 33362 - protein, 680 aa, Neisseria meningitidis; identical to SEQ ID NO: 18792

SEQ ID NO: 33363 - protein, 57 aa, Neisseria meningitidis; identical to SEQ ID NO: 14761

SEQ ID NO: 33364 - protein, 318 aa, Neisseria meningitidis; identical to SEQ ID NO: 25049

SEQ ID NO: 33365 - protein, 95 aa, Neisseria meningitidis; identical to SEQ ID NO: 4938

SEQ ID NO: 33366 - protein, 118 aa, Neisseria meningitidis; identical to SEQ ID NO: 423

SEQ ID NO: 33367 - protein, 320 aa, Neisseria meningitidis; identical to SEQ ID NO: 1339

SEQ ID NO: 33368 - protein, 315 aa, Neisseria meningitidis; identical to SEQ ID NO: 18491

SEQ ID NO: 33369 - protein, 239 aa, Neisseria meningitidis; identical to SEQ ID NO: 3265

SEQ ID NO: 33370 - protein, 392 aa, Neisseria meningitidis; identical to SEQ ID NO: 19267

SEQ ID NO: 33371 - protein, 365 aa, Neisseria meningitidis; identical to SEQ ID NO: 1845

SEQ ID NO: 33372 - protein, 81 aa, Neisseria meningitidis; identical to SEQ ID NO: 25086

SEQ ID NO: 33373 - protein, 460 aa, Neisseria meningitidis; identical to SEQ ID NO: 19249

SEQ ID NO: 33374 - protein, 113 aa, Neisseria meningitidis; identical to SEQ ID NO: 25377

SEQ ID NO: 33375 - protein, 51 aa, Neisseria meningitidis; identical to SEQ ID NO: 1536

SEQ ID NO: 33376 - protein, 356 aa, Neisseria meningitidis; identical to SEQ ID NO: 5919

SEQ ID NO: 33377 - protein, 92 aa, Neisseria meningitidis; identical to SEQ ID NO: 752

SEQ ID NO: 33378 - protein, 156 aa, Neisseria meningitidis; identical to SEQ ID NO: 19682

SEQ ID NO: 33379 - protein, 201 aa, Neisseria meningitidis; identical to SEQ ID NO: 13953

SEQ ID NO: 33380 - protein, 144 aa, Neisseria meningitidis; identical to SEQ ID NO: 4464

SEQ ID NO: 33381 - protein, 430 aa, Neisseria meningitidis; identical to SEQ ID NO: 2797

SEQ ID NO: 33382 - protein, 361 aa, Neisseria meningitidis; identical to SEQ ID NO: 7621

SEQ ID NO: 33383 - protein, 823 aa, Neisseria meningitidis; identical to SEQ ID NO: 14951

SEQ ID NO: 33384 - protein, 421 aa, Neisseria meningitidis; identical to SEQ ID NO: 25359

SEQ ID NO: 33385 - protein, 248 aa, Neisseria meningitidis; identical to SEQ ID NO: 4029

SEQ ID NO: 33386 - protein, 89 aa, Neisseria meningitidis; identical to SEQ ID NO: 4489

SEQ ID NO: 33387 - protein, 384 aa, Neisseria meningitidis; identical to SEQ ID NO: 19784

SEQ ID NO: 33388 - protein, 73 aa, Neisseria meningitidis
MRLSLYGCFYFTFSFVWVWFEEAGDYRFLSAVLKIVSFSADFRHFFIGVGYLYWHGASGVLIGSEFEIFEFAR

SEQ ID NO: 33389 - protein, 98 aa, Neisseria meningitidis; identical to SEQ ID NO: 2571

SEQ ID NO: 33390 - protein, 630 aa, Neisseria meningitidis; identical to SEQ ID NO: 25552

SEQ ID NO: 33391 - protein, 240 aa, Neisseria meningitidis; identical to SEQ ID NO: 24185

SEQ ID NO: 33392 - protein, 321 aa, Neisseria meningitidis; identical to SEQ ID NO: 24628

SEQ ID NO: 33393 - protein, 481 aa, Neisseria meningitidis; identical to SEQ ID NO: 25832

SEQ ID NO: 33394 - protein, 636 aa, Neisseria meningitidis
MNILSVENASFAIGHVALLDKTSFQLDSGEKVGLIGRNGAGKSSFLKILAGVQKLDDGQIIVQNNLKIVYVPQESFFDKDATVFDTVAEGLGKIRDLLRRYHRVGHELENGSGEALLKELNELQLEIEAKDGWKLDAAVKQTLGELGLPENEKIGNLSGGQKKRVALAQAWVQKPDVLLLDEPTNHLDIDAIIWLENLLKAFEGSLVVITHDRRFLDNIATRIVELDRGILRSYPGSFSKYSEKKAQELAVEAEHNRLFDKFHAQEEAWIRKGIEARRTRNEGRVRRLEELRRQRAERRNVQGQVNFKLDSGEKSGKIIAELEHASFAYGGKVIMDKFSAILQRGDKIGLIGPNGIGKTTFLKLILGELQPTYGRIRIGSKQEVAYFDQFRSALNENETVFYTLGQGNDYVEVGGKKKHVMSYLEDFLFPPARAQSPVSSLSGGERNRLLLAKLFTRPANILILDEPTNDLDIDTQELLEDLLRDYQGTVFLVSHDRMFLDNVITQSIIFEGNGRLKEYIGGYQDYIDAKSREAKIQTESAPKTADAEPVKEKPKANRTVKLSYKEQRELDALPDEIAALEAEQAEINAQLSDPEIFKDYEKAGALQSRAEEIEMLLLEKLERWELLETKQNGNAV

SEQ ID NO: 33395 - protein, 129 aa, Neisseria meningitidis; identical to SEQ ID NO: 3332

SEQ ID NO: 33396 - protein, 405 aa, Neisseria meningitidis; identical to SEQ ID NO: 25477

SEQ ID NO: 33397 - protein, 88 aa, Neisseria meningitidis; identical to SEQ ID NO: 1876

SEQ ID NO: 33398 - protein, 199 aa, Neisseria meningitidis; identical to SEQ ID NO: 18036

SEQ ID NO: 33399 - protein, 508 aa, Neisseria meningitidis; identical to SEQ ID NO: 25040

SEQ ID NO: 33400 - protein, 352 aa, Neisseria meningitidis; identical to SEQ ID NO: 24771

SEQ ID NO: 33401 - protein, 301 aa, Neisseria meningitidis; identical to SEQ ID NO: 1112

SEQ ID NO: 33402 - protein, 352 aa, Neisseria meningitidis; identical to SEQ ID NO: 19238

SEQ ID NO: 33403 - protein, 431 aa, Neisseria meningitidis; identical to SEQ ID NO: 25196

SEQ ID NO: 33404 - protein, 312 aa, Neisseria meningitidis; identical to SEQ ID NO: 8892

SEQ ID NO: 33405 - protein, 89 aa, Neisseria meningitidis; identical to SEQ ID NO: 1473

SEQ ID NO: 33406 - protein, 295 aa, Neisseria meningitidis; identical to SEQ ID NO: 14587

SEQ ID NO: 33407 - protein, 148 aa, Neisseria meningitidis; identical to SEQ ID NO: 24717

SEQ ID NO: 33408 - protein, 107 aa, Neisseria meningitidis; identical to SEQ ID NO: 19473

SEQ ID NO: 33409 - protein, 441 aa, Neisseria meningitidis; identical to SEQ ID NO: 7778

SEQ ID NO: 33410 - protein, 1216 aa, Neisseria meningitidis
VKYLISGCLKNKMMWCASNRVGNKLPTLRLLDRMAGIYITGKEKGVLAAQAGKDINIIAGQISNQSEQGQTRLQAGRDINLDTVQTGKHQATHFDADNHVIRGSTNEVGSSIQTKGDVTLLSGNNLNAKAAEVSSANGTLAVSAKNDINISAGINTTHVDDASKHTGRSGGGNKLIITDKAQSHNETAQSSTFDGRQVVLQAGNDANILGSNVISDNGTRIQAGNHVRIGTTQTQSQSETYHQTQKSGLMSAGIGFTIGSKTNTQENQSQSNEHTGSTVGSLKGDTTIVAGKHYEQIGSTVSSPEGNNIIHAQSIDIQAAHNKLNSNTTQTYEQKGLTVAFSSPVTDLAQQAIAVAQSSKQVGQSKNGRVNAMAAANAGWQAYQTGKSAQNLANGTTNAKQVSISITYGEQQNRQTTQVQASQAQASQIQAGGKTTLIATGAAEQSNINIAGSDIAGKAGTILIADNDITLQSAEQSNTERSQNKSTGWNAGAAVSFGQGGWSLGVTAGGNVGKGYGNGDSVTHRHSHIGDKGSQTLIQSGGDTTIKGAQVRGKGVQVNAKNLSIQSVQDRETYQSKQQNASAQVTVGYGFSASGDYSQSKIRADHASVTEQSGIYAGEDGYQIKVGNHTDLKGGIITSSQSAEDKGKNRFQTATLTTSDIQNYSQYQGKSFGLGASVAVSGKTLGQGAQNKPQNKHLTSVADKNGASSSVGYGSDSDSQSSITKSGINTRNIHITDEAGQIRLTGKTAAQTKADIDTNVTTDTAERHSGSLKNTFNKEAVQSELDLQREVTQEFDKTRQGVKQELYAVVDSKREQATKERLKNGGYDNDKSRALNKEANELDEKIRWLDAGLGLVWGAGSSDMAWSMFATTQADRAVRSATAPKEMWFHKKIIDEKTGKVSFDTRQIWSLNDLSKEELASIQDTNGKVITVSNPGIFNNREDSLSNAAKQNRNSTNGSGVIAVMNPPTGKYKSDSNNKIKDSLWLSSSLVSELMYVGYDQLNNKVFQGYLPKTNSEKLNQDIYREVQKMDNGWSVDTSNHSRGGITASVSLKDWVNNKEQNGIAPIRKARFYGTATNVKNDYADVLQKNGYTYTGADGKTYNSGAYSIVHDKDFVGNKWIPFLLGNNETTKGACKGFCYSHSSYFAEVPEQYQRDENGNIKMENGKPVETENWEDYTKKWGIPKTGADGKYINHAIPKLVNPNNPNGEKYETNPF

SEQ ID NO: 33411 - protein, 718 aa, Neisseria meningitidis
MPAPQPSAPYDPLTAEARALLFHTASYLKPEEQAELEKAVAYAFRAHDGQTRKSGEPYITHPIAVATQLALWHMGIQGLCAGVMHDVLEDTGVTKGEMAAVFGNTIAEMVDGLSKLEKLKFEDHAEHQAESFRKLILAMTKDVRVIVVKLADRLHNMRTLGSMRPDKRRRIARETLEIYAQIANRIGLNNAYQELQDLSFQNLHPNRYETLKKAMDKSRKNRQDVVGKVLRAFGQRLVGANIEAKIKGREKNLYGIHQKMMAKKLRFAEVMDIYGFRVIVNSIPACYAALGALHTLYQPKPGRFKDYIAIPKSNGYQSLHTTLVGPYGLPIEVQIRTKEMDAVAEGGIAGHWSYKSYSKTVDQAVLHTNRWLKNILDLQASSANAIEFLEHVKVDLFPNEIYILTPKGKILTLPKGATPVDFAYAVHTDIGHKTVAARINNIMMPLRTKLKTGDSVEIITSEHAKPNPAWLNFAVSGRARSAIRQYIKNLNRHDAVVLGESLLQKALSSLLPKDVLLSDGIKEKYLADLNDKQTSFEEVLYNVGMGHTLPVYVAMHIAELAGEHFGSEVRLSSIKVDGQESGHIHFAECCHPVPGDSIRLLLVKGKGMIIHRDTCPTLLKSDPEQQLDADWENMNGQNYRVGLQVQSEDSHGLLALMAQAISDSGADIESVETPSKSQSGTEGFVEFKFLLKVKNLNQLNQIIQNLHSIPYIRKVIRS

SEQ ID NO: 33412 - protein, 381 aa, Neisseria meningitidis; identical to SEQ ID NO: 18979

SEQ ID NO: 33413 - protein, 280 aa, Neisseria meningitidis; identical to SEQ ID NO: 4431

SEQ ID NO: 33414 - protein, 603 aa, Neisseria meningitidis; identical to SEQ ID NO: 6451

SEQ ID NO: 33415 - protein, 167 aa, Neisseria meningitidis; identical to SEQ ID NO: 18251

SEQ ID NO: 33416 - protein, 162 aa, Neisseria meningitidis
MKKDIFYCEQWSYGYKKLHKPFSEKQAEEKHLKGELYTAVIGSATQPEYVITLREEVGFFSVHFFDKFGRDYLTHQFQKYSNSNYYFLSMAVWRDYITLESHDLAEGYTYFFNENTDDCYVLKEDFINNERYEKTELYSQKDKVILFPKFGEYDLVLNPDII

SEQ ID NO: 33417 - protein, 328 aa, Neisseria meningitidis; identical to SEQ ID NO: 18970

SEQ ID NO: 33418 - protein, 306 aa, Neisseria meningitidis; identical to SEQ ID NO: 14851

SEQ ID NO: 33419 - protein, 126 aa, Neisseria meningitidis; identical to SEQ ID NO: 6216

SEQ ID NO: 33420 - protein, 206 aa, Neisseria meningitidis; identical to SEQ ID NO: 1193

SEQ ID NO: 33421 - protein, 465 aa, Neisseria meningitidis; identical to SEQ ID NO: 31190

SEQ ID NO: 33422 - protein, 477 aa, Neisseria meningitidis; identical to SEQ ID NO: 24798

SEQ ID NO: 33423 - protein, 221 aa, Neisseria meningitidis
MDAWFEDTAMGRYVAKLEQDFFGRYLDSYRFSGMCAVQVGGPWLSLSEDVVCVPRDMSMSAENMALADVSADMLLFPHTLEGGVPSQILSEAHRILKPCGRLMLTGFNPYSLWGFSRWFDGERLPEKRFCLPLPELKRLLADAGFDIELGKFMVYLPPVSSLGQIRFWQFMEKAGDRWWPQCAAVYGLVLVKRAAGVTPLPAWDGYLGGKALAAGAARIAD

SEQ ID NO: 33424 - protein, 179 aa, Neisseria meningitidis; identical to SEQ ID NO: 403

SEQ ID NO: 33425 - protein, 146 aa, Neisseria meningitidis; identical to SEQ ID NO: 5620

SEQ ID NO: 33426 - protein, 321 aa, Neisseria meningitidis; identical to SEQ ID NO: 24628

SEQ ID NO: 33427 - protein, 241 aa, Neisseria meningitidis; identical to SEQ ID NO: 7122

SEQ ID NO: 33428 - protein, 192 aa, Neisseria meningitidis; identical to SEQ ID NO: 2909

SEQ ID NO: 33429 - protein, 351 aa, Neisseria meningitidis; identical to SEQ ID NO: 25305

SEQ ID NO: 33430 - protein, 69 aa, Neisseria meningitidis; identical to SEQ ID NO: 5143

SEQ ID NO: 33431 - protein, 269 aa, Neisseria meningitidis; identical to SEQ ID NO: 18208

SEQ ID NO: 33432 - protein, 203 aa, Neisseria meningitidis; identical to SEQ ID NO: 18365

SEQ ID NO: 33433 - protein, 261 aa, Neisseria meningitidis; identical to SEQ ID NO: 7966

SEQ ID NO: 33434 - protein, 192 aa, Neisseria meningitidis; identical to SEQ ID NO: 24970

SEQ ID NO: 33435 - protein, 60 aa, Neisseria meningitidis; identical to SEQ ID NO: 3237

SEQ ID NO: 33436 - protein, 347 aa, Neisseria meningitidis; identical to SEQ ID NO: 2159

SEQ ID NO: 33437 - protein, 304 aa, Neisseria meningitidis
MKHLKLTLIAALLTTAATAAPLPVVTSFSILGDVAKQIGGERVSIQSLVGANQDTHAYHMTSGDIKKIRSAKLVLLNGLGLEAADVQRAVKQSKVSYAEATKGIQPLKAEEEGGHHHDHDHDHEGHHHDHGEYDPHVWNDPVLMSAYAQNVAEALIKADPEGKVYYQQRLGNYQMQLKKLHSDAQAAFNAVPAAKRKVLTGHDAFSYMGKRYHIEFIAPQGVSSEAEPSAKQVAAIIRQIKREGIKAVFTENIKDTRMVDRIAKETGVNVSGKLYSDALGNAPADTYIGMYRHNIKALTNAMKQ

SEQ ID NO: 33438 - protein, 327 aa, Neisseria meningitidis; identical to SEQ ID NO: 25890

SEQ ID NO: 33439 - protein, 399 aa, Neisseria meningitidis; identical to SEQ ID NO: 18454

SEQ ID NO: 33440 - protein, 524 aa, Neisseria meningitidis; identical to SEQ ID NO: 19965

SEQ ID NO: 33441 - protein, 547 aa, Neisseria meningitidis; identical to SEQ ID NO: 25617

SEQ ID NO: 33442 - protein, 248 aa, Neisseria meningitidis; identical to SEQ ID NO: 639

SEQ ID NO: 33443 - protein, 458 aa, Neisseria meningitidis; identical to SEQ ID NO: 18959

SEQ ID NO: 33444 - protein, 916 aa, Neisseria meningitidis; identical to SEQ ID NO: 1114

SEQ ID NO: 33445 - protein, 101 aa, Neisseria meningitidis; identical to SEQ ID NO: 2399

SEQ ID NO: 33446 - protein, 397 aa, Neisseria meningitidis; identical to SEQ ID NO: 18337

SEQ ID NO: 33447 - protein, 283 aa, Neisseria meningitidis; identical to SEQ ID NO: 24624

SEQ ID NO: 33448 - protein, 217 aa, Neisseria meningitidis; identical to SEQ ID NO: 8419

SEQ ID NO: 33449 - protein, 119 aa, Neisseria meningitidis; identical to SEQ ID NO: 6447

SEQ ID NO: 33450 - protein, 369 aa, Neisseria meningitidis; identical to SEQ ID NO: 25916

SEQ ID NO: 33451 - protein, 169 aa, Neisseria meningitidis; identical to SEQ ID NO: 19393

SEQ ID NO: 33452 - protein, 259 aa, Neisseria meningitidis; identical to SEQ ID NO: 18496

SEQ ID NO: 33453 - protein, 69 aa, Neisseria meningitidis; identical to SEQ ID NO: 4226

SEQ ID NO: 33454 - protein, 449 aa, Neisseria meningitidis
MKLPVMSPEHSAQLQAFEAKILSNHAKIEAWFRTQWNAHRPPFYGSVDIRNAGYKISSIDMNLFPGGFNNLNPNFIPLAAVAAQDAVQRACETAKSVLIIPENHTRNTFYLQNVYALGEILCSAGYEVRLGSLNPEVTEPTEFETALGDKILLEPLLRTRDRVHLADGFSPCVVLLNNDLSAGIPDILKGISQTVLPPLHGGWTTRRKTNHFGAYNQVAAEFAKLIGIDEWQINPYFEKIGGLDFQEREGEDALAEAVERVLAKIQAKYDESGITDKPFVIVKADAGTYGMGVMSVKSADEVRGLNRKNRNKMAKVKEGLEVSEVIVQEGIYTYETLNGAVCEPVVYMMDRFVIGGFFRVHEGRGADENLNAGGMVFVPLSNSIPTGNGDNSQEAPEACKRVFEQWDSLGMPRSEKDCDVDNEHNRLYVYGVMARLSLLAASIELEETA

SEQ ID NO: 33455 - protein, 929 aa, Neisseria meningitidis; identical to SEQ ID NO: 24479

SEQ ID NO: 33456 - protein, 268 aa, Neisseria meningitidis; identical to SEQ ID NO: 9528

SEQ ID NO: 33457 - protein, 518 aa, Neisseria meningitidis; identical to SEQ ID NO: 8503

SEQ ID NO: 33458 - protein, 283 aa, Neisseria meningitidis; identical to SEQ ID NO: 7579

SEQ ID NO: 33459 - protein, 532 aa, Neisseria meningitidis; identical to SEQ ID NO: 19451

SEQ ID NO: 33460 - protein, 291 aa, Neisseria meningitidis; identical to SEQ ID NO: 22789

SEQ ID NO: 33461 - protein, 252 aa, Neisseria meningitidis; identical to SEQ ID NO: 1597

SEQ ID NO: 33462 - protein, 271 aa, Neisseria meningitidis; identical to SEQ ID NO: 1333

SEQ ID NO: 33463 - protein, 72 aa, Neisseria meningitidis; identical to SEQ ID NO: 9949

SEQ ID NO: 33464 - protein, 141 aa, Neisseria meningitidis
LIRMKTSTVVFGGFFMADNRERIQIPVLENPGIREINHFFSVSNFEKKAGVLVFRIIPEPKFGNTELTIYFEEGCYLPMIQTILEDGDIEVKNLKTENYSGNTMEIWGDFYPIEHISKNISTIQNIISEFMIQKQTPAPII

SEQ ID NO: 33465 - protein, 154 aa, Neisseria meningitidis; identical to SEQ ID NO: 24221

SEQ ID NO: 33466 - protein, 635 aa, Neisseria meningitidis
MPSEASRPVRTVLESKSATPMHDTRTMMIKPTALLLPALFFFPHAYAPAADLSENKAAGFALFKNKSPDTESVKLKPKFPVRIDTQDSEIKDMVEEHLPLITQQQEEVLDKEQTGFLAEEAPDNVKTMLRSKGYFSSKVSLTEKDGAYTVHITPGPRTKIANVGVAILGDILSDGNLAEYYRNALENWQQPVGSDFDQDSWENSKTSVLGAVTRKGYPLAKLGNTRAAVNPDTATVDLNVVVDSGRPIAFGDFEITGTQRYPEQIVSGLARFQPGTPYDLDLLLDFQQALEQNGHYSGASVQADFDRLQGDRVPVKVSVTEVKRHKLETGIRLDSEYGLGGKIAYDYYNLFNKGYIGSVVWDMDKYETTLAAGISQPRNYRGNYWTSNVSYNRSTTQNLEKRAFSGGIWYVRDRAGIDARLGAEFLAEGRKIPGSDIDLGNSHATMLTASWKRQLLNNVLHPENGHYLDGKIGTTLGTFLSSTALIRTSARAGYFFTPENKKLGTFIIRGQAGYTLARDNADVPSGLMFRSGGASSVRGYELDSIGLAGPNGSVLPERALLVGSLEYQLPFTRTLSGAVFHDMGDAAANFKRMKLKHGSGLGVRWFSPLAPFSFDIAYGHSDKKIRWHISLGTRF

SEQ ID NO: 33467 - protein, 299 aa, Neisseria meningitidis; identical to SEQ ID NO: 167

SEQ ID NO: 33468 - protein, 153 aa, Neisseria meningitidis
MKPQKSLRARAMDILSRQEVSRIGLKRKLAPHAESEEELENVLNEFAERNWQSDLRYAEAYIRSKSRKHGSLRLKQALAQQGIDEETSRNLLPDRSSEKQTAIDVLRKKFKHPAADLKEKQKQARFLAYRGFDADTVQTALKHAWDENWEDGC

SEQ ID NO: 33469 - protein, 91 aa, Neisseria meningitidis; identical to SEQ ID NO: 25343

SEQ ID NO: 33470 - protein, 334 aa, Neisseria meningitidis; identical to SEQ ID NO: 18693

SEQ ID NO: 33471 - protein, 640 aa, Neisseria meningitidis; identical to SEQ ID NO: 19467

SEQ ID NO: 33472 - protein, 352 aa, Neisseria meningitidis
MITPQQAIERLISNNELFYDEMTDLMRQIMSGKVPPEQIAAILTGLRIKVETVSEITAAAAVMREFAAKVPLEDAEGLVDIVGTGGDGAKTFNISTTSMFVAAAAGAKVAKHGGRSVSSSSGAADVMEQMGANLNLTPEQIAQSIRQTGIGFMFAPNHHSAMRYVAPVRRSLGFRSIFNILGPLTNPAGAPNQLLGVFHTDLCGILSRVLQQLGSKHVLVVCGEGGLDEITLTGKTRVAELKDGKISEYDIRPEDFGIETRRNLDEIKVANTQESLLKMNEVLEGREGAARDIVLLNTAAALYAGNVAASLSDGISAAREAIDSGRAKSKKEEFVGFQPQQRCHFLGKMELG

SEQ ID NO: 33473 - protein, 151 aa, Neisseria meningitidis; identical to SEQ ID NO: 3388

SEQ ID NO: 33474 - protein, 343 aa, Neisseria meningitidis; identical to SEQ ID NO: 17159

SEQ ID NO: 33475 - protein, 196 aa, Neisseria meningitidis; identical to SEQ ID NO: 259

SEQ ID NO: 33476 - protein, 328 aa, Neisseria meningitidis
MKRYVCLRHQVGDCPVKWQKRFFATKIYTLYFSDRGAEMEIWNMLDTWLGAVPIRAEAVESVAVVAALLLARALLLNIHFKRHPDFGIESKRRFLVASRNITLLLVLFSLAFIWSAQIQTLALSMFAVAAAVVVATKELIMCLSGSILRSATQQYSVGDYIEINGLRGRVVDINLLNTLMMQVGPNPLVGQLAGTTVSFPNSLLLSHPVRRDNILGDYVIHTVEIPVPIHLDSDEAVCRLKAVLEPLCAPYIPAIQRHLENVQAEKLFITPAARPRVTRVPYDDKAYRIIVRFASPVSKRLEIQQAVMDEFLRVQYRLLNYPAGSETL

SEQ ID NO: 33477 - protein, 187 aa, Neisseria meningitidis; identical to SEQ ID NO: 2230

SEQ ID NO: 33478 - protein, 414 aa, Neisseria meningitidis; identical to SEQ ID NO: 7206

SEQ ID NO: 33479 - protein, 84 aa, Neisseria meningitidis; identical to SEQ ID NO: 3171

SEQ ID NO: 33480 - protein, 389 aa, Neisseria meningitidis; identical to SEQ ID NO: 25090

SEQ ID NO: 33481 - protein, 72 aa, Neisseria meningitidis; identical to SEQ ID NO: 1579

SEQ ID NO: 33482 - protein, 246 aa, Neisseria meningitidis; identical to SEQ ID NO: 18239

SEQ ID NO: 33483 - protein, 279 aa, Neisseria meningitidis; identical to SEQ ID NO: 2627

SEQ ID NO: 33484 - protein, 257 aa, Neisseria meningitidis
MRPYATTIYQLFILFIGSVFTMTSCEPVNEQTSFNNPEPMTGFEHTVTFDFQGTKMVIPYGYLARYTQDNATKWLSDTPGQDAYSINLIEISVYYKKTDQGWVLEPYNQQNKAHFIQFLRDGLDSVDDIVIRKDACSLSTTMGERLLTYGVKKMPSAYPEYEAYEDKRHIPENPYFHEFYYIKKGENPAIITHRNNRINQTEEDNYSTGVGSCINGFPVRYYPFIREKQQLTQQELVGYHQQVEQLVQSFVNNSSKK

SEQ ID NO: 33485 - protein, 40 aa, Neisseria meningitidis; identical to SEQ ID NO: 14736

SEQ ID NO: 33486 - protein, 152 aa, Neisseria meningitidis
MPIISTLNILSPKLYPSEPYNESEALGAITWLWYQSPTHRQVPIVEMMTYILPVLKNGQFALFCKGTQPIGYISWAYFDEVAQAHYLESDRHLRDNSDWNCGDNIWLIQWFAPLGHSHQMRSAVRQLFPSTTVRALYHKGSDKGLRILTFKT

SEQ ID NO: 33487 - protein, 348 aa, Neisseria meningitidis; identical to SEQ ID NO: 4458

SEQ ID NO: 33488 - protein, 167 aa, Neisseria meningitidis; identical to SEQ ID NO: 25469

SEQ ID NO: 33489 - protein, 465 aa, Neisseria meningitidis; identical to SEQ ID NO: 5967

SEQ ID NO: 33490 - protein, 115 aa, Neisseria meningitidis; identical to SEQ ID NO: 18517

SEQ ID NO: 33491 - protein, 426 aa, Neisseria meningitidis
LKDCFPQGLNGKKTAVALSGGLDSVVLLHLLVRAGKKGGFIPDALHIHHGLSPRADDWADFCQNYCDMLGVGLETVKVCVEKNGLGIEAAARQKRYAAFAEKGFDVLALAHHRDDQIETFMLAVARGGGLRALAAMPTVRPFGEKGIIWRPLLPFSRQDIWDYAQKHGLPNIEDESNSDTAYLRNRFRHRILPELSAQIPHFGRHVLNNVRALQEDLALLDEIIGQDCRWVCEEGSFDTVRWQAFSPRRKTHILRYFLKENGIPMPNQNALADIARVLTEAKTGRWNLQGFELHHYAGRLFVFRLEKTDKLRFLKDRQISGNLREILTGQGFVLKRHPFGLPEHLLEQDGILRTVAVSDTLAVGGIHKDVKKILQGKRVLPVLRPIWPLVADSGNRPLALANCCADFQISVSDGILPVHPDFPILF

SEQ ID NO: 33492 - protein, 135 aa, Neisseria meningitidis; identical to SEQ ID NO: 18873

SEQ ID NO: 33493 - protein, 344 aa, Neisseria meningitidis; identical to SEQ ID NO: 18116

SEQ ID NO: 33494 - protein, 344 aa, Neisseria meningitidis; identical to SEQ ID NO: 18882

SEQ ID NO: 33495 - protein, 239 aa, Neisseria meningitidis; identical to SEQ ID NO: 1086

SEQ ID NO: 33496 - protein, 107 aa, Neisseria meningitidis; identical to SEQ ID NO: 875

SEQ ID NO: 33497 - protein, 85 aa, Neisseria meningitidis; identical to SEQ ID NO: 18915

SEQ ID NO: 33498 - protein, 182 aa, Neisseria meningitidis; identical to SEQ ID NO: 2877

SEQ ID NO: 33499 - protein, 270 aa, Neisseria meningitidis
MENIGRQRPIGVFDSGIGGLTNVRALMERLPMENIIYFGDTARVPYGTKSKATIENFSMQIVDFLLEHDVKAMVIACNTIAAVAGQKIRQKTGNMPVLDVISAGAKAALATTRNNKIGIIATNTTVNSNAYARAIHRNNPDTLVRTQAAPLLVPLVEEGWLEHEVTRLTVCEYLKPLLADGIDTLVLGCTHFPLLKPLIGREAHNVALVDSAITTAEETARVLAQEGLLNTDDNNPDYRFYVSDIPLKFRTIGERFLGRTMEQIEMVSLG

SEQ ID NO: 33500 - protein, 602 aa, Neisseria meningitidis; identical to SEQ ID NO: 25559

SEQ ID NO: 33501 - protein, 214 aa, Neisseria meningitidis; identical to SEQ ID NO: 27060

SEQ ID NO: 33502 - protein, 44 aa, Neisseria meningitidis; identical to SEQ ID NO: 6328

SEQ ID NO: 33503 - protein, 226 aa, Neisseria meningitidis; identical to SEQ ID NO: 1949

SEQ ID NO: 33504 - protein, 105 aa, Neisseria meningitidis; identical to SEQ ID NO: 29192

SEQ ID NO: 33505 - protein, 148 aa, Neisseria meningitidis
MAHFMGLALEQAKLSALMGEIPVGAVIVSDGKIIASAHNTCIADCNVSRHAEINALAQAGSEMQNYRLDGCDIYITLEPCAMCASALIQARIRRVIYGAAEPKTGAAGSIVNLFADKRLNTHTAIRGGILQEECRAVLSRFFQNKRKG

SEQ ID NO: 33506 - protein, 223 aa, Neisseria meningitidis; identical to SEQ ID NO: 18434

SEQ ID NO: 33507 - protein, 556 aa, Neisseria meningitidis
VRAEDTPYACYLKQLQVTKDVNWNQVQLAYDKWDYKQEGLTGAGAAIIALAVTVVTAGAGAGAALGLNGAAAAATDAAFASLASQASVSLINNKGNIGNTLKELGRSSTVKNLMVAVATAGVADKIGASALNNVSDKQWINNLTVNLANAGSAALINTAVNGGSLKDNLEANILAALVNTAHGEAASKIKQLDQHYITHKIAHAIAGCAAAAANKGKCQDGAIGAAVGEIVGEALVKNTDFSRMSATEIEKAKAKITAYSKLVAGTASAVVGGDVNTAANAATVAVENNTLYPRCVGAKCDEFQKEQQKWIRENPEEYREVLLLQTGFIPIIGDIQSFVQAQTAADHLFALLGVVPGIGESIQAYKVAKAAKNLQGMKKALDKAATVATAQGYVSKTKIKIGQTELRVTAATDKQLLKAIGEGRDTTGKMTEQLFDSLAKQNGFRVLSGGKYGGNNGFDHVWQAADGSVVLIVESKQIRNGTVQLNPNGAGGYTQMSREWIKQVVKSLPDGSPAKAVVLKANQNGKLKTAIAGVDRQTGKAVILSVKVPSKTNIRR

SEQ ID NO: 33508 - protein, 456 aa, Neisseria meningitidis; identical to SEQ ID NO: 19918

SEQ ID NO: 33509 - protein, 808 aa, Neisseria meningitidis
MSAQTDPGYFFMPNHIILIGASERPYSLGERVLSNLLSTPFQGKITPVNPRHHTIAGLPAYTSLNKIPGNADLIIAVTLPDSYDTLFKTCRKKQLRHIILIQDWDSLSAAELHTAETAIRKHHGNGLNITACTTAGIQLPSLGLNISTQDGYAAGHTAILTGNAAVSRQIDNILNKLRQGTSRHISLHPGISPITSADWLNRFGHSLHTKTAVLHHNPEEDQRKLFSAIRQFTRHTPLILHITCRTTETDRAVLHCLARHCNFLISFNADDLEAALRAQLSDLPPLSRLDILSDTPAEWLNAHAPKTLALHFPNLPHHIRNGHLTGTPTPSICHDIASRQLARPDTQAVLTILSPSGHEDYKKTARALIRLSEQTAKPLLVSSPFSDGITHFDTPTQAIRTLSYRNTAAALKQAQLDIAPPQPCRLKTPQPQNIKKALAAANPSLLAEALHLPPYRHTTHNAVQFQFGSHPIYGNILTVRYAGQTTAALPPFTTQDSLHIAQFAELEDPQTLNQFLHILTTLSDHNLHIGKITLNLNGGQYSSDFILKTPETHDTPKRKNTGKAAQTLEHAAAKMQSAAAYLKHKNPTAAEFLRHTSEAAAELLGSKTETGAAVPNVLAPYPAAHLKTLSLKNNTTVTITPLLPEDAEAKQQFVRSLSPEARYTRFMTHTNELPAATLARLCNPDYHCEAAWTARDADSNIVAVVRHSRLNRNECEFGITLAEHMRGSGLAQKMMELIIQTAAQQGYRTMSADILKTNTPMIKLAEKSGFTLKESDTEKNLYRAYLNLAADKTTEKTNKNLHTDHKIT

SEQ ID NO: 33510 - protein, 242 aa, Neisseria meningitidis
MAFASLFTLPDDITAVLDDVALMTKAAAKKTAGMVGDDLAPNANRVTGVSAERELPIVWSMAKGSFSNKPVLVPAALLLSAFLPQLITPLLTAGGIYLCFEGVEKLLHKFLHRHDAHARNGGNRHRHDCFGVRNRCRHRQTRRLRHAADAPPTNLFAQFGANADCLYALLYARFERGRHACHVSYRRRTGRPQPRPSARFPARATLGRWLGGVLRQPRCRAAFRFDCLRPRLAADESFRQAL

SEQ ID NO: 33511 - protein, 322 aa, Neisseria meningitidis; identical to SEQ ID NO: 3333

SEQ ID NO: 33512 - protein, 140 aa, Neisseria meningitidis; identical to SEQ ID NO: 2178

SEQ ID NO: 33513 - protein, 363 aa, Neisseria meningitidis; identical to SEQ ID NO: 24977

SEQ ID NO: 33514 - protein, 483 aa, Neisseria meningitidis; identical to SEQ ID NO: 19390

SEQ ID NO: 33515 - protein, 157 aa, Neisseria meningitidis; identical to SEQ ID NO: 18150

SEQ ID NO: 33516 - protein, 94 aa, Neisseria meningitidis; identical to SEQ ID NO: 11561

SEQ ID NO: 33517 - protein, 202 aa, Neisseria meningitidis; identical to SEQ ID NO: 597

SEQ ID NO: 33518 - protein, 271 aa, Neisseria meningitidis; identical to SEQ ID NO: 3345

SEQ ID NO: 33519 - protein, 298 aa, Neisseria meningitidis; identical to SEQ ID NO: 10697

SEQ ID NO: 33520 - protein, 143 aa, Neisseria meningitidis; identical to SEQ ID NO: 362

SEQ ID NO: 33521 - protein, 193 aa, Neisseria meningitidis; identical to SEQ ID NO: 25324

SEQ ID NO: 33522 - protein, 41 aa, Neisseria meningitidis; identical to SEQ ID NO: 2201

SEQ ID NO: 33523 - protein, 245 aa, Neisseria meningitidis; identical to SEQ ID NO: 18740

SEQ ID NO: 33524 - protein, 126 aa, Neisseria meningitidis; identical to SEQ ID NO: 6506

SEQ ID NO: 33525 - protein, 268 aa, Neisseria meningitidis; identical to SEQ ID NO: 8872

SEQ ID NO: 33526 - protein, 280 aa, Neisseria meningitidis; identical to SEQ ID NO: 24297

SEQ ID NO: 33527 - protein, 127 aa, Neisseria meningitidis; identical to SEQ ID NO: 18437

SEQ ID NO: 33528 - protein, 310 aa, Neisseria meningitidis; identical to SEQ ID NO: 8806

SEQ ID NO: 33529 - protein, 171 aa, Neisseria meningitidis; identical to SEQ ID NO: 18791

SEQ ID NO: 33530 - protein, 260 aa, Neisseria meningitidis; identical to SEQ ID NO: 3655

SEQ ID NO: 33531 - protein, 140 aa, Neisseria meningitidis; identical to SEQ ID NO: 590

SEQ ID NO: 33532 - protein, 195 aa, Neisseria meningitidis; identical to SEQ ID NO: 15117

SEQ ID NO: 33533 - protein, 398 aa, Neisseria meningitidis
MPSEPFGRHNATNTLISITQDDTMTLIKPVIAALALIGLAACSGSKTEQPKLDYQSRSHRLIKLEVPPDLNNPDQGSLYRLPAGSGAVRASDLEKRRTPAVQQPADAEVLKSVKGVRLERDGSQRWLVVDGKSPAEIWPLLKAFWQENGFDIKSEEPAIGQMETEWAENRAKIPQDSLRRLFDTVGLGGIYSTGERDKFIVRIEQGKNGVSDIFFAHKAMKEVYGGKDKDTTVWQPSPSDPNLEAAFLTRFMQYLGVDGQQAENASAKNPTLPAANEMARIEGKSLIVFGDYGRNWRRTALALDRIGLTVVGQNTERHAFLVQKAPNESNAVTEQKPGLFKRLLGKGKAEKPAEQPELIVYAEPVANGSRIVLLNKDGSAYAGKDASALLGKLHSELR

SEQ ID NO: 33534 - protein, 208 aa, Neisseria meningitidis; identical to SEQ ID NO: 24240

SEQ ID NO: 33535 - protein, 119 aa, Neisseria meningitidis; identical to SEQ ID NO: 16438

SEQ ID NO: 33536 - protein, 162 aa, Neisseria meningitidis; identical to SEQ ID NO: 18748

SEQ ID NO: 33537 - protein, 218 aa, Neisseria meningitidis; identical to SEQ ID NO: 8119

SEQ ID NO: 33538 - protein, 58 aa, Neisseria meningitidis; identical to SEQ ID NO: 2174

SEQ ID NO: 33539 - protein, 128 aa, Neisseria meningitidis; identical to SEQ ID NO: 18385

SEQ ID NO: 33540 - protein, 693 aa, Neisseria meningitidis; identical to SEQ ID NO: 24210

SEQ ID NO: 33541 - protein, 272 aa, Neisseria meningitidis
MKKTVFTCAMIALTGTAAAAQELQTANEFTVHTDLSSISSTRAFLKEKHKAAKHIGVRADIPFDANQGIRLEAGFGRSKKNIINLETDENKLGKTKNVKLPTGVPENRIDLYTGYTYTQTLSDSLNFRVGAGLGFESSKDSIKTTKHTLHSSRQSWSAKVHADLLSQLGNGWYINPWSEVKFDLKSRYKLNTGVTSLKKDINQKTNGWGFGLGANIGKKLGESASIEAGPFYKQRTYKESGEFSVPTKSGDVSLTIPKTSIREYGLRVGIKF

SEQ ID NO: 33542 - protein, 96 aa, Neisseria meningitidis; identical to SEQ ID NO: 2317

SEQ ID NO: 33543 - protein, 944 aa, Neisseria meningitidis; identical to SEQ ID NO: 24425

SEQ ID NO: 33544 - protein, 85 aa, Neisseria meningitidis; identical to SEQ ID NO: 19168

SEQ ID NO: 33545 - protein, 335 aa, Neisseria meningitidis
MSTFFQQTAQAMIAKHIDRFPLLKLDQVIDWQPIEQYLNRQKTRYLRDHRGRPAYPLLSMFKAVLLGQWHSLSDPELEHSLITRIDFNLFCRFDELSIPDYSTLCRYRNWLAQDDTLSELLKLINRQLTEKGLKIEKASAAVVDATIIQTAGSKQRQAIEVDEEGQISGQTTPSKDSDARWIKKNGLYKLGYKQHTRTDAEGYIEKLHITPANAHECKHLSPLLEGLPEGTTVYADKGYDSAENRQHLEEHQLLDGIMRKACRNRPLSEVQTKRNRYLSKTRYVVEQSFGTLHRKFRYARAAYFGLIKVSAQSHLKAMCLNLLKAANRLSAPAAA

SEQ ID NO: 33546 - protein, 164 aa, Neisseria meningitidis; identical to SEQ ID NO: 8223

SEQ ID NO: 33547 - protein, 211 aa, Neisseria meningitidis; identical to SEQ ID NO: 19275

SEQ ID NO: 33548 - protein, 77 aa, Neisseria meningitidis; identical to SEQ ID NO: 760

SEQ ID NO: 33549 - protein, 86 aa, Neisseria meningitidis; identical to SEQ ID NO: 4508

SEQ ID NO: 33550 - protein, 109 aa, Neisseria meningitidis; identical to SEQ ID NO: 4604

SEQ ID NO: 33551 - protein, 287 aa, Neisseria meningitidis; identical to SEQ ID NO: 8500

SEQ ID NO: 33552 - protein, 233 aa, Neisseria meningitidis; identical to SEQ ID NO: 4313

SEQ ID NO: 33553 - protein, 187 aa, Neisseria meningitidis; identical to SEQ ID NO: 25357

SEQ ID NO: 33554 - protein, 336 aa, Neisseria meningitidis; identical to SEQ ID NO: 25174

SEQ ID NO: 33555 - protein, 125 aa, Neisseria meningitidis; identical to SEQ ID NO: 24956

SEQ ID NO: 33556 - protein, 90 aa, Neisseria meningitidis; identical to SEQ ID NO: 1142

SEQ ID NO: 33557 - protein, 218 aa, Neisseria meningitidis; identical to SEQ ID NO: 18780

SEQ ID NO: 33558 - protein, 412 aa, Neisseria meningitidis; identical to SEQ ID NO: 25825

SEQ ID NO: 33559 - protein, 149 aa, Neisseria meningitidis; identical to SEQ ID NO: 4552

SEQ ID NO: 33560 - protein, 253 aa, Neisseria meningitidis
MTEFVVLIPARLDSSRLPGKALADIHGKPMVVRVAEQAAKSKAVRVVVATDHPDIQTACQAHGVEVVMTSNRHESGTTRLAEASAALKLPPHLVVVNVQGDEPLIAPELIDRTAEVLVENNVQMATAAHELHDFDELMNPNAVKVVLDKNRNAIYFSRAPIPYPRDAMRAGKREMPFETAVLRHIGIYAYRVGFLQRYTEMRVSPLETIESLEQLRVLWHGYPIAVETAKEAPAAGVDTQEDLDRIRAVFQTI

SEQ ID NO: 33561 - protein, 887 aa, Neisseria meningitidis; identical to SEQ ID NO: 24304

SEQ ID NO: 33562 - protein, 152 aa, Neisseria meningitidis; identical to SEQ ID NO: 1697

SEQ ID NO: 33563 - protein, 147 aa, Neisseria meningitidis; identical to SEQ ID NO: 1095

SEQ ID NO: 33564 - protein, 120 aa, Neisseria meningitidis; identical to SEQ ID NO: 7043

SEQ ID NO: 33565 - protein, 223 aa, Neisseria meningitidis; identical to SEQ ID NO: 2385

SEQ ID NO: 33566 - protein, 119 aa, Neisseria meningitidis; identical to SEQ ID NO: 3183

SEQ ID NO: 33567 - protein, 67 aa, Neisseria meningitidis; identical to SEQ ID NO: 18946

SEQ ID NO: 33568 - protein, 210 aa, Neisseria meningitidis; identical to SEQ ID NO: 3262

SEQ ID NO: 33569 - protein, 580 aa, Neisseria meningitidis; identical to SEQ ID NO: 24118

SEQ ID NO: 33570 - protein, 125 aa, Neisseria meningitidis; identical to SEQ ID NO: 535

SEQ ID NO: 33571 - protein, 678 aa, Neisseria meningitidis; identical to SEQ ID NO: 25187

SEQ ID NO: 33572 - protein, 262 aa, Neisseria meningitidis; identical to SEQ ID NO: 19454

SEQ ID NO: 33573 - protein, 43 aa, Neisseria meningitidis; identical to SEQ ID NO: 2340

SEQ ID NO: 33574 - protein, 371 aa, Neisseria meningitidis; identical to SEQ ID NO: 29647

SEQ ID NO: 33575 - protein, 94 aa, Neisseria meningitidis; identical to SEQ ID NO: 944

SEQ ID NO: 33576 - protein, 230 aa, Neisseria meningitidis; identical to SEQ ID NO: 675

SEQ ID NO: 33577 - protein, 706 aa, Neisseria meningitidis; identical to SEQ ID NO: 18585

SEQ ID NO: 33578 - protein, 58 aa, Neisseria meningitidis; identical to SEQ ID NO: 19474

SEQ ID NO: 33579 - protein, 63 aa, Neisseria meningitidis; identical to SEQ ID NO: 7354

SEQ ID NO: 33580 - protein, 505 aa, Neisseria meningitidis; identical to SEQ ID NO: 25322

SEQ ID NO: 33581 - protein, 469 aa, Neisseria meningitidis
MKYISTRGETAHKPFSEVLLMGLAPDGGLMLPEHYPQIGRETLDKWRGSAYPELAFEIMRLFVTDIPEDDLRDILNRTYTEAAFGTKEITPVRTLSDGIKIQALSNGPTLAFKDMAMQFLGNAFEYVLNKEGKKLNILGATSGDTGSAAEYALRGKKGVNVFMLSPDGKMSAFQRAQMYSLQDENIHNIAVKGMFDDCQDIVKAVQNDAAFKEKYHIGTVNSINWGRIVAQVVYYFAGYFNATSSNDETVSFCVPSGNFGNVCAGHIAKQMGLPIRRLIVATNENDVLDEFFKTGAYRPRNSAHTYVTSSPSMDISKASNFERFVFDLMDRDPAEINTLWAEVAAGKGFDLRFALDKVGGKYGFTSGKSTHADRLATIKQVYEQDQELIDPHTADGVKVAREVREEGEMVVCLETALAAKFDATIREAVGDAAIPRPAALEGLENLPQRVQTVPNSADAVKGIIEQTLA

SEQ ID NO: 33582 - protein, 275 aa, Neisseria meningitidis; identical to SEQ ID NO: 12127

SEQ ID NO: 33583 - protein, 213 aa, Neisseria meningitidis; identical to SEQ ID NO: 5657

SEQ ID NO: 33584 - protein, 312 aa, Neisseria meningitidis; identical to SEQ ID NO: 25856

SEQ ID NO: 33585 - protein, 119 aa, Neisseria meningitidis; identical to SEQ ID NO: 19477

SEQ ID NO: 33586 - protein, 242 aa, Neisseria meningitidis; identical to SEQ ID NO: 18805

SEQ ID NO: 33587 - protein, 162 aa, Neisseria meningitidis; identical to SEQ ID NO: 19196

SEQ ID NO: 33588 - protein, 252 aa, Neisseria meningitidis; identical to SEQ ID NO: 2885

SEQ ID NO: 33589 - protein, 151 aa, Neisseria meningitidis; identical to SEQ ID NO: 25017

SEQ ID NO: 33590 - protein, 328 aa, Neisseria meningitidis; identical to SEQ ID NO: 19312

SEQ ID NO: 33591 - protein, 111 aa, Neisseria meningitidis; identical to SEQ ID NO: 8680

SEQ ID NO: 33592 - protein, 314 aa, Neisseria meningitidis; identical to SEQ ID NO: 18168

SEQ ID NO: 33593 - protein, 556 aa, Neisseria meningitidis; identical to SEQ ID NO: 2805

SEQ ID NO: 33594 - protein, 218 aa, Neisseria meningitidis; identical to SEQ ID NO: 24582

SEQ ID NO: 33595 - protein, 210 aa, Neisseria meningitidis; identical to SEQ ID NO: 48

SEQ ID NO: 33596 - protein, 406 aa, Neisseria meningitidis
LDKWEITIMAKIITPLSANQVKNAKPRDKLYKLSDGGGLALWVYPTGGRSWKLSFVQDGRQQTISLGRYPDFSLADAREWREEVRRKRAHGENVVNKKVRADFAFEKVTRDWFVRWSKGRSEKYAGQVMRNFERWVFPAIGNLDIRQVRTADVVGCLRVMEARGIVDTLRKTKNSLKMVFAFAVGSGMMEINPVAQIGSGVFERAKTGNMAALSPSELPRLIDFLEQRNEFAVYAGRVRIHPVTRLCIYWLLLTMTRIQEAALMEWSELDGEVWRIPAERKKERRGHDVPLSRAMQWVLDQARALNVNGRFVFESVNFQGHINKESPRVAMQRAGLDTTAHGLRSLARTYLREVLKVDNDVAEKLLAHSLGTRTQTAYNRSELWEERKDALERWGNDVLRLAKNGK

SEQ ID NO: 33597 - protein, 278 aa, Neisseria meningitidis; identical to SEQ ID NO: 25099

SEQ ID NO: 33598 - protein, 428 aa, Neisseria meningitidis; identical to SEQ ID NO: 18698

SEQ ID NO: 33599 - protein, 125 aa, Neisseria meningitidis; identical to SEQ ID NO: 348

SEQ ID NO: 33600 - protein, 608 aa, Neisseria meningitidis; identical to SEQ ID NO: 25889

SEQ ID NO: 33601 - protein, 163 aa, Neisseria meningitidis; identical to SEQ ID NO: 18129

SEQ ID NO: 33602 - protein, 123 aa, Neisseria meningitidis
MNKTLSILPVAILLGGCAAGGGNTFGSLDGGTGMGGSIVKMAVGSQCRAELDKRSEWRLTALAMSAEKQAEWENKICACVAQEAPERMTGNDVMQMLASSTRNQALAALTAKTVSACFKHLYR

SEQ ID NO: 33603 - protein, 316 aa, Neisseria meningitidis; identical to SEQ ID NO: 6611

SEQ ID NO: 33604 - protein, 384 aa, Neisseria meningitidis; identical to SEQ ID NO: 4520

SEQ ID NO: 33605 - protein, 367 aa, Neisseria meningitidis; identical to SEQ ID NO: 3396

SEQ ID NO: 33606 - protein, 311 aa, Neisseria meningitidis; identical to SEQ ID NO: 18238

SEQ ID NO: 33607 - protein, 249 aa, Neisseria meningitidis; identical to SEQ ID NO: 25288

SEQ ID NO: 33608 - protein, 304 aa, Neisseria meningitidis; identical to SEQ ID NO: 3139

SEQ ID NO: 33609 - protein, 714 aa, Neisseria meningitidis; identical to SEQ ID NO: 18756

SEQ ID NO: 33610 - protein, 389 aa, Neisseria meningitidis; identical to SEQ ID NO: 19357

SEQ ID NO: 33611 - protein, 321 aa, Neisseria meningitidis; identical to SEQ ID NO: 6149

SEQ ID NO: 33612 - protein, 451 aa, Neisseria meningitidis
MSEYTPQTAKQGLPALAKSTIWMLSFGFLGVQTAFTLQSSQMSRIFQTLGADPHSLGWFFILPPLAGMLVQPIVGHYSDRTWKPRLGGRRLPYLLYGTLIAVIVMILMPNSGSFGFGYASLAALSFGALMIALLDVSSNMAMQPFKMMVGDMVNEEQKGYAYGIQSFLANTGAVVAAILPFVFAYIGLANTAEKGVVPQTVVVAFYVGAALLIITSAFTIFKVKEYDPETYARYHGIDVAANQEKANWFELLKTAPKAFWTVTLVQFFCWFAFQYMWTYSAGAIAENVWHTTDASSVGYQEAGNWYGVLAAVQSVAAVICSFVLAKVPNKYHKAGYFGCLALGALGFFSVFFIGNQYALVLSYTLIGIAWAGIITYPLTIVTNALSGKHMGTYLGLFNGSICMPQIVASLLSFVLFPMMGGLQANMFLVGGVVLLLGAFSVFLIKETHGGV

SEQ ID NO: 33613 - protein, 278 aa, Neisseria meningitidis; identical to SEQ ID NO: 24461

SEQ ID NO: 33614 - protein, 169 aa, Neisseria meningitidis; identical to SEQ ID NO: 111

SEQ ID NO: 33615 - protein, 307 aa, Neisseria meningitidis; identical to SEQ ID NO: 983

SEQ ID NO: 33616 - protein, 305 aa, Neisseria meningitidis
MSVYTSVSDDEMRGFLSGYDLGEFVSLQGIAQGITNSNYFLTTTSGRYVLTVFEVLKQEELPFFLELNRHLSMKGVAVAAPVARKDGRLDSVLAGKPACLVACLKGSDTALPTAEQCFHTGAMLAKMHLAAADFPLEMENPRYDAWWTEACTRLLPVLSQDDAALLCSEIDALKDNLGNHLPSGIIHADLFKDNVLLDGGQVSGFIDFYYACRGNFMYDLAIAVNDWARTADNKLDEALKKVFIGGYEGVRPLSAEEKAYFPTAQRAGCIRFWVSRLLDFHFPQAGEMTFIKDPNAFRNLLLSLD

SEQ ID NO: 33617 - protein, 259 aa, Neisseria meningitidis; identical to SEQ ID NO: 1423

SEQ ID NO: 33618 - protein, 245 aa, Neisseria meningitidis
MALQDRTGQKVPSVVFRTRVGDTWKDVSTDDLFKGKKVVVFSLPGAFTPTCSSSHLPRYNELFGAFKENGVDAIYCVSVNDTFVMNAWAAEEESDNIYMIPDGNGEFTEGMGMLVGKEDLGFGKRSWRYSMLVNDGVVEKMFIEPEEPGDPFKVSDADTMLKFVAPNWKAQESVAIFTKPGCQFCAKAKQALQDKGLSYEEIVLGKDATVTSVRAITGKMTAPQVFIGGKYIGGSEDLEAYLAKN

SEQ ID NO: 33619 - protein, 274 aa, Neisseria meningitidis; identical to SEQ ID NO: 5721

SEQ ID NO: 33620 - protein, 43 aa, Neisseria meningitidis
MRDFDKLAEEAAEHAAEGAVKFIDGKPAKKIIAVPGRLANIVV

SEQ ID NO: 33621 - protein, 148 aa, Neisseria meningitidis; identical to SEQ ID NO: 24250

SEQ ID NO: 33622 - protein, 333 aa, Neisseria meningitidis
MKRKIWLLPLLAVSAYLQAQTEVRLAVHKSFSLPKGLIARFERANDAKVSIIQAGGANEMLNKLILSRANPIADAVYGLDNANIGKAREMGILAAAQPGSAPVAVGLPSALAVDYGYVSINYDKKWFEGKKLPLPQTLQDLTRPEYKNLLVVPSPATSSPGLGFLMANISGLGEEGAFKWWAQMRQNGVKVAKGWSEAYYTDFSHNGGAYPLVVGYAASPAAEVYFSKGKYSEPPTGNLFLKGGVFRQVEGAAVLKGAKQPELAAKLVQWLQSREVQQAVPSEMWVYPAVKNTRLPDVFRFAQAPTHTTAPAQRDIDANQRGWVSRWIRTVLK

SEQ ID NO: 33623 - protein, 39 aa, Neisseria meningitidis; identical to SEQ ID NO: 7406

SEQ ID NO: 33624 - protein, 129 aa, Neisseria meningitidis; identical to SEQ ID NO: 14100

SEQ ID NO: 33625 - protein, 96 aa, Neisseria meningitidis; identical to SEQ ID NO: 2317

SEQ ID NO: 33626 - protein, 102 aa, Neisseria meningitidis; identical to SEQ ID NO: 254

SEQ ID NO: 33627 - protein, 107 aa, Neisseria meningitidis
MTGFNDAAGVASASDIKGKYVEKVEVKNGVVTAEMASSNVNKEIQGRKLSLWAKRQAGSVKWFCGQPVTRADKATDADADVTADSGNEKIDTKHLPSTAPTRKSTPN

SEQ ID NO: 33628 - protein, 276 aa, Neisseria meningitidis; identical to SEQ ID NO: 15375

SEQ ID NO: 33629 - protein, 70 aa, Neisseria meningitidis; identical to SEQ ID NO: 19466

SEQ ID NO: 33630 - protein, 366 aa, Neisseria meningitidis
METQLYIGIMSGTSMDGADAVLVRMDGGKWLGAEGHAFTPYPGRLRRKLLDLQDTGADELHRSRMLSQELSRLYAQTAAELLCSQNLAPSDITALGCHGQTVRHAPEHSYSVQLADLPLLAERTQIFTVGDFRSRDLAAGGQGAPLVPAFHKALFRDDKETRVVLNIGGIANISVLPSDAPAFGFDTGPGNMLMDAWTQAHWQLPYDKNGEKAAQGNILPQLLDRLLAHPYFARPHPKSTGRELFALNWLETYLDGGENRYDVLRTLSRFTAQTVFDAVSHAAADARQMYICGGGIRNPVLMADLADCFGTRVSLRSTAELKLDPQWVEAAAFAWLAACWINRIPGSPHKATGASKPCILGAGYYY

SEQ ID NO: 33631 - protein, 472 aa, Neisseria meningitidis; identical to SEQ ID NO: 18056

SEQ ID NO: 33632 - protein, 173 aa, Neisseria meningitidis; identical to SEQ ID NO: 19372

SEQ ID NO: 33633 - protein, 758 aa, Neisseria meningitidis; identical to SEQ ID NO: 25435

SEQ ID NO: 33634 - protein, 371 aa, Neisseria meningitidis; identical to SEQ ID NO: 849

SEQ ID NO: 33635 - protein, 415 aa, Neisseria meningitidis; identical to SEQ ID NO: 18235

SEQ ID NO: 33636 - protein, 181 aa, Neisseria meningitidis; identical to SEQ ID NO: 3765

SEQ ID NO: 33637 - protein, 307 aa, Neisseria meningitidis; identical to SEQ ID NO: 2891

SEQ ID NO: 33638 - protein, 201 aa, Neisseria meningitidis; identical to SEQ ID NO: 10369

SEQ ID NO: 33639 - protein, 367 aa, Neisseria meningitidis; identical to SEQ ID NO: 6599

SEQ ID NO: 33640 - protein, 207 aa, Neisseria meningitidis; identical to SEQ ID NO: 1132

SEQ ID NO: 33641 - protein, 282 aa, Neisseria meningitidis; identical to SEQ ID NO: 1327

SEQ ID NO: 33642 - protein, 207 aa, Neisseria meningitidis; identical to SEQ ID NO: 2101

SEQ ID NO: 33643 - protein, 119 aa, Neisseria meningitidis; identical to SEQ ID NO: 420

SEQ ID NO: 33644 - protein, 468 aa, Neisseria meningitidis; identical to SEQ ID NO: 24708

SEQ ID NO: 33645 - protein, 394 aa, Neisseria meningitidis; identical to SEQ ID NO: 1253

SEQ ID NO: 33646 - protein, 219 aa, Neisseria meningitidis; identical to SEQ ID NO: 8069

SEQ ID NO: 33647 - protein, 171 aa, Neisseria meningitidis; identical to SEQ ID NO: 18950

SEQ ID NO: 33648 - protein, 186 aa, Neisseria meningitidis; identical to SEQ ID NO: 1228

SEQ ID NO: 33649 - protein, 243 aa, Neisseria meningitidis; identical to SEQ ID NO: 19739

SEQ ID NO: 33650 - protein, 389 aa, Neisseria meningitidis
LHKACCKPKIGRVIVQNQGCIMSLYPIYNFSAGPAVLPEAVLETARQEMLDYNGTGFPVMAMSHRSEMFLSILHHAEQDLRQLLKVPDNYKILFLQGGATTQFNMAAMNLAHGFRTADAVVTGNWSRIAYEQMSRLTDTEIRLAAHGGEQFDYLDLPPVETWDVAPDSAFVHFAVNETVNGLQYREVPRLSEGMPPLVCDMSSEILSREFDVADYGLIYAGAQKNIGPAGVTVVIVREDLLERCPNDIPDVFNYRSHLNREGMYNTPSTYAIYMSGLVFRWLQAQGGVKKIEAVNRLKAQTLYETIDGSGGFYINRIRPNARSKMNVVFQTGDEELDRRFVLEAELQGLCLLKGYKSVGGMRASIYNAMPLEGVRALADFMRDFQRRYG

SEQ ID NO: 33651 - protein, 224 aa, Neisseria meningitidis; identical to SEQ ID NO: 18482

SEQ ID NO: 33652 - protein, 250 aa, Neisseria meningitidis; identical to SEQ ID NO: 2214

SEQ ID NO: 33653 - protein, 489 aa, Neisseria meningitidis; identical to SEQ ID NO: 7627

SEQ ID NO: 33654 - protein, 392 aa, Neisseria meningitidis
MAKMMKWAAVAAVAAAAVWGGWSYLKPEPQAAYITEAVRRGDISRTVSATGEISPSNLVSVGAQASGQIKKLYVKLGQQVKKGDLIAEINSTSQTNTLNTEKSKLETYQAKLVSAQIALGSAEKKYKRQAALWKENATSKEDLESAQDAFAAAKANVAELKALIRQSKISINTAESELGYTRITATMDGTVVAILVEEGQTVNAAQSTPTIVQLANLDMMLNKMQIAEGDITKVKAGQDISFTILSEPDTPIKAKLDSVDPGLTTMSSGGYNSSTDTASNAVYYYARSFVPNSDGKLATGMTTQNTVEIDGVKNVLIIPSLTVKNRGGKAFVRVLGADGKAAEREIRTGMRDSMNTEVKSGLKEGDKVVISEITAAEQQESGERALGGPPRR

SEQ ID NO: 33655 - protein, 194 aa, Neisseria meningitidis; identical to SEQ ID NO: 25836

SEQ ID NO: 33656 - protein, 94 aa, Neisseria meningitidis; identical to SEQ ID NO: 24224

SEQ ID NO: 33657 - protein, 594 aa, Neisseria meningitidis
MNKIYRIIWNSALNAWVVVSELTRNHTKRASATVATAVLATLLFATVQANATDDDDLYLEPVQRTAVVLSFRSDKEGTGEKEGTEDSNWAVYFDEKRVLKAGAITLKAGDNLKIKQNTNENTNDSSFTYSLKKDLTDLTSVETEKLSFGANGNKVNITSDTKGLNFAKETAGTNGDPTVHLNGIGSTLTDTLLNTGATTNVTNDNVTDDEKKRAASVKDVLNAGWNIKGVKPGTTASDNVDFVRTYDTVEFLSADTKTTTVNVESKDNGKKTEVKIGAKTSVIKEKDGKLVTGKGKDENGSSTDEGEGLVTAKEVIDAVNKAGWRMKTTTANGQTGQADKFETVTSGTNVTFASGKGTTATVSKDDQGNITVKYDVNVGDALNVNQLQNSGWNLDSKAVAGSSGKVISGNVSPSKGKMDETVNINAGNNIEITRNGKNIDIATSMAPQFSSVSLGAGADAPTLSVDDEGALNVGSKDTNKPVRITNVAPGVKEGDVTNVAQLKGVAQNLNNRIDNVDGNARAGIAQAIATAGLVQAYLPGKSMMAIGGDTYRGEAGYAIGYSSISDGGNWIIKGTASGNSRGHFGASASVGYQW

SEQ ID NO: 33658 - protein, 284 aa, Neisseria meningitidis; identical to SEQ ID NO: 506

SEQ ID NO: 33659 - protein, 237 aa, Neisseria meningitidis; identical to SEQ ID NO: 5135

SEQ ID NO: 33660 - protein, 157 aa, Neisseria meningitidis; identical to SEQ ID NO: 7285

SEQ ID NO: 33661 - protein, 477 aa, Neisseria meningitidis; identical to SEQ ID NO: 3214

SEQ ID NO: 33662 - protein, 307 aa, Neisseria meningitidis; identical to SEQ ID NO: 24942

SEQ ID NO: 33663 - protein, 107 aa, Neisseria meningitidis; identical to SEQ ID NO: 1495

SEQ ID NO: 33664 - protein, 140 aa, Neisseria meningitidis; identical to SEQ ID NO: 18288

SEQ ID NO: 33665 - protein, 130 aa, Neisseria meningitidis; identical to SEQ ID NO: 425

SEQ ID NO: 33666 - protein, 488 aa, Neisseria meningitidis; identical to SEQ ID NO: 3704

SEQ ID NO: 33667 - protein, 416 aa, Neisseria meningitidis
MFSKSVTLAQYDPDLAAAIAQEDQRQQDHVELIASENYVSCAVMETQGSQLTNKYAEGYPGKRYYGGCEYVDIVEQLAIDRVKKLFGAQYANVQPHSGSQANQAVYASVLKPGDTILGMSLAHGGHLTHGASVNISGKLYNAVTYGLDENEVLDYAEVERLALEHKPKMIVAGASAYALQIDWAKFREIADKVGAYLFVDMAHYAGLIAGGEYPNPVPFCDFVTTTTHKTLRGPRGGVILCRDNTHEKALNSSIFPSLQGGPLMHVIAAKAVAFKEALQPEFKQYAKQVKINAAAMAEELVKRGLRIVSGRTESHVFLVDLQPMKITGKAAEAALGKAHITVNKNAIPNDPEKPFVTSGIRIGSAAMTTRGFNEADARVLANLVADVLSNPEDEANLAKVREQVTALCNKYTVYGA

SEQ ID NO: 33668 - protein, 144 aa, Neisseria meningitidis; identical to SEQ ID NO: 25274

SEQ ID NO: 33669 - protein, 242 aa, Neisseria meningitidis; identical to SEQ ID NO: 5117

SEQ ID NO: 33670 - protein, 428 aa, Neisseria meningitidis; identical to SEQ ID NO: 18332

SEQ ID NO: 33671 - protein, 280 aa, Neisseria meningitidis; identical to SEQ ID NO: 19123

SEQ ID NO: 33672 - protein, 113 aa, Neisseria meningitidis; identical to SEQ ID NO: 118

SEQ ID NO: 33673 - protein, 515 aa, Neisseria meningitidis; identical to SEQ ID NO: 654

SEQ ID NO: 33674 - protein, 478 aa, Neisseria meningitidis; identical to SEQ ID NO: 22965

SEQ ID NO: 33675 - protein, 199 aa, Neisseria meningitidis; identical to SEQ ID NO: 2043

SEQ ID NO: 33676 - protein, 186 aa, Neisseria meningitidis; identical to SEQ ID NO: 25663

SEQ ID NO: 33677 - protein, 200 aa, Neisseria meningitidis; identical to SEQ ID NO: 19173

SEQ ID NO: 33678 - protein, 118 aa, Neisseria meningitidis; identical to SEQ ID NO: 2492

SEQ ID NO: 33679 - protein, 65 aa, Neisseria meningitidis; identical to SEQ ID NO: 926

SEQ ID NO: 33680 - protein, 111 aa, Neisseria meningitidis; identical to SEQ ID NO: 7069

SEQ ID NO: 33681 - protein, 561 aa, Neisseria meningitidis
MSMENFAQLLEESFTLQEMNPGEVITAEVVAIDQNFVTVNAGLKSESLIDVAEFKNAQGEIEVKVGDFVTVTIESVENGFGETKLSREKAKRAADWIALEEAMENGDILSGIINGKVKGGLTVMISSIRAFLPGSLVDVRPVKDTSHFEGKEIEFKVIKLDKKRNNVVVSRRAVLEATLGEERKALLENLQEGSVIKGIVKNITDYGAFVDLGGIDGLLHITDLAWRRVKHPSEVLEVGQEVEAKVLKFDQEKQRVSLGMKQLGEDPWSGLTRRYPQGTRLFGKVSNLTDYGAFVEIEQGIEGLVHVSEMDWTNKNVHPSKVVQLGDEVEVMILEIDEGRRRISLGMKQCQANPWEEFAANHNKGDKISGAVKSITDFGVFVGLPGGIDGLVHLSDLSWTESGEEAVRKYKKGEEVEAVVLAIDVEKERISLGIKQLEGDPFGNFISVNDKGSLVKGSVKSVDAKGAVIALSDEVEGYLPASEFAADRVEDLTTKLKEGDEVEAVIVTVDRKNRSIKLSVKAKDAKESREALNSVNAAANANAGTTSLGDLLKAKLSGEQE

SEQ ID NO: 33682 - protein, 190 aa, Neisseria meningitidis; identical to SEQ ID NO: 917

SEQ ID NO: 33683 - protein, 330 aa, Neisseria meningitidis; identical to SEQ ID NO: 24858

SEQ ID NO: 33684 - protein, 92 aa, Neisseria meningitidis; identical to SEQ ID NO: 1287

SEQ ID NO: 33685 - protein, 88 aa, Neisseria meningitidis; identical to SEQ ID NO: 6148

SEQ ID NO: 33686 - protein, 421 aa, Neisseria meningitidis; identical to SEQ ID NO: 19787

SEQ ID NO: 33687 - protein, 499 aa, Neisseria meningitidis; identical to SEQ ID NO: 18894

SEQ ID NO: 33688 - protein, 148 aa, Neisseria meningitidis; identical to SEQ ID NO: 4244

SEQ ID NO: 33689 - protein, 1161 aa, Neisseria meningitidis
MRLTHIKLSGFKSFTDPTTIHVPGQLVAVIGPNGCGKSNVIDAVRWVLGEASAKQLRGESMQDVIFNGAATRRPAPRASVELVFDNSDHSLQGAWGQYAEVSIKRQLTRQGESTYFINNQTVRRRDITDLFLGTGVGARGYAVIEQGMISRIIEARPEELRAYIEEAAGVSKYKERRKETEGRLKDTREHLQRLGDLQNELARQVEKLEKQAETAERYKSLTAQLNRQQDLLDYAQWQQSLAAADKATEQHQSLQAQQDETAAQVQALNDEVHALQTAEQSQQQAVHELSNKRGVLREQIARLEEQIRHQQNLHQRIERDKQAAQAQLQRIHQEQQQIRVQLEENELYVEEKQTELAEWAMQVAEHEERLPELEETQTALNAAFQTQQDEANRIRRELALKQQQLAHAEQTVAKHEERKGRLKQENQALNLPDEAETAAAQEAAALLQSRQEHYEEQIIAAEEALHAAREAFQTASNRFQSLKQQHITLQAQQQALSQILSQQQEAADFWQATGHAAAPQLWQHITAPAEWQHALSVILAERLHARDVPQGFVPPEPLPQGQAAWLSDGLSGGIKKSLPVQALLNQIQAQPPFQTALHHWLDGVLCAPDLSYALAHQNDLGAHQIWLTPEGHQVDKVSVLLYAKPAQESLIAQKARLDGIASELENLSPELSAAEAAFKQAEAAVRSSEVQHKNLMQQQQQHTRQYSQAQQRAAELLARTNQGQIRREHIERELAQLAEEQTVLQHASDGLSDDIATLQEAAAELEHQQQTAAHSRQEQQGRLKQAQLALLEANRQYGLAEVAVHKLNQQKQNYQQQIARLEQQTLDWQERQQELVLAYETEFQNDEQHIKLDELTESVHTLDEEYIAVQEKLTQIQEQGREQYARVQTLQTQLPQLQAATQTALLQQQEALINAKRYHQNLTERAADLDALEALAKESPKVLNSSIGSLSQQIEALGAVNLAALQELEEARERDGYYRSQSEDVQTAITLLEEAIAQIDDKTKARFKETFDAVNGKVQTFFPTLFGGGEATLKMIGDDLLTAGVSIMARPPGKKNSTIHLLSGGEKALTAMSLVFALFSLNPAPFCLLDEVDAPLDDANTSRFCNLVKEMSAQTQFLYISHNRLTMEMAEQLVGVTMQEKGVSRVVAVDIKQALEMAESV

SEQ ID NO: 33690 - protein, 395 aa, Neisseria meningitidis; identical to SEQ ID NO: 1105

SEQ ID NO: 33691 - protein, 495 aa, Neisseria meningitidis; identical to SEQ ID NO: 25143

SEQ ID NO: 33692 - protein, 60 aa, Neisseria meningitidis; identical to SEQ ID NO: 2288

SEQ ID NO: 33693 - protein, 328 aa, Neisseria meningitidis; identical to SEQ ID NO: 372

SEQ ID NO: 33694 - protein, 86 aa, Neisseria meningitidis; identical to SEQ ID NO: 19494

SEQ ID NO: 33695 - protein, 307 aa, Neisseria meningitidis; identical to SEQ ID NO: 1349

SEQ ID NO: 33696 - protein, 217 aa, Neisseria meningitidis; identical to SEQ ID NO: 18682

SEQ ID NO: 33697 - protein, 354 aa, Neisseria meningitidis; identical to SEQ ID NO: 3126

SEQ ID NO: 33698 - protein, 99 aa, Neisseria meningitidis; identical to SEQ ID NO: 3688

SEQ ID NO: 33699 - protein, 604 aa, Neisseria meningitidis
MPAETTVSGAHPAAKLPIYILPCFLWIGIVPFTFALKLKPSPDFYHDAAAAAGLIVLLFLTAGKKLFDVKIPPISFLLFAMAAFWYLQARLMNLIYPGMNDIVSWIFILLAVSAWACKSLVAHFGQERIVTLFAWSLLIDSLLQSCIVVIQFAGWEDTPLLQNIIVYSGQGVIGHIGQRNNLGHYLMWGILAAAYLNGQRKIPAALGAICLIMQTAVLGLVNSRTILTYIAAIALILPFWYFRSDKSNRRTMLGIAAAVFLTALFQFSMNTILETFTGIRYETAVERVANGGFTDLPRQIEWNKALAAFQSAPIFGHGWNSFAQQTFLINAEQHNIHDNLLSNLFTHSHNIVLQLLAEMGISGTLLVAATLLTGIAGLLKRPLTPASLFLICTLAVSMCHSMLEYPLWYVYFLIPFGLMLFLSPAEASDGIAFKKAANLGILTASAAIFAGLLHLDWTYTRLVNAFSPATDDSAKTLNRKINELRYISANSPMLSFYADFSLVNFALPEYPETQTWAEEATLKSLKYRPHSATYRIALYLMRQGKVAEAKQWMRATQSYYPYLMPRYADEIRKLPVWAPLLPELLKDCKAFAAAPGHPEAKPCK

SEQ ID NO: 33700 - protein, 228 aa, Neisseria meningitidis; identical to SEQ ID NO: 380

SEQ ID NO: 33701 - protein, 321 aa, Neisseria meningitidis; identical to SEQ ID NO: 6649

SEQ ID NO: 33702 - protein, 334 aa, Neisseria meningitidis; identical to SEQ ID NO: 309

SEQ ID NO: 33703 - protein, 414 aa, Neisseria meningitidis; identical to SEQ ID NO: 18692

SEQ ID NO: 33704 - protein, 242 aa, Neisseria meningitidis; identical to SEQ ID NO: 14445

SEQ ID NO: 33705 - protein, 297 aa, Neisseria meningitidis; identical to SEQ ID NO: 18589

SEQ ID NO: 33706 - protein, 671 aa, Neisseria meningitidis; identical to SEQ ID NO: 18848

SEQ ID NO: 33707 - protein, 141 aa, Neisseria meningitidis; identical to SEQ ID NO: 7042

SEQ ID NO: 33708 - protein, 157 aa, Neisseria meningitidis; identical to SEQ ID NO: 24452

SEQ ID NO: 33709 - protein, 178 aa, Neisseria meningitidis; identical to SEQ ID NO: 1831

SEQ ID NO: 33710 - protein, 144 aa, Neisseria meningitidis; identical to SEQ ID NO: 6930

SEQ ID NO: 33711 - protein, 310 aa, Neisseria meningitidis; identical to SEQ ID NO: 2585

SEQ ID NO: 33712 - protein, 181 aa, Neisseria meningitidis; identical to SEQ ID NO: 19925

SEQ ID NO: 33713 - protein, 242 aa, Neisseria meningitidis; identical to SEQ ID NO: 624

SEQ ID NO: 33714 - protein, 427 aa, Neisseria meningitidis; identical to SEQ ID NO: 24490

SEQ ID NO: 33715 - protein, 335 aa, Neisseria meningitidis; identical to SEQ ID NO: 19241

SEQ ID NO: 33716 - protein, 96 aa, Neisseria meningitidis; identical to SEQ ID NO: 18842

SEQ ID NO: 33717 - protein, 205 aa, Neisseria meningitidis; identical to SEQ ID NO: 25307

SEQ ID NO: 33718 - protein, 157 aa, Neisseria meningitidis; identical to SEQ ID NO: 24852

SEQ ID NO: 33719 - protein, 134 aa, Neisseria meningitidis
MNLVKLLANNWQPIAIIALVGTGLAVSHHQGYKAAFAKQQAVIDKMEHDKAQALLLSAQNYARELELARAEAKKYEVKAHAVGMALAKKQAEVSRLKTERDLCKIPVPPDSRNPNTGFRLFSYQIPPNFTQISP

SEQ ID NO: 33720 - protein, 145 aa, Neisseria meningitidis; identical to SEQ ID NO: 19905

SEQ ID NO: 33721 - protein, 377 aa, Neisseria meningitidis; identical to SEQ ID NO: 10962

SEQ ID NO: 33722 - protein, 175 aa, Neisseria meningitidis; identical to SEQ ID NO: 5

SEQ ID NO: 33723 - protein, 201 aa, Neisseria meningitidis; identical to SEQ ID NO: 11683

SEQ ID NO: 33724 - protein, 96 aa, Neisseria meningitidis; identical to SEQ ID NO: 6081

SEQ ID NO: 33725 - protein, 280 aa, Neisseria meningitidis
MCQLLGMNCNTPTDIMFSFEGFRRRGGITDHHADGFGIGFFEGKGVRLFHDDKPSANSPVADLVRAYQIKSENVVAHIRKASQGQTSLANTHPFMREMWGGYWLFAHNGHLIDFFPEQGEFFHPVGTTDSERAFCHILNRLRTRFAARPDDDTLFDAIAGLTHEIRKFGLFNFMLSDGIALFAHASTLLHYIVRQAPFGKARLLDDDVMVDFAEVTTPSDRVAVIATLPLTRDESWSQLAVDELVMFREGNIVRHDRPENPVYMSVEEGLETARAAGVAV

SEQ ID NO: 33726 - protein, 186 aa, Neisseria meningitidis; identical to SEQ ID NO: 25613

SEQ ID NO: 33727 - protein, 270 aa, Neisseria meningitidis; identical to SEQ ID NO: 24664

SEQ ID NO: 33728 - protein, 473 aa, Neisseria meningitidis; identical to SEQ ID NO: 19022

SEQ ID NO: 33729 - protein, 105 aa, Neisseria meningitidis; identical to SEQ ID NO: 7739

SEQ ID NO: 33730 - protein, 65 aa, Neisseria meningitidis; identical to SEQ ID NO: 5454

SEQ ID NO: 33731 - protein, 61 aa, Neisseria meningitidis; identical to SEQ ID NO: 19332

SEQ ID NO: 33732 - protein, 255 aa, Neisseria meningitidis
MALAKRIIPCLDVKDGRVVKGVNFIGLRDAGDPVEAAKRYNGEGADELTFLDITASSDNRDTILHIIEEVAGQVFIPLTVGGGVRTVADIRRLLNAGADKVSINTAAVTRPDLIDEAAGFFGSQAIVAAVDAKAVNPENTRWEIFTHGGRNPTGLDAVEWAIEMQKRGAGEILLTGMDRDGTKQGFNLPLTRAVAEAVDIPVIASGGVGNVRHLIEGITEGKADAVLAAGVFHFGEIAIREAKRAMREAGIEVRL

SEQ ID NO: 33733 - protein, 241 aa, Neisseria meningitidis; identical to SEQ ID NO: 19206

SEQ ID NO: 33734 - protein, 389 aa, Neisseria meningitidis
MDNELWIILLPIILLPVFFAMGWFAARVDMKTVLKQAKSIPSGFYKSLDALVDRNSGRAARELAEVIDQQPQSYDLNLTLGKLYRQRGENDKAINMHQTLLDSPDTTGAKRARVLFELAQNYQSAGLVDRAEQIFLGLQDGEMAREARQHLLNIYQQDRDWEKAVETARLLSHDEQTYQFEIAQFYCELAQAALFKSNFDAARFNVGKALEANKKCTRANMILGDIEHRQGNFPAAVEAYAAIEQQNHAYLSMVGEKLYEAYAAQGKPEEGLNRLTGYMQTFPELDLINVVYEKSLLLKGEKEAAQTAVELVRRKPDLNGVYRLLGLKLSDMNPAWKADADMMRSVIGRQLQRSVMYRCRNCHFKSQVFFWHCPACNKWQTFTPNKIEV

SEQ ID NO: 33735 - protein, 122 aa, Neisseria meningitidis; identical to SEQ ID NO: 2347

SEQ ID NO: 33736 - protein, 233 aa, Neisseria meningitidis; identical to SEQ ID NO: 8818

SEQ ID NO: 33737 - protein, 380 aa, Neisseria meningitidis; identical to SEQ ID NO: 2984

SEQ ID NO: 33738 - protein, 238 aa, Neisseria meningitidis; identical to SEQ ID NO: 18492

SEQ ID NO: 33739 - protein, 251 aa, Neisseria meningitidis
MGRLLLGSIRMSIIVENLTVSYRRRPAVHHVDITFEEHSMWAVFGPNGAGKSTFLKSLMGLQPIDTGSIRLDGLSRQDIAYLPQQSDIDRSQPMTVFDLAAMGLWYEIGFFKGINTAQKQRVHEALERVGMRQFARRQIAHLSNGQFQRVLFARMLVQNAKFLLLDEPFNAVDARTTYELLDVLQKCHCGGHAIIAVLHDYEQVRAYFPSTLLLAREKIAAGATETILTEPYLAQANAKMQQQESPDWCAS

SEQ ID NO: 33740 - protein, 404 aa, Neisseria meningitidis; identical to SEQ ID NO: 33

SEQ ID NO: 33741 - protein, 620 aa, Neisseria meningitidis; identical to SEQ ID NO: 24284

SEQ ID NO: 33742 - protein, 371 aa, Neisseria meningitidis; identical to SEQ ID NO: 24193

SEQ ID NO: 33743 - protein, 522 aa, Neisseria meningitidis; identical to SEQ ID NO: 968

SEQ ID NO: 33744 - protein, 242 aa, Neisseria meningitidis; identical to SEQ ID NO: 9647

SEQ ID NO: 33745 - protein, 526 aa, Neisseria meningitidis
MEPIMAKKDNKTKIQKPEAALQTDAAQITATGRVIAEHPSNFITPQKMRALFEDAESGDIRAQHELFADIEERDSDIAANMGTRKRALLTLNWRVAPPRNATPEEEKLSDQAYEMMDSLPTLEDLIMDLMDAVGHGFSALEVEWVFSDGLYLPRNFIHRPQSWFKWDKDDGLLLRTRENPEGEALWPLGWVVHTQKSRSVRQARNGLFRSLSWLYMFKHYAVHDFAEFLELYGMPIRIGKYGAGATKEEKNTLLRAVAEIGHNAAGIMPEGMEIELHNAASGTTATSNPFLQMADWCEKSAARLILGQTLTSGADGKSSTNALGNIHNEVRRDLLVSDAKQVAQTITSQIIGPFLQINYPHADPNRVPKFEFDTREPKDIAVFADAIPKLVDVGVQIPESWVRDKLVIPDVQEGEAVLVRQVPDNPVNRTTLAALSAHTVPSKATGRHQEILDGALDDALVEPDFNSQLNPMVRQAVAALNACNSYEEADAALNALYPNLDNAKLRTYMQQALFISDILGQDHARA

SEQ ID NO: 33746 - protein, 291 aa, Neisseria meningitidis; identical to SEQ ID NO: 5426

SEQ ID NO: 33747 - protein, 322 aa, Neisseria meningitidis; identical to SEQ ID NO: 25302

SEQ ID NO: 33748 - protein, 716 aa, Neisseria meningitidis
MNNPLVNQAAMVLPVFLLSACLGGGGGSFDLDSVDTEAPRPAPKYQDVSSEKPQAQKDQGGYGFAMRFKRRFWLPRGKEDEVKLKESDWEETGLPDDPKNLPKRQKSVIDEVKTDDGSNNIHSSPYLMQSNHQNGSTNGGANQPKNEVTDYKDFKYVYSGWFYKHAKSEIKRENGSSSAKSGDDGYIFYHGEKPSRQLPASEKVIYKGVWHFVTDTKKGQKFNDILGTSKGQGDKYSGFSGDDDEQYSNKNESMLKDGQEGYGFTSNLEVDFNNKKLTGKLIRNNRVTNATPNDKYTTQYYSLDAQITGNRFNGKAIATDKPQANETKPHPFVSDSSSLSGGFFGPKGEELGFRFLSDDKKVAVVGSAKTKDNTANGNTAAASGGTGAAASGGAAAMPSENSKLTTVLDAVELTLNDKKIKNLDNFSNAAQLVVDGIMIPLLPKDSESGNNQANQGTNGGTAFTYKTTYTPKSDEKDTQAGMAENGNPAASNTAGDTNGKTKTYAVEVCCSNLNYLKYGLLTRKTAGNTGEGGNGSPTAAAQTAQGAQSMFLQGERTDENKIPSEQNVVYRGSWYGHIANGTSWSGNASNATSGNRADFTVNFGEKKITGTLTAENRQQATFTIEGMIQDNGFSGTAKTADLGFDLDQSNTTGTPKAYITDAKVQGGFYGPKAEEMGGWFAYPGDSQTQPSASGSGASAANSATVVFGAKRQQLVQ

SEQ ID NO: 33749 - protein, 140 aa, Neisseria meningitidis; identical to SEQ ID NO: 18060

SEQ ID NO: 33750 - protein, 544 aa, Neisseria meningitidis; identical to SEQ ID NO: 2758

SEQ ID NO: 33751 - protein, 392 aa, Neisseria meningitidis; identical to SEQ ID NO: 7313

SEQ ID NO: 33752 - protein, 164 aa, Neisseria meningitidis; identical to SEQ ID NO: 7379

SEQ ID NO: 33753 - protein, 537 aa, Neisseria meningitidis; identical to SEQ ID NO: 32391

SEQ ID NO: 33754 - protein, 461 aa, Neisseria meningitidis; identical to SEQ ID NO: 10228

SEQ ID NO: 33755 - protein, 351 aa, Neisseria meningitidis; identical to SEQ ID NO: 24362

SEQ ID NO: 33756 - protein, 145 aa, Neisseria meningitidis; identical to SEQ ID NO: 14768

SEQ ID NO: 33757 - protein, 60 aa, Neisseria meningitidis; identical to SEQ ID NO: 2489

SEQ ID NO: 33758 - protein, 228 aa, Neisseria meningitidis; identical to SEQ ID NO: 445

SEQ ID NO: 33759 - protein, 616 aa, Neisseria meningitidis; identical to SEQ ID NO: 18186

SEQ ID NO: 33760 - protein, 91 aa, Neisseria meningitidis; identical to SEQ ID NO: 1961

SEQ ID NO: 33761 - protein, 458 aa, Neisseria meningitidis; identical to SEQ ID NO: 25739

SEQ ID NO: 33762 - protein, 292 aa, Neisseria meningitidis; identical to SEQ ID NO: 18187

SEQ ID NO: 33763 - protein, 431 aa, Neisseria meningitidis; identical to SEQ ID NO: 19050

SEQ ID NO: 33764 - protein, 468 aa, Neisseria meningitidis; identical to SEQ ID NO: 29

SEQ ID NO: 33765 - protein, 212 aa, Neisseria meningitidis; identical to SEQ ID NO: 324

SEQ ID NO: 33766 - protein, 66 aa, Neisseria meningitidis; identical to SEQ ID NO: 3561

SEQ ID NO: 33767 - protein, 100 aa, Neisseria meningitidis; identical to SEQ ID NO: 24489

SEQ ID NO: 33768 - protein, 183 aa, Neisseria meningitidis; identical to SEQ ID NO: 18479

SEQ ID NO: 33769 - protein, 979 aa, Neisseria meningitidis; identical to SEQ ID NO: 19857

SEQ ID NO: 33770 - protein, 384 aa, Neisseria meningitidis; identical to SEQ ID NO: 19277

SEQ ID NO: 33771 - protein, 164 aa, Neisseria meningitidis; identical to SEQ ID NO: 19119

SEQ ID NO: 33772 - protein, 201 aa, Neisseria meningitidis; identical to SEQ ID NO: 291

SEQ ID NO: 33773 - protein, 391 aa, Neisseria meningitidis
MLNTSLSPWPCFTQEEADAVSKVLLSNKVNYWTGSECREFEKEFAAFAGTRYAVALSNGTLALDAALKAIGIGEGDDVVVTSRTFLASASCIVNAGANPVFADVDLNSQNISAETVKAVLTPNTKAIIVVHLAGMPAEMDDIMALAKEHDLWVIEDCAQAHGAKYKGKSVGSIGHVGAWSFCQDKIMTTGGEGGMVTTNDKTLWEKMWSYKDHGKSYDAVYHREHAPGFRWLHESFGTNWRMMEMQAVIGRIQLKRMPEWTARRRENAAKLAESLGKFKSIRLIEVAGYIEHAQYKFYAFVKPEHLKDGWTRDRIVSELNARKVPCYQGSCSEVYLEKAFDNTPWRPKERLKNAVELGDTSLMFLVHPTLTDGEIAFCKKHIEAVLTEAAR

SEQ ID NO: 33774 - protein, 96 aa, Neisseria meningitidis
MTIRPLHDRVVVKRLEAEEKTASGIVLPGAAAEKPDMGEVIAVGAGKIGKDGAHRPLDVKVGDKIIFGKYSGQTVKADGEELLVMREEDIFGIVEK

SEQ ID NO: 33775 - protein, 768 aa, Neisseria meningitidis; identical to SEQ ID NO: 19576

SEQ ID NO: 33776 - protein, 377 aa, Neisseria meningitidis; identical to SEQ ID NO: 25496

SEQ ID NO: 33777 - protein, 199 aa, Neisseria meningitidis; identical to SEQ ID NO: 3649

SEQ ID NO: 33778 - protein, 68 aa, Neisseria meningitidis; identical to SEQ ID NO: 3910

SEQ ID NO: 33779 - protein, 227 aa, Neisseria meningitidis; identical to SEQ ID NO: 13966

SEQ ID NO: 33780 - protein, 661 aa, Neisseria meningitidis; identical to SEQ ID NO: 25866

SEQ ID NO: 33781 - protein, 259 aa, Neisseria meningitidis
MFFVLSPAKNLNEKDPAPVSEFTQPDLLAESDILMQQLRELAPQQIAELMHVSDKIALLNAQRNAEWHTPFTPENAKQAVFMFNGDVYEGMDANTLDIGQIRYLQNHVRLLSGLYGLLRPLDLIQPYRLEMGTAFANLRGKNLYEFWGDIITNLLNDTLAQAGSNTLVNLASQEYFKSVNTKKLRARLITPIFKDEKNGKYKIISFYAKRARGLMVRYAVEHHITDPEMLKNFNYEGYAFNDAASNESEWVFMRSEQIK

SEQ ID NO: 33782 - protein, 67 aa, Neisseria meningitidis; identical to SEQ ID NO: 966

SEQ ID NO: 33783 - protein, 114 aa, Neisseria meningitidis; identical to SEQ ID NO: 5923

SEQ ID NO: 33784 - protein, 195 aa, Neisseria meningitidis; identical to SEQ ID NO: 7027

SEQ ID NO: 33785 - protein, 403 aa, Neisseria meningitidis; identical to SEQ ID NO: 25566

SEQ ID NO: 33786 - protein, 463 aa, Neisseria meningitidis; identical to SEQ ID NO: 19775

SEQ ID NO: 33787 - protein, 144 aa, Neisseria meningitidis; identical to SEQ ID NO: 4528

SEQ ID NO: 33788 - protein, 92 aa, Neisseria meningitidis; identical to SEQ ID NO: 18803

SEQ ID NO: 33789 - protein, 491 aa, Neisseria meningitidis; identical to SEQ ID NO: 24645

SEQ ID NO: 33790 - protein, 83 aa, Neisseria meningitidis
MKPIYFIIFSFLLTACVVNNDDYFAEPPTPYLINEHGFYMNKKGDLIRDSHGNAIKMTEENKHNFPKESANPYYEKWIKQKRK

SEQ ID NO: 33791 - protein, 318 aa, Neisseria meningitidis; identical to SEQ ID NO: 18259

SEQ ID NO: 33792 - protein, 188 aa, Neisseria meningitidis
MLVHPEAMSVGALADKIRKIENWPQKGILFHDITPVLQSAEYFRLLVDLLVYRYMDQKIDIVAGLDARGFIIGAALAYQLNVGFVPIRKKGKLPFETVSQSYALEYGEAAVEIHTDAVKPGSRVLLVDDLVATGGTMLAGLELIRKLGGEIVEAAAILEFTDLQGGKNIRASGAPLFTLLQNEGCMKG

SEQ ID NO: 33793 - protein, 498 aa, Neisseria meningitidis
MSLALVYSRALSGMNAPLVEVEAHLANGLPHFNIVGLPDTEVKESRDRVRAAIIQSGFEFPAKKITVNLAPADLPKESGRFDLPIAIGILAASGQVAPEKLAEYEFAGELALSGLLRPVRGALAMAWQGMQAKRAFVLPEENAGQAAVMRGITVYGARSLGEVAAHLNGIEPLVQTDCQVPQMPSENTKLLDLVDVKGQHTARLALEIAAAGGHSLLMMGPPGTGKSMLSQRLPGILPPLTEDELVEVWALRSLLPNHQQQLDSNRPFRSPHHSASAAAMVGGGSDPRPGEISLAHHGVLFLDELPEFDRKVLEVLREPLENGEIHISRAARQAVYPAKFQLVAAMNPCPCGYLGHPVKPCRCTPESVARYRSKISGPLLDRIDLTIEVPSLSAAELMQQEAGESSVSVLERVIAARDKQYARQGKVNAALSVSELDTSARIQKEAQEALGGLLEKLSLSARSFHRIMRVARTLADLAGDEEVGRSHVMKAIGFRRAL

SEQ ID NO: 33794 - protein, 416 aa, Neisseria meningitidis; identical to SEQ ID NO: 19000

SEQ ID NO: 33795 - protein, 452 aa, Neisseria meningitidis
MKPLDLNFICQALKLPMPSESKPVSRIVTDSRDIRAGDVFFALAGGRFDAHDFVEDVLAAGAAAVVVSREDCVAMDGALKVDDTLAALQTLAKVWRENVNPFVFGITGSVGKTTVKEMLAAVLRRRFGDNAVLATAGNFNNHIGLPLTLLKLNEKHRYAVIEMGMNHFGELAVLTQIAKPDAALVNNAMRAHVGCGFDGVGDIAKAKSEIYQGLCSDGMALIPQEDANMAVFKTATLNLNTRTFGIDSGDVHAENIVLKPLSCEFDLVCGDERAAVVLPVPGRHNVHNAAAAAALSLAAGLSLNDVAEGLKGFSNIKGRLNVKSGIKGATLIDDTYNANPDSMKAAIDVLARMPAPRIFVMGDMGELGEDEAAAMHAEVGAYARDQGIEAAYFVGDNSVEAAEKFGADGLWFAAKDPLIQVLRHDLPERATVLVKGSRFMQMEEVVEALEDK

SEQ ID NO: 33796 - protein, 258 aa, Neisseria meningitidis; identical to SEQ ID NO: 1434

SEQ ID NO: 33797 - protein, 324 aa, Neisseria meningitidis; identical to SEQ ID NO: 25271

SEQ ID NO: 33798 - protein, 514 aa, Neisseria meningitidis; identical to SEQ ID NO: 9767

SEQ ID NO: 33799 - protein, 540 aa, Neisseria meningitidis; identical to SEQ ID NO: 24678

SEQ ID NO: 33800 - protein, 117 aa, Neisseria meningitidis; identical to SEQ ID NO: 4861

SEQ ID NO: 33801 - protein, 86 aa, Neisseria meningitidis; identical to SEQ ID NO: 24444

SEQ ID NO: 33802 - protein, 682 aa, Neisseria meningitidis; identical to SEQ ID NO: 18310

SEQ ID NO: 33803 - protein, 375 aa, Neisseria meningitidis; identical to SEQ ID NO: 25882

SEQ ID NO: 33804 - protein, 163 aa, Neisseria meningitidis; identical to SEQ ID NO: 25684

SEQ ID NO: 33805 - protein, 119 aa, Neisseria meningitidis; identical to SEQ ID NO: 9294

SEQ ID NO: 33806 - protein, 225 aa, Neisseria meningitidis
MQADFNRPVLAVDTGTSYLSLALRADGETCLFHQEVGSRQSALILPEIRTLFHDAGITAADLGAIVYAKGPGAFTGLRIGIGVAQGLATPFDTPLIGVPSLDAAASLPPPQSCILAAADARMGEVFYAWFDTLNRRRLSDYQVGRAADIRLPEGCAFSDGIGSAFALEETPPFSGKPDMPTAADFLNLAAEGGFPAVAAAHSELLYVRNKIALTAKEQAERKART

SEQ ID NO: 33807 - protein, 662 aa, Neisseria meningitidis; identical to SEQ ID NO: 18772

SEQ ID NO: 33808 - protein, 112 aa, Neisseria meningitidis; identical to SEQ ID NO: 6756

SEQ ID NO: 33809 - protein, 230 aa, Neisseria meningitidis; identical to SEQ ID NO: 1058

SEQ ID NO: 33810 - protein, 245 aa, Neisseria meningitidis; identical to SEQ ID NO: 3123

SEQ ID NO: 33811 - protein, 227 aa, Neisseria meningitidis; identical to SEQ ID NO: 25599

SEQ ID NO: 33812 - protein, 290 aa, Neisseria meningitidis; identical to SEQ ID NO: 24449

SEQ ID NO: 33813 - protein, 292 aa, Neisseria meningitidis; identical to SEQ ID NO: 10917

SEQ ID NO: 33814 - protein, 769 aa, Neisseria meningitidis; identical to SEQ ID NO: 8897

SEQ ID NO: 33815 - protein, 223 aa, Neisseria meningitidis; identical to SEQ ID NO: 934

SEQ ID NO: 33816 - protein, 417 aa, Neisseria meningitidis; identical to SEQ ID NO: 25643

SEQ ID NO: 33817 - protein, 170 aa, Neisseria meningitidis; identical to SEQ ID NO: 18977

SEQ ID NO: 33818 - protein, 218 aa, Neisseria meningitidis
MEKSGIVYLMKTVIKGVYKIGISEVSNFEGRMRHLENNGYANVAGLERILAVKTDNYKEKENLLHEIFSKSRIGDTELFAVDENLVKRLFLSLRGEIVFPKNETAESEFEKSVHERRQEGNAESGRKQLLDLVRRGHREYPYALPRLLAGAASYKPKKSKIRLFKEAYFRKNGRRLTDEIADGIHIYTCFSRADLEKAYSEYLELFKSESDAESRKPR

SEQ ID NO: 33819 - protein, 435 aa, Neisseria meningitidis; identical to SEQ ID NO: 19564

SEQ ID NO: 33820 - protein, 313 aa, Neisseria meningitidis; identical to SEQ ID NO: 24438

SEQ ID NO: 33821 - protein, 366 aa, Neisseria meningitidis; identical to SEQ ID NO: 24241

SEQ ID NO: 33822 - protein, 257 aa, Neisseria meningitidis; identical to SEQ ID NO: 25183

SEQ ID NO: 33823 - protein, 367 aa, Neisseria meningitidis; identical to SEQ ID NO: 6599

SEQ ID NO: 33824 - protein, 812 aa, Neisseria meningitidis; identical to SEQ ID NO: 18145

SEQ ID NO: 33825 - protein, 320 aa, Neisseria meningitidis; identical to SEQ ID NO: 19717

SEQ ID NO: 33826 - protein, 263 aa, Neisseria meningitidis; identical to SEQ ID NO: 1443

SEQ ID NO: 33827 - protein, 291 aa, Neisseria meningitidis; identical to SEQ ID NO: 18307

SEQ ID NO: 33828 - protein, 42 aa, Neisseria meningitidis; identical to SEQ ID NO: 19082

SEQ ID NO: 33829 - protein, 55 aa, Neisseria meningitidis; identical to SEQ ID NO: 7238

SEQ ID NO: 33830 - protein, 512 aa, Neisseria meningitidis; identical to SEQ ID NO: 25396

SEQ ID NO: 33831 - protein, 89 aa, Neisseria meningitidis; identical to SEQ ID NO: 1367

SEQ ID NO: 33832 - protein, 107 aa, Neisseria meningitidis; identical to SEQ ID NO: 14750

SEQ ID NO: 33833 - protein, 251 aa, Neisseria meningitidis; identical to SEQ ID NO: 25667

SEQ ID NO: 33834 - protein, 159 aa, Neisseria meningitidis; identical to SEQ ID NO: 6605

SEQ ID NO: 33835 - protein, 109 aa, Neisseria meningitidis; identical to SEQ ID NO: 10359

SEQ ID NO: 33836 - protein, 219 aa, Neisseria meningitidis; identical to SEQ ID NO: 19810

SEQ ID NO: 33837 - protein, 344 aa, Neisseria meningitidis; identical to SEQ ID NO: 19131

SEQ ID NO: 33838 - protein, 330 aa, Neisseria meningitidis; identical to SEQ ID NO: 19399

SEQ ID NO: 33839 - protein, 265 aa, Neisseria meningitidis; identical to SEQ ID NO: 24355

SEQ ID NO: 33840 - protein, 525 aa, Neisseria meningitidis; identical to SEQ ID NO: 4048

SEQ ID NO: 33841 - protein, 404 aa, Neisseria meningitidis; identical to SEQ ID NO: 25522

SEQ ID NO: 33842 - protein, 315 aa, Neisseria meningitidis; identical to SEQ ID NO: 18765

SEQ ID NO: 33843 - protein, 436 aa, Neisseria meningitidis; identical to SEQ ID NO: 18234

SEQ ID NO: 33844 - protein, 263 aa, Neisseria meningitidis
MNLFFDTKLGKQQNKATHKIRVMSEAWLEKNGYCPCCGSKPMQRFANNKPVADLFCSNCHEQYELKSKNQKTIGNSVPDGAYRTMLERIRSDTNPNFFFLAYKKADYSIRQLVLVPKHFITPDMIIPRNKGIKNRPHHIMCSINLAPLPESGKIFLIDDSRIIEPETVLKKWQSNLFLRNQNAERKGWLLAVMKCIDQLPEEFTLSQIYEFENKLSIQFPQNNHIRDKIRQQLQILRDQNTIEFIGRGLYKKIDKLPPTSKAF

SEQ ID NO: 33845 - protein, 1067 aa, Neisseria meningitidis; identical to SEQ ID NO: 25767

SEQ ID NO: 33846 - protein, 88 aa, Neisseria meningitidis; identical to SEQ ID NO: 6869

SEQ ID NO: 33847 - protein, 360 aa, Neisseria meningitidis; identical to SEQ ID NO: 19622

SEQ ID NO: 33848 - protein, 59 aa, Neisseria meningitidis; identical to SEQ ID NO: 5877

SEQ ID NO: 33849 - protein, 335 aa, Neisseria meningitidis; identical to SEQ ID NO: 24181

SEQ ID NO: 33850 - protein, 78 aa, Neisseria meningitidis; identical to SEQ ID NO: 25907

SEQ ID NO: 33851 - protein, 140 aa, Neisseria meningitidis; identical to SEQ ID NO: 662

SEQ ID NO: 33852 - protein, 462 aa, Neisseria meningitidis; identical to SEQ ID NO: 19162

SEQ ID NO: 33853 - protein, 148 aa, Neisseria meningitidis; identical to SEQ ID NO: 24668

SEQ ID NO: 33854 - protein, 566 aa, Neisseria meningitidis; identical to SEQ ID NO: 18971

SEQ ID NO: 33855 - protein, 297 aa, Neisseria meningitidis; identical to SEQ ID NO: 25303

SEQ ID NO: 33856 - protein, 151 aa, Neisseria meningitidis
LDKQIDDHTHTHFDGKAQVAEQIKGIGSITTATLMAMLPELGRLSHKRIASLAGIAPHPRESGETKFKSRCFGGKSAVRKALYMATVAATRFEPLIRDFYQRLPSEGKPYKVAVTACMRKLLTISNARMRDYFAENDTAENDTAENGIRTA

SEQ ID NO: 33857 - protein, 311 aa, Neisseria meningitidis; identical to SEQ ID NO: 15417

SEQ ID NO: 33858 - protein, 139 aa, Neisseria meningitidis; identical to SEQ ID NO: 921

SEQ ID NO: 33859 - protein, 178 aa, Neisseria meningitidis; identical to SEQ ID NO: 1654

SEQ ID NO: 33860 - protein, 259 aa, Neisseria meningitidis; identical to SEQ ID NO: 24414

SEQ ID NO: 33861 - protein, 250 aa, Neisseria meningitidis; identical to SEQ ID NO: 2637

SEQ ID NO: 33862 - protein, 163 aa, Neisseria meningitidis; identical to SEQ ID NO: 684

SEQ ID NO: 33863 - protein, 140 aa, Neisseria meningitidis; identical to SEQ ID NO: 1135

SEQ ID NO: 33864 - protein, 375 aa, Neisseria meningitidis
MYTFRPFPKLHTETHIMNIQNIRTLLDTVAVPNTARTLGGEKAVRSVEQRSDGIHIALHFGFPVAHIAAAVADSVQEILMPETGGAHIHLSIDTEIGTHKVQPGVTTIKGVKNIIAVASGKGGVGKSTTTANLAAAMARMGARVGVLDADLYGPSQPTMLGVDDRKPDQKNQKLIPVESSDGIQVMSIGFLVDTDQAVVWRGPMVSQALQQLMFQSEWDEVDYLFIDLPPGTGDIQLTLSQRIPVTGSVIVTTPQDIALIDARKAVDMFRKVNIPILGVLENMSVHICSNCGHSEALFGTDGGKDLAARLNVPLLGQLPLSLPVREAMDGGTPAQLFDEHPAIARIYTDAAFQIALGIADKGKDFSSRFPKIVVE

SEQ ID NO: 33865 - protein, 133 aa, Neisseria meningitidis; identical to SEQ ID NO: 2156

SEQ ID NO: 33866 - protein, 134 aa, Neisseria meningitidis; identical to SEQ ID NO: 2143

SEQ ID NO: 33867 - protein, 160 aa, Neisseria meningitidis; identical to SEQ ID NO: 1762

SEQ ID NO: 33868 - protein, 433 aa, Neisseria meningitidis; identical to SEQ ID NO: 2952

SEQ ID NO: 33869 - protein, 356 aa, Neisseria meningitidis
MKIILTTSMSGLGGTETATVRLGRLLKRRGHDIILASSDGPFVGEAQASGIRWQPVDFYRGGLAGYLKSTFAYARMLRREQPDIIDCQMARVVPACALAAKIVSPKTKIIYHSHGLDAATYPKIAKLFDKLGVYIIGNCKHEREKLIRHGFPAGRIAYAYNALPPPEFHFRKTKKECAVLGTLSRLDTVRAVHLMLDILKKMVDRGMPVRLNVAGIGEEMDNLKAQAKRLGIEDKVTFLGGVRDLTGYFKEVDILVNTPHCVGDHGAGVGNNILEAGLYDTPVVTYNMAGISEMVITGQTGYCIPFGDDEAFIEAVDTLIKHPELRSQMGKALHKHVETLCSDDEIYRTTMAAYEM

SEQ ID NO: 33870 - protein, 284 aa, Neisseria meningitidis; identical to SEQ ID NO: 24731

SEQ ID NO: 33871 - protein, 188 aa, Neisseria meningitidis
LLLPFATLALCTNAFAAPPSDASLARWLDTQNFDRDIEKNMIEGFNAGFKPYADKALAEMPEAKKDQAAEAFNRYRENVLKDLITPEVKQAVRNTLLKNAREIYTQEEIDGMIAFYGSPVGQSVVAKNPRLIKKSMSEIAVSWTALSGKIARHHLPAFTEELRRIICGGKNPDAGCKQAGQVGKRHQK

SEQ ID NO: 33872 - protein, 573 aa, Neisseria meningitidis; identical to SEQ ID NO: 3691

SEQ ID NO: 33873 - protein, 63 aa, Neisseria meningitidis; identical to SEQ ID NO: 25601

SEQ ID NO: 33874 - protein, 190 aa, Neisseria meningitidis; identical to SEQ ID NO: 12790

SEQ ID NO: 33875 - protein, 637 aa, Neisseria meningitidis; identical to SEQ ID NO: 24947

SEQ ID NO: 33876 - protein, 628 aa, Neisseria meningitidis; identical to SEQ ID NO: 19779

SEQ ID NO: 33877 - protein, 332 aa, Neisseria meningitidis
MSENKQNEVLSGYEQLKRRNRRRLVTASCLVAASCILLAAALSSGPAEQTAGETSGVENKAAGAAQTPALKSAADKPQDLAGEDKPSAADSEISEPENVGAPLVLINERLEDSNIKGLEASEKLQQAETAKTAPKQAKQRAAEKVPATADSTDTVAFEKPKRTAETKPQKAERTAKAKPKAKETKTAEKVADKPKTAAEKTKPDTAKSDSAVKEAKKADKAESKKTAEKDRSDGKKHETAQKTDKADKTKTAEKEKSGKKAAIQAGYAEKERALSLQRKMKAAGIDSTITEIMTDNGKVYRVKSSNYKNARDAERDLNKLRVHGIAGQVTNE

SEQ ID NO: 33878 - protein, 575 aa, Neisseria meningitidis; identical to SEQ ID NO: 19649

SEQ ID NO: 33879 - protein, 284 aa, Neisseria meningitidis; identical to SEQ ID NO: 18516

SEQ ID NO: 33880 - protein, 657 aa, Neisseria meningitidis; identical to SEQ ID NO: 24275

SEQ ID NO: 33881 - protein, 658 aa, Neisseria meningitidis; identical to SEQ ID NO: 25350

SEQ ID NO: 33882 - protein, 156 aa, Neisseria meningitidis
VQPVAQAVRLLSTSSLLSVATALIEAHGEEMTAPDLIEVNRAMRRRMQAEIAALRAVQTAAAESGGLTANAVYTEAYQTAESLRAAAGSLNALVAAAINQKPPLIVRQAPIDGTIHQIAHEFYGDIARAAELVRLNPHIHHPAFIKRGTLVNSYAK

SEQ ID NO: 33883 - protein, 358 aa, Neisseria meningitidis; identical to SEQ ID NO: 9712

SEQ ID NO: 33884 - protein, 92 aa, Neisseria meningitidis; identical to SEQ ID NO: 510

SEQ ID NO: 33885 - protein, 421 aa, Neisseria meningitidis; identical to SEQ ID NO: 19068

SEQ ID NO: 33886 - protein, 400 aa, Neisseria meningitidis; identical to SEQ ID NO: 19188

SEQ ID NO: 33887 - protein, 140 aa, Neisseria meningitidis; identical to SEQ ID NO: 11162

SEQ ID NO: 33888 - protein, 177 aa, Neisseria meningitidis; identical to SEQ ID NO: 18067

SEQ ID NO: 33889 - protein, 636 aa, Neisseria meningitidis
MTLETLIALPRNIKKICFLIHDFLMIFIAFWFTQSLKADYSNEWFDPANWQSFLLTALLTIGLFVRMGLYRAVTRFISFRILSTALAGSIVSAVLFFLNTLIFEERLRLALPIVYFLLLFVSVTGSRMVLRGLLSEHPKKQMIPVIIYGAGRSGRQLLEAVKQMREYSAAAFVDDDPKLWRTVICGLAVYRPDDIAALIGRYGVEKILLAIPGATQEQRRRIISKLEAYPCEVLTIPGMKDLMDGKISIGTLKKISVSDLLGRDPVTPDDRLMSADIEGKTVMVTGAGGSIGSELCRQIIRRRPEKLLLFELSEFALYAIEKELRETCIQKRLDTEILPFLGSVQNRTLLEHVMTAFSVATVYHAAAYKHVPMVEFNTVEGIRNNIFGTLECALAATASGVETFVLISTDKAVRPTNTMGASKRMAELCLQALAAEPGQKTRFSMVRFGNVLGSSGSVVPLFEKQIAEGGPLTLTHPDITRYFMTIPEAAQLVIQAGAMGTGGDVFVLDMGESVKIIDLARQMITLSGLKPKTPEQPDGDIEILITGLRPGEKLYEELLIGDNVRKTGHPRIMTADEAMLPWHELSVLLDRIRAACDRYDQQAIRTLLINAPTGFAPSDGICDLLWVRETHRKNAV

SEQ ID NO: 33890 - protein, 279 aa, Neisseria meningitidis; identical to SEQ ID NO: 19598

SEQ ID NO: 33891 - protein, 275 aa, Neisseria meningitidis; identical to SEQ ID NO: 11353

SEQ ID NO: 33892 - protein, 331 aa, Neisseria meningitidis; identical to SEQ ID NO: 1014

SEQ ID NO: 33893 - protein, 172 aa, Neisseria meningitidis; identical to SEQ ID NO: 3384

SEQ ID NO: 33894 - protein, 64 aa, Neisseria meningitidis; identical to SEQ ID NO: 6143

SEQ ID NO: 33895 - protein, 182 aa, Neisseria meningitidis; identical to SEQ ID NO: 18240

SEQ ID NO: 33896 - protein, 887 aa, Neisseria meningitidis; identical to SEQ ID NO: 19827

SEQ ID NO: 33897 - protein, 423 aa, Neisseria meningitidis
VGDGVHTLLLDRQIVRDGRKFDAPLLWMVVLMTAFSLLMIYSASVYLASKEGGDQFFYLTRQAGFVVAGLIASGFLWFLCRMRTWRRLVPWIFALSGLLLVVVLIAGREINGATRWIPLGPLNFQPTELFKLAVILYLASLFTRREEVLRSMESLGWQSIWRGTANLIMSATNPQARRETLEMYGRFRAIILPIMLVAFGLVLIMVQPDFGSFVVITVIAVGMLFLAGLPWKYFFVLVGSVLGGMVLMITAAPYRVQRVVAFLDPWKDPQGAGYQLTHSLMAIGRGEWFGMGLGASLSKRGFLPEAHTDFIFAIIAEEFGFFGMCVLIFCYGWLVVRAFSIGKQSRDLGLTFNAYIASGIGIWIGIQSFFNIGVNIGALPTKGLTLPLMSYGGSSVFFMLISMMLLLRIDYENRRKMRGYRVE

SEQ ID NO: 33898 - protein, 299 aa, Neisseria meningitidis; identical to SEQ ID NO: 19524

SEQ ID NO: 33899 - protein, 205 aa, Neisseria meningitidis; identical to SEQ ID NO: 721

SEQ ID NO: 33900 - protein, 41 aa, Neisseria meningitidis; identical to SEQ ID NO: 18046

SEQ ID NO: 33901 - protein, 272 aa, Neisseria meningitidis; identical to SEQ ID NO: 7451

SEQ ID NO: 33902 - protein, 231 aa, Neisseria meningitidis
MKAMILAAGRGERMRPLTDTTPKPLLDVAGKPLIGWHLCRLKQAGFTEIVINHAWLGRQIEEALGDGSAYGVNIAYSPEPAGGLETAGGIAQALPLLGGQPFLVVNGDVLTDIDFTAAFQAASSLPEHISAHLWLVENPPHHPDGDFLLLPDGSVQSEVSGGNGLTFSGVGIYRPEMFDGIEAGSVAKLAPVLRGEMRQNRVSGQKHTGLWLDVGTVCRLKEAQALAGAWK

SEQ ID NO: 33903 - protein, 484 aa, Neisseria meningitidis; identical to SEQ ID NO: 24959

SEQ ID NO: 33904 - protein, 159 aa, Neisseria meningitidis; identical to SEQ ID NO: 19574

SEQ ID NO: 33905 - protein, 82 aa, Neisseria meningitidis; identical to SEQ ID NO: 2740

SEQ ID NO: 33906 - protein, 429 aa, Neisseria meningitidis; identical to SEQ ID NO: 2821

SEQ ID NO: 33907 - protein, 233 aa, Neisseria meningitidis; identical to SEQ ID NO: 3223

SEQ ID NO: 33908 - protein, 318 aa, Neisseria meningitidis; identical to SEQ ID NO: 3574

SEQ ID NO: 33909 - protein, 284 aa, Neisseria meningitidis; identical to SEQ ID NO: 9988

SEQ ID NO: 33910 - protein, 60 aa, Neisseria meningitidis
LEMFDGKVEADESYFGGQRKGKRGRGAAGKVAVFGLLKRNGKVYTVTVPNSNRYFISYYP

SEQ ID NO: 33911 - protein, 139 aa, Neisseria meningitidis; identical to SEQ ID NO: 19334

SEQ ID NO: 33912 - protein, 492 aa, Neisseria meningitidis; identical to SEQ ID NO: 25188

SEQ ID NO: 33913 - protein, 256 aa, Neisseria meningitidis; identical to SEQ ID NO: 25572

SEQ ID NO: 33914 - protein, 126 aa, Neisseria meningitidis; identical to SEQ ID NO: 3371

SEQ ID NO: 33915 - protein, 262 aa, Neisseria meningitidis; identical to SEQ ID NO: 19290

SEQ ID NO: 33916 - protein, 92 aa, Neisseria meningitidis; identical to SEQ ID NO: 600

SEQ ID NO: 33917 - protein, 214 aa, Neisseria meningitidis; identical to SEQ ID NO: 18108

SEQ ID NO: 33918 - protein, 105 aa, Neisseria meningitidis
VATSSEIKGKYVEKVEVANGVVTAQMASSGVNKEIQGKKLSLWAKRQAGSVKWFCGQPVQRAKADADAVTAAANKKIDTNHSHEPTSRHSRESGNLGLSAQKLIG

SEQ ID NO: 33919 - protein, 362 aa, Neisseria meningitidis; identical to SEQ ID NO: 26024

SEQ ID NO: 33920 - protein, 56 aa, Neisseria meningitidis; identical to SEQ ID NO: 18281

SEQ ID NO: 33921 - protein, 69 aa, Neisseria meningitidis; identical to SEQ ID NO: 3128

SEQ ID NO: 33922 - protein, 156 aa, Neisseria meningitidis; identical to SEQ ID NO: 24511

SEQ ID NO: 33923 - protein, 283 aa, Neisseria meningitidis; identical to SEQ ID NO: 19031

SEQ ID NO: 33924 - protein, 128 aa, Neisseria meningitidis; identical to SEQ ID NO: 605

SEQ ID NO: 33925 - protein, 201 aa, Neisseria meningitidis
MTIMNINTSENKDAVAEHTGQWLEKAVIGLNLCPFAKAPHVKNLVRIAISEAKHLDSFLEDLDEELQRLGNTPATELETTLLVHPTLFPDFDVFNDMLDIADAAVIENGLEGIVQIAPFHPQFRFQNTEPDDIGNYTNRSPYPTLHLIREDSIAKAAQAFPDTSAIFERNIALLEKMGHEGWAKLGITSCPYPHNKKNISK

SEQ ID NO: 33926 - protein, 100 aa, Neisseria meningitidis; identical to SEQ ID NO: 7884

SEQ ID NO: 33927 - protein, 56 aa, Neisseria meningitidis
LPSLFTKISGKMTALYPWLMPIYHQIAQTFDEGLGHHAVLIKADSGLGVERLHIRR

SEQ ID NO: 33928 - protein, 260 aa, Neisseria meningitidis; identical to SEQ ID NO: 25508

SEQ ID NO: 33929 - protein, 64 aa, Neisseria meningitidis
LLIQSALCFEAEAHEYTNIQEMEWVSLFSDPQKDDDSLITLKDEKITVKNYIVPWWKKVKTLEN

SEQ ID NO: 33930 - protein, 451 aa, Neisseria meningitidis; identical to SEQ ID NO: 5920

SEQ ID NO: 33931 - protein, 572 aa, Neisseria meningitidis
MNLHQTVEHEAAAAFAAAGIAGSPVVLQPTKNAEHGDFQINGVMGAAKKAKQNPRELAQKVADALAGNAVIESAEVAGPGFINLRLRPEFLAQNIQTALNDARFGIAKTDKPQTVVIDYSSPNLAKEMHVGHLRSSIIGDSISRVLAFMGNTVVRQNHVGDWGTQFGMLVAYLVEQQKDNAAFELADLEQFYRAAKVRFDEDPAFADTAREYVVKLQGGDETVLALWKQFVDISLSHAQAVYDTLGLKLRPEDVAGESKYNDDLQPVVDDLVQKGLAVEDDGAKVVFLDEFKNKEGEPAAFIVQKQGGGFLYASTDLACLRYRVGTLHADRLLYVVDHRQALHFEQLFTTSRKAGYLPENVGAAFVGFGTMMGKDGKPFKTRSGDTVKLVDLLTEAVERAAALVKEKNPELGADEAAKIGKTVGIGAVKYADLSKNRTSNYVFDWDAMLSFEGNTAPYLQYAYTRVQSVFRKAGEWDATAPTVLSEPLEKQLAAELLKFEDVLQSVADTAYPHYLAAYLYQIATLFSRFYEACPILKAESASRNSRLQLAKLTGDTLKQGLDLLGIDVLDVM

SEQ ID NO: 33932 - protein, 195 aa, Neisseria meningitidis; identical to SEQ ID NO: 2216

SEQ ID NO: 33933 - protein, 99 aa, Neisseria meningitidis; identical to SEQ ID NO: 1110

SEQ ID NO: 33934 - protein, 401 aa, Neisseria meningitidis; identical to SEQ ID NO: 2387

SEQ ID NO: 33935 - protein, 157 aa, Neisseria meningitidis; identical to SEQ ID NO: 3112

SEQ ID NO: 33936 - protein, 188 aa, Neisseria meningitidis; identical to SEQ ID NO: 1467

SEQ ID NO: 33937 - protein, 675 aa, Neisseria meningitidis; identical to SEQ ID NO: 24824

SEQ ID NO: 33938 - protein, 797 aa, Neisseria meningitidis; identical to SEQ ID NO: 18537

SEQ ID NO: 33939 - protein, 406 aa, Neisseria meningitidis; identical to SEQ ID NO: 19143

SEQ ID NO: 33940 - protein, 100 aa, Neisseria meningitidis; identical to SEQ ID NO: 18276

SEQ ID NO: 33941 - protein, 798 aa, Neisseria meningitidis; identical to SEQ ID NO: 6178

SEQ ID NO: 33942 - protein, 56 aa, Neisseria meningitidis; identical to SEQ ID NO: 2971

SEQ ID NO: 33943 - protein, 109 aa, Neisseria meningitidis; identical to SEQ ID NO: 899

SEQ ID NO: 33944 - protein, 396 aa, Neisseria meningitidis; identical to SEQ ID NO: 19663

SEQ ID NO: 33945 - protein, 317 aa, Neisseria meningitidis; identical to SEQ ID NO: 18507

SEQ ID NO: 33946 - protein, 415 aa, Neisseria meningitidis; identical to SEQ ID NO: 24724

SEQ ID NO: 33947 - protein, 559 aa, Neisseria meningitidis; identical to SEQ ID NO: 19383

SEQ ID NO: 33948 - protein, 367 aa, Neisseria meningitidis; identical to SEQ ID NO: 20804

SEQ ID NO: 33949 - protein, 246 aa, Neisseria meningitidis; identical to SEQ ID NO: 24130

SEQ ID NO: 33950 - protein, 199 aa, Neisseria meningitidis
MSEKPEKIVLASGNAGKLEEFGNLFKPYSITVLPQSAFGIPECPEPYPTFVENALAKARHAAEYSGLPALADDSGICAAALNGAPGIHSARYAGDNPKSDTANNLKLAAELAGKTDKSCCYVCVLVFVRHKDDPRPIIAEGVWHGQWNGVPAGENGFGYDPYFYLPGHGKTAAELDSEVKNRESHRAQALADLIRKLAL

SEQ ID NO: 33951 - protein, 217 aa, Neisseria meningitidis
MGLGMEIGKLIVAFLVLINPFSALSLYLDLTNGHSTKERRKVARTAAVAVFAVIAVFALIGGTLLKVLGISVGSFQVGGGILVLLIAISMMNGNDNPAKQNLGAQPETGQVRPARNAGAIAVVPIAIPITIGPGGISTVIIYASAAKTYSDIALIIVAGLVVSAICYAILIVAGKVSRLLGATGLTILNRIMGMMLAAVSVEIIVSGLKTIFPQLAG

SEQ ID NO: 33952 - protein, 101 aa, Neisseria meningitidis; identical to SEQ ID NO: 18172

SEQ ID NO: 33953 - protein, 149 aa, Neisseria meningitidis; identical to SEQ ID NO: 2323

SEQ ID NO: 33954 - protein, 161 aa, Neisseria meningitidis; identical to SEQ ID NO: 1189

SEQ ID NO: 33955 - protein, 456 aa, Neisseria meningitidis; identical to SEQ ID NO: 24957

SEQ ID NO: 33956 - protein, 1204 aa, Neisseria meningitidis; identical to SEQ ID NO: 25361

SEQ ID NO: 33957 - protein, 346 aa, Neisseria meningitidis; identical to SEQ ID NO: 18466

SEQ ID NO: 33958 - protein, 841 aa, Neisseria meningitidis; identical to SEQ ID NO: 25855

SEQ ID NO: 33959 - protein, 318 aa, Neisseria meningitidis; identical to SEQ ID NO: 18259

SEQ ID NO: 33960 - protein, 820 aa, Neisseria meningitidis; identical to SEQ ID NO: 19259

SEQ ID NO: 33961 - protein, 316 aa, Neisseria meningitidis; identical to SEQ ID NO: 24212

SEQ ID NO: 33962 - protein, 310 aa, Neisseria meningitidis; identical to SEQ ID NO: 18494

SEQ ID NO: 33963 - protein, 117 aa, Neisseria meningitidis; identical to SEQ ID NO: 15855

SEQ ID NO: 33964 - protein, 136 aa, Neisseria meningitidis; identical to SEQ ID NO: 19752

SEQ ID NO: 33965 - protein, 201 aa, Neisseria meningitidis; identical to SEQ ID NO: 2273

SEQ ID NO: 33966 - protein, 313 aa, Neisseria meningitidis; identical to SEQ ID NO: 3575

SEQ ID NO: 33967 - protein, 423 aa, Neisseria meningitidis; identical to SEQ ID NO: 13531

SEQ ID NO: 33968 - protein, 181 aa, Neisseria meningitidis; identical to SEQ ID NO: 19013

SEQ ID NO: 33969 - protein, 664 aa, Neisseria meningitidis
MTYANFNINGFGDVKLTPYSPLLGYKAWDSFIGSIQSLSDLIYNVDNNRNKMEITVNNAIQAADSFLSSNWKRQNNKITKQNNKITKQNNKITKQNNKITKQNNKITKQNNKITKQNNKYCFFTCIPRHFFKFKKCISRYTRKMLKSSTVLQHELNIRIMETRGLANLIMILHQVRQTFLRILIHTAMYKKYLGLYIPFLMMQTLGKGAKIILDEGVNGESYWKNGINKIFSLILKRMGPISEIRLAAIPMGKRVVEISSQTFRQIRLRPPCPRFGRRHRNCRRQRLCRCIVRPPQPRHPHRHGLDCCIRFSCAQIKQRGHYHDRYHIPIFAYMASSTKYMPLKNIENLKAMDIEMNDHIVQIIRRFGLGRIFFYSYSKSSIIIFSSYVVYYIIYNYQFNYLSLLIYLLPMLCSIYMIIFFEKLGRYRYIKEKNFILFFHPELKVPRKESWVAVFIYIYYGLFGALFIENKSDITLSFYPLYSHYFFYYIILFYFMFMLIFSNERLNMENNKAKSDDNSVSIEFIQDFITASTDVINLSYENFRKNFYTQMSTDSTNYAAKHESLGKSVQRELQKTQSQLRQVVRKMQSKYNINNKARVAEISLLRQMQSQFSRKDVNKNLGNGNTLAQQGSYTKKDGTTAQAGDSLLAADKPAQPPHGQNAIH

SEQ ID NO: 33970 - protein, 384 aa, Neisseria meningitidis
LLEQDMSQNASVGIVMPQKIPFEVPLVLENGKTLPRFDLMIETYGELNAEKNNAVLICHALSGNHHVAGRHSAEDKYTGWWDNMVGPGKPIDTERFFVVGLNNLGGCDGSSGPLSINPETGREYGADFPLVTVKDWVKSQAALADYLSIGQWAAVVGGSLGGMQALQWAISYPERVRHALVIASAPKLSTQNIAFNDVARQAILTDPDFNEGHYRSRNTVPARGLRIARMMGHITYLAEDGLGKKFGRDLRSNGYQYGYGVEFEVESYLRYQGDKFVGRFDANTYLLMTKALDYFDPAADFGDSLTRALQNVKAKFFVASFSTDWRFAPERSHELVKALIAAQKSVQYIEVKSAHGHDAFLMEDEAYMRAVAAYMNNVYKGCQQ

SEQ ID NO: 33971 - protein, 449 aa, Neisseria meningitidis; identical to SEQ ID NO: 25776

SEQ ID NO: 33972 - protein, 247 aa, Neisseria meningitidis; identical to SEQ ID NO: 19102

SEQ ID NO: 33973 - protein, 415 aa, Neisseria meningitidis; identical to SEQ ID NO: 8108

SEQ ID NO: 33974 - protein, 128 aa, Neisseria meningitidis; identical to SEQ ID NO: 8714

SEQ ID NO: 33975 - protein, 351 aa, Neisseria meningitidis; identical to SEQ ID NO: 24180

SEQ ID NO: 33976 - protein, 84 aa, Neisseria meningitidis; identical to SEQ ID NO: 19256

SEQ ID NO: 33977 - protein, 210 aa, Neisseria meningitidis; identical to SEQ ID NO: 5238

SEQ ID NO: 33978 - protein, 622 aa, Neisseria meningitidis; identical to SEQ ID NO: 19142

SEQ ID NO: 33979 - protein, 291 aa, Neisseria meningitidis; identical to SEQ ID NO: 18797

SEQ ID NO: 33980 - protein, 127 aa, Neisseria meningitidis; identical to SEQ ID NO: 2622

SEQ ID NO: 33981 - protein, 469 aa, Neisseria meningitidis; identical to SEQ ID NO: 3744

SEQ ID NO: 33982 - protein, 294 aa, Neisseria meningitidis; identical to SEQ ID NO: 19808

SEQ ID NO: 33983 - protein, 203 aa, Neisseria meningitidis; identical to SEQ ID NO: 352

SEQ ID NO: 33984 - protein, 154 aa, Neisseria meningitidis; identical to SEQ ID NO: 19997

SEQ ID NO: 33985 - protein, 539 aa, Neisseria meningitidis; identical to SEQ ID NO: 24562

SEQ ID NO: 33986 - protein, 489 aa, Neisseria meningitidis
LKAVIPHTGGHEMNEYYQLIKHPDISLSPISDGIGVGNPATGEILAYVRNTGSDKLKNLIQKAAAAQKLWAAKTALERADILWRWYFLVKENKEALARLMTMEQGKSLTESRGEIDYAASFVRWFAEEARRIDGDVLTSVKASQKLVVLKQPVGVTAAITPWNFPSAMIARKAAPALAVGCAMIIKPASLTPLSAYALASLAYEAGIPQDLLPVVSGRASEIGREFATNPIIRKISFTGSTEVGAKIFADSAADIKKLSLELGGNAPFIVFDDADLDKAVEGALASKFRNSGQTCVCTNRVYAQSGIYDEFCRKLSEKVAELKLGNGLEDGVNQGPLIEEKAVEKVEQHIADALAKGASCLTGGKRSALGGTFFEPTVLSGVTAQMAVAREETFGPLCPVFRFETEAEVIEAANNTEYGLAAYLFTADTARQWRVGEALEYGMVGINTGLISNEAAPFGGVKRSGLGREGSKYGADEYLELKYLCMDVG

SEQ ID NO: 33987 - protein, 96 aa, Neisseria meningitidis; identical to SEQ ID NO: 2317

SEQ ID NO: 33988 - protein, 307 aa, Neisseria meningitidis; identical to SEQ ID NO: 3745

SEQ ID NO: 33989 - protein, 228 aa, Neisseria meningitidis; identical to SEQ ID NO: 18794

SEQ ID NO: 33990 - protein, 476 aa, Neisseria meningitidis; identical to SEQ ID NO: 19035

SEQ ID NO: 33991 - protein, 281 aa, Neisseria meningitidis; identical to SEQ ID NO: 25290

SEQ ID NO: 33992 - protein, 348 aa, Neisseria meningitidis; identical to SEQ ID NO: 25619

SEQ ID NO: 33993 - protein, 281 aa, Neisseria meningitidis; identical to SEQ ID NO: 49

SEQ ID NO: 33994 - protein, 388 aa, Neisseria meningitidis; identical to SEQ ID NO: 24991

SEQ ID NO: 33995 - protein, 359 aa, Neisseria meningitidis; identical to SEQ ID NO: 18893

SEQ ID NO: 33996 - protein, 351 aa, Neisseria meningitidis; identical to SEQ ID NO: 1414

SEQ ID NO: 33997 - protein, 206 aa, Neisseria meningitidis; identical to SEQ ID NO: 18065

SEQ ID NO: 33998 - protein, 929 aa, Neisseria meningitidis; identical to SEQ ID NO: 19459

SEQ ID NO: 33999 - protein, 214 aa, Neisseria meningitidis
MKLKHLLPLLLSAVLSAQAYALTEGEDYLVLDKPIPQEQSGKIEVLEFFGYFCVHCHHFDPLLLKLGKALPSDAYLRTEHVVWQPEMLGLARMAAAVNLSGLKYQANPAVFKAVYEQKIRLENRAVAGKWALSQKGFDGKKLMRAYDSPEAAAAALKMQKLTEQYGIDSTPTVIVGGKYRVIFNNGFDGGVHTIKELVAKVREERKRQTPAVQK

SEQ ID NO: 34000 - protein, 229 aa, Neisseria meningitidis; identical to SEQ ID NO: 18366

SEQ ID NO: 34001 - protein, 225 aa, Neisseria meningitidis; identical to SEQ ID NO: 1002

SEQ ID NO: 34002 - protein, 232 aa, Neisseria meningitidis; identical to SEQ ID NO: 24621

SEQ ID NO: 34003 - protein, 184 aa, Neisseria meningitidis; identical to SEQ ID NO: 3342

SEQ ID NO: 34004 - protein, 304 aa, Neisseria meningitidis; identical to SEQ ID NO: 3720

SEQ ID NO: 34005 - protein, 83 aa, Neisseria meningitidis; identical to SEQ ID NO: 15092

SEQ ID NO: 34006 - protein, 219 aa, Neisseria meningitidis; identical to SEQ ID NO: 18394

SEQ ID NO: 34007 - protein, 37 aa, Neisseria meningitidis; identical to SEQ ID NO: 7611

SEQ ID NO: 34008 - protein, 256 aa, Neisseria meningitidis; identical to SEQ ID NO: 15220

SEQ ID NO: 34009 - protein, 159 aa, Neisseria meningitidis; identical to SEQ ID NO: 22445

SEQ ID NO: 34010 - protein, 154 aa, Neisseria meningitidis; identical to SEQ ID NO: 2010

SEQ ID NO: 34011 - protein, 335 aa, Neisseria meningitidis; identical to SEQ ID NO: 24131

SEQ ID NO: 34012 - protein, 193 aa, Neisseria meningitidis; identical to SEQ ID NO: 1378

SEQ ID NO: 34013 - protein, 65 aa, Neisseria meningitidis; identical to SEQ ID NO: 25330

SEQ ID NO: 34014 - protein, 264 aa, Neisseria meningitidis; identical to SEQ ID NO: 6162

SEQ ID NO: 34015 - protein, 584 aa, Neisseria meningitidis
VKPLRRLTNLLAACAVAAAAFGQPALAADLAQDPFITDNAQRQHYEPGGKYHLFGDPRGSVSDRTGQINVIQDYTHQMGNLLIQQANINGTIGYHTRFSGHGHEEHAPFDNHAADSASEEKGSVNEGFTVYRLNWKGHEHHPADGYDGPQGGNYPKPTGARDEYTYHVNGTARSIKLNPTDTRSIRQRISDNYNNLGSNFSDRADEANKKIFEHNAKLDRWGNSMEFVNGIAAGALNPFISAGEALGIGDILYGTRYAIDKAAMRNIAPLPAEGKFAVIGGLGSVAGFEKNTREAVDRWIQENPNAAETVEALVNVLPFAKVKNLTKAAKPGKAAVSGDFSKSYTCSFHGSTLVKTADGYKAIAHIQAGDRVLSKDEASGETGYKPVTTRYGNPYQETVYIEVSDGIGNSQTLISNRIHPFYSQGKWIQAGRLKKGDTLLSESGAKQTVQNITLKQQPLKAYNLTVADWHTYFVKGDKAETEGVWVHNSCPPYKRPNNATTKAQRESVQGKPCVECGKLAEKMIADHKKPLVVEYYETGTIDKSKMRAIESVQPQCPTCSAKQGGRLSQYSKEQKRKLSNGNKK

SEQ ID NO: 34016 - protein, 618 aa, Neisseria meningitidis; identical to SEQ ID NO: 19908

SEQ ID NO: 34017 - protein, 504 aa, Neisseria meningitidis; identical to SEQ ID NO: 17548

SEQ ID NO: 34018 - protein, 384 aa, Neisseria meningitidis
MSCEHLTMSYSTFPKTKNDALNEPMFFGQPVNVARYDQQKYEVFEKLIEKQLSFFWRPEEIDVSRDRIDYANLPEHEKHIFISNLKYQTLLDSIQGRSPNVALLPLVSIPELETWIETWSFSETIHSRSYTHIIRNIVNDPSVVFDDIVENEYITARAEDIACYYDDLIEYTQYYNLLGEGVHNVGGKPITVSLRGLKKKLYLCLMCVNVLEAIRFYVSFACSFAFAERELMEGNAKIIKLIARDEALHLTGTQHMLNLMRSGVDDSEMAEIAAELQDECFQLFKKAAEQEKEWAAYLFKDGSMIGLNKEILSQYVEYITNLRMQAVGLPAGFEGANQNPIPWINAWLSSDNVQVAPQEVEISSYLIGQIDSEVNTDDLGDFEL

SEQ ID NO: 34019 - protein, 196 aa, Neisseria meningitidis; identical to SEQ ID NO: 1629

SEQ ID NO: 34020 - protein, 176 aa, Neisseria meningitidis
MKFVSDLFSVILFFATYTVTKNMITATAVALVAGVVQAAFLYWKYKKLDTMQWVGLVLIVVFGGATIVLGDSRFIMWKPSVLFWLGALFLWGSHLAGKNGLKASIGREIQLPDAVWAKLTYMWVGFLIFMGIANWFVFTRFESQWVNYKMFGSTALMLVFFIIQGIYLSTCLKKED

SEQ ID NO: 34021 - protein, 378 aa, Neisseria meningitidis; identical to SEQ ID NO: 24648

SEQ ID NO: 34022 - protein, 373 aa, Neisseria meningitidis; identical to SEQ ID NO: 18063

SEQ ID NO: 34023 - protein, 338 aa, Neisseria meningitidis; identical to SEQ ID NO: 19647

SEQ ID NO: 34024 - protein, 348 aa, Neisseria meningitidis; identical to SEQ ID NO: 2437

SEQ ID NO: 34025 - protein, 188 aa, Neisseria meningitidis; identical to SEQ ID NO: 5680

SEQ ID NO: 34026 - protein, 163 aa, Neisseria meningitidis; identical to SEQ ID NO: 18549

SEQ ID NO: 34027 - protein, 382 aa, Neisseria meningitidis; identical to SEQ ID NO: 18068

SEQ ID NO: 34028 - protein, 162 aa, Neisseria meningitidis
MKKDIFYCEQWSYGYKKLHKPFSEKQAEEKHLKGELYTAVIGSATQPEYVITLREEVGFFSVHFFDKFGRDYLTHQFQKYSNSNYYFLSMAVWRDYITLESHDLAEGYTYFFNENTDDCYVLKEDFINNERYEKTELYPQKDKVILFPKFGEYDLVLNPDII

SEQ ID NO: 34029 - protein, 711 aa, Neisseria meningitidis; identical to SEQ ID NO: 24418

SEQ ID NO: 34030 - protein, 200 aa, Neisseria meningitidis; identical to SEQ ID NO: 24966

SEQ ID NO: 34031 - protein, 291 aa, Neisseria meningitidis; identical to SEQ ID NO: 122

SEQ ID NO: 34032 - protein, 339 aa, Neisseria meningitidis; identical to SEQ ID NO: 8559

SEQ ID NO: 34033 - protein, 354 aa, Neisseria meningitidis; identical to SEQ ID NO: 18199

SEQ ID NO: 34034 - protein, 257 aa, Neisseria meningitidis; identical to SEQ ID NO: 25547

SEQ ID NO: 34035 - protein, 159 aa, Neisseria meningitidis; identical to SEQ ID NO: 3392

SEQ ID NO: 34036 - protein, 527 aa, Neisseria meningitidis; identical to SEQ ID NO: 2485

SEQ ID NO: 34037 - protein, 153 aa, Neisseria meningitidis
MSDFSPISRFLADEAATLDLGEAWSSRLNAPLVIYLEGDLGAGKTTLTRGILRGLGHQGAVKSPTYAIVESYPLERFTLHHFDLYRFTTPEEWEDAGLDELFAANSVCLIEWPQQGGEFTPPADITATLTHDGDGRKCLLTAHTERGRESLPL

SEQ ID NO: 34038 - protein, 305 aa, Neisseria meningitidis; identical to SEQ ID NO: 25064

SEQ ID NO: 34039 - protein, 103 aa, Neisseria meningitidis; identical to SEQ ID NO: 1278

SEQ ID NO: 34040 - protein, 306 aa, Neisseria meningitidis; identical to SEQ ID NO: 1708

SEQ ID NO: 34041 - protein, 349 aa, Neisseria meningitidis; identical to SEQ ID NO: 6547

SEQ ID NO: 34042 - protein, 481 aa, Neisseria meningitidis; identical to SEQ ID NO: 25411

SEQ ID NO: 34043 - protein, 468 aa, Neisseria meningitidis; identical to SEQ ID NO: 3129

SEQ ID NO: 34044 - protein, 156 aa, Neisseria meningitidis; identical to SEQ ID NO: 681

SEQ ID NO: 34045 - protein, 398 aa, Neisseria meningitidis; identical to SEQ ID NO: 25363

SEQ ID NO: 34046 - protein, 347 aa, Neisseria meningitidis; identical to SEQ ID NO: 19860

SEQ ID NO: 34047 - protein, 74 aa, Neisseria meningitidis; identical to SEQ ID NO: 19783

SEQ ID NO: 34048 - protein, 216 aa, Neisseria meningitidis
MPVTRPAKINTYTRIIDASLALFNEEGERNISTNHIAAHLGISPGNLYYHFRNKDEIIVQLFKRYSEALLEYLNEAVLPSDVEDSINYMAGIYDVMWEYRFLFSDVNTLLARSAELLGEHNTFTQAKVSPLLVNLLTQLNGLNIIQADQTAMNDLAVNMWMITKYWFDFDSSLRGRTKLTEDSKARGVRRTLSLLRPYLLPEHREKYDRKIGNGNP

SEQ ID NO: 34049 - protein, 380 aa, Neisseria meningitidis; identical to SEQ ID NO: 24919

SEQ ID NO: 34050 - protein, 102 aa, Neisseria meningitidis; identical to SEQ ID NO: 18998

SEQ ID NO: 34051 - protein, 140 aa, Neisseria meningitidis; identical to SEQ ID NO: 2533

SEQ ID NO: 34052 - protein, 66 aa, Neisseria meningitidis; identical to SEQ ID NO: 1185

SEQ ID NO: 34053 - protein, 110 aa, Neisseria meningitidis; identical to SEQ ID NO: 19248

SEQ ID NO: 34054 - protein, 92 aa, Neisseria meningitidis; identical to SEQ ID NO: 32

SEQ ID NO: 34055 - protein, 436 aa, Neisseria meningitidis; identical to SEQ ID NO: 7990

SEQ ID NO: 34056 - protein, 190 aa, Neisseria meningitidis; identical to SEQ ID NO: 4428

SEQ ID NO: 34057 - protein, 188 aa, Neisseria meningitidis; identical to SEQ ID NO: 24602

SEQ ID NO: 34058 - protein, 146 aa, Neisseria meningitidis; identical to SEQ ID NO: 660

SEQ ID NO: 34059 - protein, 900 aa, Neisseria meningitidis; identical to SEQ ID NO: 25336

SEQ ID NO: 34060 - protein, 453 aa, Neisseria meningitidis; identical to SEQ ID NO: 5696

SEQ ID NO: 34061 - protein, 553 aa, Neisseria meningitidis; identical to SEQ ID NO: 18342

SEQ ID NO: 34062 - protein, 433 aa, Neisseria meningitidis; identical to SEQ ID NO: 2404

SEQ ID NO: 34063 - protein, 277 aa, Neisseria meningitidis
MPHALVLQFPSAEALPSDFPSRLPEPDYADEKRMRFIVEEGFSLSEADAALLGSRQIDHAVLPDMDFDELGLIVSDMDSTLITIECVDEIAAGVGLKDKVAEITERSMRGELDFEQSLRSRVALLAGLDEQILADVYENVLKLSPGAEFLLDECKRHDVKFLLVSGGFTFFTERLQQRLGFEYQHANVLEIENGRLTGRLKGRIIDAQAKADLLREYRSRLGLQPHQVLAMGDGANDIPMLKEAGIGVAYRAKPKAQAAADACINFGGLERVRGLFR

SEQ ID NO: 34064 - protein, 322 aa, Neisseria meningitidis; identical to SEQ ID NO: 24740

SEQ ID NO: 34065 - protein, 337 aa, Neisseria meningitidis; identical to SEQ ID NO: 263

SEQ ID NO: 34066 - protein, 240 aa, Neisseria meningitidis; identical to SEQ ID NO: 1969

SEQ ID NO: 34067 - protein, 462 aa, Neisseria meningitidis; identical to SEQ ID NO: 6381

SEQ ID NO: 34068 - protein, 298 aa, Neisseria meningitidis; identical to SEQ ID NO: 5738

SEQ ID NO: 34069 - protein, 508 aa, Neisseria meningitidis; identical to SEQ ID NO: 25440

SEQ ID NO: 34070 - protein, 78 aa, Neisseria meningitidis; identical to SEQ ID NO: 1622

SEQ ID NO: 34071 - protein, 186 aa, Neisseria meningitidis
VGIQDEKSPETVLPDKFPHRQVWIPACAGMTMQVFLTIPGYDVEAEIEKFVWMDAVIWQMPGWWMHEPWTVKKYIDEVLTAGHGKLYQSDGRHRVNPTEGYGTGGLLQGKKHMLSLTWNAPIEAFTREGDFFEGKGVDVLYMHFHKANEFLGMTRLPTFLCNDVVKNPQVEKYLADYQAHLEKVFG

SEQ ID NO: 34072 - protein, 367 aa, Neisseria meningitidis; identical to SEQ ID NO: 19424

SEQ ID NO: 34073 - protein, 253 aa, Neisseria meningitidis
MDANKEPNWEKRLENLRQTRRMKAVPTYAPLSRPSETGTDAPVPKLDDESRARVLKAYLKKWQEEHNAAVADCGEEVETDPMIVLQENWLNAQASLQMSVSEKHIESRRRIRFDAQKDSAEFETGQIEGRENADAAESGTAADGVAENGEGGAEEALMPVQINILNPKAVNRREVFCLSEQELTERLIKRLRPHLTDTVNGIIRTAVQKQMAVFTYQLQQMLHEQAGAVVEDVLEHDVRKILNDIKYELKYKR

SEQ ID NO: 34074 - protein, 402 aa, Neisseria meningitidis; identical to SEQ ID NO: 18265

SEQ ID NO: 34075 - protein, 196 aa, Neisseria meningitidis; identical to SEQ ID NO: 24441

SEQ ID NO: 34076 - protein, 526 aa, Neisseria meningitidis
MSVIKRALISLSDKAGAVEFAQTLHKLGVEILSTGGTAKLLADAGVPVIEVADYTGFPEMLDGRVKTLHPKIHGGILGRRDLGEHVAKMEEHGIGNIDLVCVNLYPFAATIAKPNCTLEDAIENIDIGGPTMVRSAAKNWKHVAIVTDTADFPAIAAELEANNGALSDKTRFNLSRKAFSHTAQYDGMISNYLTSLSDEVLSGTPEIGEFPSQFNQSWIKVQDMRYGENPHQRAAFYRDIDPAAGSLSAYKQLQGKELSYNNIADADAAWEAVKSFDAPACVIVKHANPCGVAVAADTLTAYKLAYVTDTTSAFGGIIAFNREVDGETVKQITDNQFMEVLMAPKFTAEALEIAAAKKNVRVLEVPLEAGANRFELKRVGGGLLVQTPDIHRLNRADLKVVSKRQPTEQEWNDLMFVWNVAKYVKSNAIVFGKGGQTYGIGAGQMSRVDSTRIAARKAQDAGLDLNGACAASDAFFPFRDGVDVIAEQGIKAIIHPAGSMRDQEVFDAADEHGIAMVVTDVRHFRH

SEQ ID NO: 34077 - protein, 718 aa, Neisseria meningitidis; identical to SEQ ID NO: 18271

SEQ ID NO: 34078 - protein, 207 aa, Neisseria meningitidis; identical to SEQ ID NO: 25887

SEQ ID NO: 34079 - protein, 164 aa, Neisseria meningitidis; identical to SEQ ID NO: 18028

SEQ ID NO: 34080 - protein, 90 aa, Neisseria meningitidis; identical to SEQ ID NO: 311

SEQ ID NO: 34081 - protein, 145 aa, Neisseria meningitidis; identical to SEQ ID NO: 7320

SEQ ID NO: 34082 - protein, 371 aa, Neisseria meningitidis; identical to SEQ ID NO: 24669

SEQ ID NO: 34083 - protein, 138 aa, Neisseria meningitidis; identical to SEQ ID NO: 671

SEQ ID NO: 34084 - protein, 90 aa, Neisseria meningitidis; identical to SEQ ID NO: 11161

SEQ ID NO: 34085 - protein, 489 aa, Neisseria meningitidis; identical to SEQ ID NO: 15549

SEQ ID NO: 34086 - protein, 258 aa, Neisseria meningitidis; identical to SEQ ID NO: 24376

SEQ ID NO: 34087 - protein, 117 aa, Neisseria meningitidis; identical to SEQ ID NO: 5140

SEQ ID NO: 34088 - protein, 436 aa, Neisseria meningitidis
MIVPDLFVAHFREAVPYIRQMRGKTLVAGIDDRLLEGDTLNKLAADIGLLSQLGIRLVLIHGARHFLDRHAAAQGRTPHYCRGLRVTDETSLEQAQQFAGTVRSRFEAALCGSVSGFARAPSVPLVSGNFLTARPIGVIDGTDMEYAGVIRKTDTAALRFQLDAGNIVWLPPLGHSYSGKTFYLDMLQTAASAAVSLQAEKLVYLTLSDGISRPDGTLAETLSAQEAQSLAEHAGGETRRLISSAVAALEGGVHRVQILNGAADGSLLQELFTRNGIGTSIAKEAFVSIRQAHSGDIPHIAALIRPLEEQGILLHRSREYLENHISEFSILEHDGNLYGCAALKTFAEADCGEIACLAVSPQAQDGGYGERLLAHIIDKARSMGISRLFALSTNTGEWFAERGFQTASEDELPETRRKAYRSNGRNSHILVRRLHR

SEQ ID NO: 34089 - protein, 176 aa, Neisseria meningitidis
MESFELEDLTLWLVRDADEAEMWIDRWAISYPVVQMSEASAGQSIGEWQAGLQTAFERIRGKYVAVVAHGAGAAAFLAWLYQVDILTRKKIANIILVPQRPDIFPDDAEHTFQRVRCPCRAALVVPEHGGVPHGWAQKQADLWNARLLVSPHSGSLNGMLGGWQWGMKLMQEMLLA

SEQ ID NO: 34090 - protein, 307 aa, Neisseria meningitidis; identical to SEQ ID NO: 19863

SEQ ID NO: 34091 - protein, 305 aa, Neisseria meningitidis; identical to SEQ ID NO: 1198

SEQ ID NO: 34092 - protein, 685 aa, Neisseria meningitidis; identical to SEQ ID NO: 19874

SEQ ID NO: 34093 - protein, 124 aa, Neisseria meningitidis; identical to SEQ ID NO: 3797

SEQ ID NO: 34094 - protein, 493 aa, Neisseria meningitidis; identical to SEQ ID NO: 18563

SEQ ID NO: 34095 - protein, 214 aa, Neisseria meningitidis; identical to SEQ ID NO: 3176

SEQ ID NO: 34096 - protein, 99 aa, Neisseria meningitidis; identical to SEQ ID NO: 5781

SEQ ID NO: 34097 - protein, 99 aa, Neisseria meningitidis; identical to SEQ ID NO: 19348

SEQ ID NO: 34098 - protein, 175 aa, Neisseria meningitidis; identical to SEQ ID NO: 25954

SEQ ID NO: 34099 - protein, 387 aa, Neisseria meningitidis; identical to SEQ ID NO: 30

SEQ ID NO: 34100 - protein, 200 aa, Neisseria meningitidis; identical to SEQ ID NO: 19887

SEQ ID NO: 34101 - protein, 221 aa, Neisseria meningitidis; identical to SEQ ID NO: 3662

SEQ ID NO: 34102 - protein, 308 aa, Neisseria meningitidis; identical to SEQ ID NO: 9802

SEQ ID NO: 34103 - protein, 105 aa, Neisseria meningitidis; identical to SEQ ID NO: 3792

SEQ ID NO: 34104 - protein, 106 aa, Neisseria meningitidis; identical to SEQ ID NO: 19891

SEQ ID NO: 34105 - protein, 166 aa, Neisseria meningitidis; identical to SEQ ID NO: 987

SEQ ID NO: 34106 - protein, 185 aa, Neisseria meningitidis
MINDIQKTAEGKMQRSVEVLKENLAKVRTGRAHTGLLDQVEVEYWGSMVPVSQVANVTLLDACTIGVKPFEGNMAAKVEKAIRDSNLGLNPAAVGDLIRVPMPMLTEERRKDLIKVVRGEAEEGRVSIRNVRRDANDHIKKLLKDKEISEDEARRGEEAVQKLTDKYITEADKLLTAKEEDLMAI

SEQ ID NO: 34107 - protein, 628 aa, Neisseria meningitidis; identical to SEQ ID NO: 19899

SEQ ID NO: 34108 - protein, 483 aa, Neisseria meningitidis; identical to SEQ ID NO: 5802

SEQ ID NO: 34109 - protein, 348 aa, Neisseria meningitidis; identical to SEQ ID NO: 25984

SEQ ID NO: 34110 - protein, 792 aa, Neisseria meningitidis; identical to SEQ ID NO: 25985

SEQ ID NO: 34111 - protein, 65 aa, Neisseria meningitidis; identical to SEQ ID NO: 3913

SEQ ID NO: 34112 - protein, 149 aa, Neisseria meningitidis; identical to SEQ ID NO: 628

SEQ ID NO: 34113 - protein, 473 aa, Neisseria meningitidis
MTTIYNTLTRQKEPFAPIDPENVRMYVCGMTVYDYCHLGHARVMVVFDMIARWLRECGYPLTYVRNITDIDDKIIARAAENGETIGELTARFIQAMHEDADALGVLRPDIEPKATENIPQMIAMIETLIQNGKAYPAANGDVYYAVREFSAYGQLSGKSLDDLRAGERVEVDGFKRDPLDFVLWKAAKAGEPAWESPWGNGRPGWHIECSAMSENLFGNTFDIHGGGADLQFPHHENEIAQSVGATGHTCGHHHAQTHHGQSIASHVKYWLHNGFIRVDGEKMSKSLGNFFTIREVLKQYDPEVVRFFILRAHYRSPLNYSDAHLDDAKGALTRLYTTLKNTPAAEFDLSENVNDYTRRFYAAMNDDFGTVEAVAVLFELAGEVNKTNDAQLAGCLKALGGIIGLLQRDPTEFLQGGAASDGLSNEEIEDLIARRKQARADKNWAESDRIRDLLNEHKIILEDNAGGTTWRRG

SEQ ID NO: 34114 - protein, 334 aa, Neisseria meningitidis; identical to SEQ ID NO: 25988

SEQ ID NO: 34115 - protein, 464 aa, Neisseria meningitidis; identical to SEQ ID NO: 19915

SEQ ID NO: 34116 - protein, 99 aa, Neisseria meningitidis; identical to SEQ ID NO: 19348

SEQ ID NO: 34117 - protein, 288 aa, Neisseria meningitidis; identical to SEQ ID NO: 19920

SEQ ID NO: 34118 - protein, 757 aa, Neisseria meningitidis; identical to SEQ ID NO: 25129

SEQ ID NO: 34119 - protein, 316 aa, Neisseria meningitidis; identical to SEQ ID NO: 3819

SEQ ID NO: 34120 - protein, 96 aa, Neisseria meningitidis; identical to SEQ ID NO: 5810

SEQ ID NO: 34121 - protein, 68 aa, Neisseria meningitidis; identical to SEQ ID NO: 5814

SEQ ID NO: 34122 - protein, 369 aa, Neisseria meningitidis; identical to SEQ ID NO: 15839

SEQ ID NO: 34123 - protein, 180 aa, Neisseria meningitidis; identical to SEQ ID NO: 3825

SEQ ID NO: 34124 - protein, 614 aa, Neisseria meningitidis
MQTNYLSETDSIMKKLICLFAVFLMLCGRAFALDANDLLPPEKAFVPELAVADDGVNVRFKIADGYYMYQAKIVGKTDPADLLGQPSFSKGEEKEDEFFGRQTVYHHEAQVAFPYAKAVGEPYKLVLTYQGCAEAGVCYPPVDTEFDISGNGTYHPQTDEPASAKDRFLQPSSQNGSGALPPPKGDEGGDSRFKLSWDTLNANLLAFFLAGLGLSFTACMYPLLPIVSSIVVGDKKAGKARAFVLSVVYVQGLALTYTLVGIVAGLTGALLTVWLQQAWVVLAASALMVVLALSMFGLFNIQLPNAVQSYFQNQSSRLSGGKIVSVFIMGILSALIVGPCVAPPLAFALGYIGQTGDAVLGGLALYTLALGTGVPLIAIGTFGGHILPKAGDWMNAVKYAFGFILLAVAVYLATPHLPYYLVVALYTLLMLVPACMLLVNGRRQKRRPKAVAFALGSILLIGGAWFGWQGANGKTTALHHFLTLNPPAEAGKSSEHGKMFADTAALKAAMDTALKEHPDKPVVLDFYADWCISCKEMAAYTLNQPEVHQAVDMERFFQIDVTANTPEHQALLKEYGLFGPPGVFVVRSDGSRSEPLLGFVKADKFIEWYEQNRF

SEQ ID NO: 34125 - protein, 155 aa, Neisseria meningitidis; identical to SEQ ID NO: 3828

SEQ ID NO: 34126 - protein, 273 aa, Neisseria meningitidis; identical to SEQ ID NO: 25999

SEQ ID NO: 34127 - protein, 186 aa, Neisseria meningitidis; identical to SEQ ID NO: 104

SEQ ID NO: 34128 - protein, 145 aa, Neisseria meningitidis; identical to SEQ ID NO: 1775

SEQ ID NO: 34129 - protein, 136 aa, Neisseria meningitidis; identical to SEQ ID NO: 1774

SEQ ID NO: 34130 - protein, 134 aa, Neisseria meningitidis; identical to SEQ ID NO: 1773

SEQ ID NO: 34131 - protein, 106 aa, Neisseria meningitidis; identical to SEQ ID NO: 19934

SEQ ID NO: 34132 - protein, 234 aa, Neisseria meningitidis; identical to SEQ ID NO: 19933

SEQ ID NO: 34133 - protein, 399 aa, Neisseria meningitidis; identical to SEQ ID NO: 26006

SEQ ID NO: 34134 - protein, 125 aa, Neisseria meningitidis; identical to SEQ ID NO: 26008

SEQ ID NO: 34135 - protein, 133 aa, Neisseria meningitidis; identical to SEQ ID NO: 26009

SEQ ID NO: 34136 - protein, 98 aa, Neisseria meningitidis
LRTEFFKNPTLAPSTAAPWSKRQTAEKPLPVSEPATASSPRTRQAEKRDTNPLPPDTAIRIKKPFTLKFQTASVKYRPSFPIKSTRFTVKESGYRQVV

SEQ ID NO: 34137 - protein, 129 aa, Neisseria meningitidis; identical to SEQ ID NO: 11676

SEQ ID NO: 34138 - protein, 326 aa, Neisseria meningitidis; identical to SEQ ID NO: 4334

SEQ ID NO: 34139 - protein, 206 aa, Neisseria meningitidis; identical to SEQ ID NO: 19411

SEQ ID NO: 34140 - protein, 87 aa, Neisseria meningitidis; identical to SEQ ID NO: 19939

SEQ ID NO: 34141 - protein, 46 aa, Neisseria meningitidis; identical to SEQ ID NO: 6727

SEQ ID NO: 34142 - protein, 117 aa, Neisseria meningitidis; identical to SEQ ID NO: 9841

SEQ ID NO: 34143 - protein, 71 aa, Neisseria meningitidis; identical to SEQ ID NO: 1785

SEQ ID NO: 34144 - protein, 451 aa, Neisseria meningitidis; identical to SEQ ID NO: 19945

SEQ ID NO: 34145 - protein, 64 aa, Neisseria meningitidis
LEWETKYCSKFNLRVNFVSCLSVSSGSFFPFRGPRLVYLNRKVSFNKQRLCCKLSESGKLSWLI

SEQ ID NO: 34146 - protein, 122 aa, Neisseria meningitidis; identical to SEQ ID NO: 848

SEQ ID NO: 34147 - protein, 130 aa, Neisseria meningitidis; identical to SEQ ID NO: 1661

SEQ ID NO: 34148 - protein, 144 aa, Neisseria meningitidis; identical to SEQ ID NO: 6

SEQ ID NO: 34149 - protein, 131 aa, Neisseria meningitidis; identical to SEQ ID NO: 1281

SEQ ID NO: 34150 - protein, 120 aa, Neisseria meningitidis; identical to SEQ ID NO: 1496

SEQ ID NO: 34151 - protein, 72 aa, Neisseria meningitidis; identical to SEQ ID NO: 113

SEQ ID NO: 34152 - protein, 37 aa, Neisseria meningitidis; identical to SEQ ID NO: 970

SEQ ID NO: 34153 - protein, 729 aa, Neisseria meningitidis; identical to SEQ ID NO: 19950

SEQ ID NO: 34154 - protein, 137 aa, Neisseria meningitidis; identical to SEQ ID NO: 1900

SEQ ID NO: 34155 - protein, 122 aa, Neisseria meningitidis; identical to SEQ ID NO: 17939

SEQ ID NO: 34156 - protein, 135 aa, Neisseria meningitidis; identical to SEQ ID NO: 15867

SEQ ID NO: 34157 - protein, 346 aa, Neisseria meningitidis
MKAMVYHGANDIRFEEKPRPQIIDPTDAVVKIVKTTICGTDLGIWKGKKTEVADGRILGHEGIGIVEEVGDAVKNIKVGDKVIISCVSKCCTCDNCKIQLYSHCRNGGWILGYMIDGTQAEYVRTPYADNSLVPLPDNVNEEVALLLSDALPTAHEIGVQYGDVKPGDTVFIAGAAPVGMSALLTAQLYSPAAIIVCDMDENRLKLAKELGATHTISPASGDVSKQVFAIVGEDGVDCAIEAVGIPATWNMCQDIVKPGGHIAVVGVHGQSVDFKLEKLWIKKLAITTGLVNANTTEMLMKAISSSSVDYTKMLTHRFKFSELEKAYDVFKHAAENQAMKVVLEAD

SEQ ID NO: 34158 - protein, 442 aa, Neisseria meningitidis; identical to SEQ ID NO: 19956

SEQ ID NO: 34159 - protein, 330 aa, Neisseria meningitidis; identical to SEQ ID NO: 19957

SEQ ID NO: 34160 - protein, 1826 aa, Neisseria meningitidis
MKTKRFKINAISLSIFLAYALTPYSEAALVRDDVDYQIFRDFAENKGKFFVGATDLSVKNKQGQNIGNALSNVPMIDFSVADVNKRIATVVDPQYAVSVKHAKAEVHTFYYGQYNGHNDVADKENEYRVVEQNNYEPHKAWGASNLGRLEDYNMARFNKFVTEVAPIAPTDAGGGLDTYKDKNRFSSFVRVGAGRQLVYEKGAYHQEGNEKGYDLRDLSQAYRYAIAGTPYKDINIDQTMNTEGLIGFGNHNTHYSAEELKQALSQDALTNYGVLGDSGSPLFAFDKQKNQWVFLGTYDYWAGYGKKSWQEWNIYKKEFADKIKQRDNAGTIKGNREHHWNITFGTNSKIGSTAVRLANNERDANNGQNVTFEDNGTLVLDQNINQGAGGLFFKGDYTVKGANNDITWLGAGIDVADGKKVVWQVKNPNGDRLAKIGKGTLEINGTGVNQGQLKVGDGTVILNQQADADKKVQAFSQVGIVSGRGTLVLNSSNQINPDNLYFGFRGGRLDANGNDLTFEHIRNVDEGARIVNHNTDRASTITLTGKSLITAPQNLSVYEIRNDYDDDDYYGYYSYRKPIPQGKDLYYKNYRYYALKSGGSVNAPMPENGQTENNDWVFMGYKQEEAQKNAMNHKNNQRISGFSGFFGEENGKGHNGALNLNFNGKSAQNRFLLTGGTNLNGKISVTQGNVLLSGRPTPHARDFVNKSSARKDAHFSKNNEVVFEDDWINRTFKATEIAVNQSASFSSGRNVSNITANITATDNAKVNLGYKNGDEVCVRSDYTGYVTCNTDNLSDKALNSFGATQINGNVNLSQNAALVLGKAALWGQIQGQGNSISLNQHSKWHLTGDSQVHNLSLADSHIHLNNASDAQSANKYHTLKINHLSGNGHFHYLTHLAKNLGDKVLVKESASGHYQLHVQDKTGEPNQEGLNLFDASSVQDRSHLSVSLANNHVDLGALRYTIKTENGITRLYNPYAENRRRVKPAPSPATNTASQAQKATQTDGAQIAKPQNIVVAPPSPQANQAEEAKRQQAKAEQVKRQQAEAERKSAELAKQKAEAEREARELATRQKAEQERSSAELARRHEKEREAAELSAKQKVEAEREAQALAVRRKAEAEEAKRQAAELARRHEKEREAAELSAKQRVGEEERRQTAQSQPQRRKRRAAPQDYMAASQDRPKRRGHRSVQQNNVEIAQAQAELVRRQQEERKAAELLAKQRAEAEREAQALAARRKAEAEEAKRQAAELAHRQEAERKAAELSANQKAAAEAQALAARQQKALARQQEEARKAAELAVKQKAETERKTAELAKQRAAAEAAKRQQEARQTAELARRQEAERQAAELSAKQKAETDREAAESAKRKAEEEEHRQAAQSQPQRRKRRAAPQDYMAASQNRPKRRGRRSTLPAPPSPSFDSSAYAAPRALHNPDWYENDYEEIPLDALEDENVSESVDTSDKQPQDNTELHEKYENDYEEIPLDALEDEDVSESVDTSDKQPQDNTELHEKVETVSLQPRAAQPRAQAATQPQAQAAAQADAVSTNTNSALSDAMASTQSILLDTGASLTRHIAQKSRADAEKNSVWMSNIGYGRDYASAQYRRFSSKRTQTQIGIDRSLSENMQIGGVLTYSDSQHTFDQASGKNTFVQANLYGKYYLNDAWYVAGDIGAGSLRSRLQTQQKANFNRTSIQTGLTLGNTLKINQFEIVPSAGIRYSRLSSADYKLGNDSVKVSSMSVKTLTAGLDFAYRFKVGNLTVKPLLSAAYFANYGKGGVNVGGNSFAYKADNQQKYSAGAALLYRNVTLNVNGSITKGKQLEKQKSGQIKIQIRF

SEQ ID NO: 34161 - protein, 258 aa, Neisseria meningitidis; identical to SEQ ID NO: 26034

SEQ ID NO: 34162 - protein, 1057 aa, Neisseria meningitidis
MNKTWKRQVFRHTALYTAILMFSHTGGGGQTQTQTHKYAIVMNGQKLPEVKWGTGYRNLAQKSNERQFTHTSGFGIKKNVTLSFNNTDEVVAQKNGTVVFGAATYLPPYGKVSGFDTAKLTERGKAVDWIRTTHPGLIGYSYENVTCSNNYYNASSGCPELSYKTQFTFGNQGLKRKTNGRLDIDEDKSRDGSPIYKLQNYPWLGVSFNLSSESLVKSIKYNKIISSFSEDVTQSNGTNSQYKDKNLVYTTGDYQYKNKYSSRYVGQDEHSAVAFYLNAKLHLLDKKQIQNIAQVSELNFGTLRTLIEPTEEWKKKRTNFFQGGNWTFEDKGEVSVKLKLPEVKAGRCVNKNNPNPNAKAPSPALTAPALWFGPVQNGKVQMYSASVSTYPDSSSSQIFLQNLSRKDDTSKPGRYSLKPLSMSEIKSKEPNFTGRQTVIRLDSGVQQIKLQGNEVANFNGNDGKNDTFGIVSEGSFMPDTSEWKKVLLPWTVRASNDDGQFNTFNKEENNGKPKYSQKYRSRDSSKHERNLGDIVNSPIVAVGGYLATSANDGMVHIFKKGNGVDERNYSLKLSYIPGTMPRQYFDNDTSALKDSTLAKELRAFAEKGYVGDRYGVDGGFVLRQVERNGKDHVFMFGAMGFGGRGAYALDLTKADGNDPTKASLFDVKDNGNNGNNRVELGYTVGTPQIGKTHNGKYAAFLASGYATKTIDSTDNKTALYVYDLESSGTLIKKIDVPGGKGGLSSPTLVDKDLDGTVDIAYAGDRGGSMYRFDLKDWSVRTIFSGNKPITSAPAISQLKDKRVVIFGTGSDLSEEDVLNTDEQYIYGIFDDDTAASNVDVKLKGLGGGLLEQHLTQEDKTLFLTDYKRSDGSGDKGWVVKLEAGQRVTVKPTVVLRTAFVTIHKYTGNDKCGAETAILGINTADGGKLTKKSARPIVPDANKDVAQYSGHKKGTNGKSIPIGCMQKGNEIVCPNGYVYDKPVNVRYLDEKKTDGFSTTADGDAGGSGIDPAGKRAGKNNRCFSQKGVRTLLMNDLDSLDITGPTCGMKRISWREVFF

SEQ ID NO: 34163 - protein, 300 aa, Neisseria meningitidis
MNPAMIERLKAVENQAEAMERGARSAYLKQQAQELGISLATLYRKLEAVSVKPTRKRRSDAGKTELKPEEAKLISAVLVEAMRRNGKRLMSVRQAVEMLRANGKIEAARIDGETGEVIPSLRTAFRPLARHRPHRPVMAHPRRRHEDQTPLYRPTVGLGGRNTPRAAHTDRRQHPPFPRHPPTAQTRPPSDHISIKFAHNAIRRLGYDGSTPGKSKHTMHGFRHLFTNISLTAGKDTLTTDLALGHISRAALQRAGFSSLHHYLTADSYRLQERRELAEWYSRRHRQAYEAAAQNTCNKT

SEQ ID NO: 34164 - protein, 399 aa, Neisseria meningitidis; identical to SEQ ID NO: 19964

SEQ ID NO: 34165 - protein, 336 aa, Neisseria meningitidis
MIFSIIVPIYNVEKYLRCCVDSVLAENFADYEMILVDDGSPDGCGKICDEYAGKYPHIKVIHQENGGLSDARNAGIRAAKGDYLIFLDSDDYWADTNRSKNGGGILFDLQQLADKKVDLILHPSSLNYHVIPKGADFSDNDFVRHFETLVEGRYYIANAWTKIVRREIIIKNNLFFPKGYIHEDFPYSLKLARFVKTFAFYDNPFYQYRVLGNSISHNVKYKNFSDMLAHLDRGVDFLVENKNSPIYGGLQKFVFDNIGYLRSILVRLYFSKNIILIYRKYFSFKEKCRKIFGAKTIRPVFIGKTAFIIGLPILRLLVPPMLYPAIKAVYQKFFSE

SEQ ID NO: 34166 - protein, 1041 aa, Neisseria meningitidis
MNKTLKRRVFRHTALYAAILMFSHTGGGGAQAQTRQYAIIMNEGNQPEVQWNGSYSIKDKDRKREYTHHNHSRGGSSVSFNNSDELVSQQSGTAVFGTATYLPPYGKVSGFDADGLNKRGNAAGWIRTTRIALAGYSYEGVVCRSGTGCPKLVYKTRFSFDNPDLVKNAGRLDRHTDPSRENSPIYKLKDYPWLGVSFNLGAEGTTKDGKTINKLVSSFDEKNSSNNNLVYTTEGRDISLGDWQREKTAMAYYLNAKLHLLDKKGIKDITNKTVQLGVLRPSIDVRLQRNTGLAGLLNFWASWDIKDNGQIPVKLGLPEVKAGRCINKANPNPKAQALSPALTAPALWFGAGQDGKAEMYSASVSTYPDSSSSRIFLQNLKRKNDPNKPGRYSLADLSASDIQSKEPSFTSRQTIIRLDGGVHEIKLDRSNEATGLNGNDGKNDTFGIVSEGSFMPDTSEWKKVLLPWTVRASNDDGQFNTFNKEENNGKPKYSQKYRSRDSSKHERNLGDIVNSPIVAVGGYLATSANDGMVHIFKKGNGVDERNYSLKLSYIPGTMPRQYFDNDTSALKDSTLAKELRAFAEKGYVGDRYGVDGGFVLRQVERNGKDHVFMFGAMGFGGRGAYALDLTKADGNDPTKASLFDVKDNGNNGNNRVELGYTVGTPQIGKTHNGKYAAFLASGYATKEINSTENQTALYVYDLESNNGTPIATINVPDGKGGLSSPTLVDKDLDGTVDIAYAGDRGGSMYRFDLSGNNPTSWSARAIFSGNKPITSAPAISQLKDKRVVIFGTGSDLSEDDVLSTSEQYIYGIFDDDMVANNVNVKLSGLGGGLLEQHLTQEDKTLFLTDYKRSDGSGDKGWVVKLEAGQRVTVKPTVVLRTAFVTIHKYTGNDKCGAETAILGINTADGGKLTKKSARPIVPDANKDVAQYSGHKKGTNGKSIPIGCMEKNGGTVCPNGYVYDKPVNVRYLDEKKTDGFSTTADGDAGGSGIDPAGKRAGKNNRCFSQKGVRTLLMNDLDSLDITGPTCGMKRISWREVFF

SEQ ID NO: 34167 - protein, 721 aa, Neisseria meningitidis
MKTDIQTELTQALLPHEKVWANEEKTILAKNILLDLVEKTDPTIIGLLLNNDELKRHFFVEVNGVLVFKLQDLRFFLDKHSVNNSYTKYANRIGLTDGNRFLKDNSDIVLDFPFKDCVLNGGQSTEEGEEIYFKRSNSQPASQPASQPASQPQLYTKLTRKRQEIFFNQTLAFDEIDRLFDAKAFSKFSRYTADGKQAVGEIKRHSDGTPAENLIIKGNNLIALHSLAKQFKGKVKLIYIDPPYYFVKKKQQDSFGYNTNFKLSTWLTFMKNRLSIAKELLTDDGIIVISIDDDGNAYLKILLDEIFGFENFIGNLPTIMNLKGNNDEYAFAGTHEYTLVFAKNKDKSTFYEFPIDEDNFLEKWEEDEIGFYKKGAPMRATGTEDKREDRPEMFYPFLVKNNTVSTITDEEFSQIYNKDLEVFNDDFIQKLKEKYENLGYNFILPIADKQWGRWRWGYSIKNKARLQTDIIVSQSKNGISLYKKQRPELDDLPTKKPKTIFYKPEYSSGNGTEQMKNLFGEKAFKNPKPEELIQDFITITTNESDIVLDYHLGSGTTAAVAHKMNRQYIGIEQMDYIETLAVERLKKVIDGEQGGISKAVNWQGGGEFVYAELAPFNETAKQQILACEDSDGIKTLFEGLCERYFLKYNVSVNEFSQIIQEPEFQSLPLDEQKQMVLEMLDLNQMYVSLSEMDDEQFADCLNDDDKAVSRAFYQAEKKNGE

SEQ ID NO: 34168 - protein, 507 aa, Neisseria meningitidis; identical to SEQ ID NO: 19972

SEQ ID NO: 34169 - protein, 244 aa, Neisseria meningitidis
MASHNTTHQMKTLCSSCSLRELCLPVGLLPNELSQLDAVIRQSRRLKKGEYLFCVGEALTSLFAIRSGFFKTTVASQDGRDQVTGFFMSGELIGMDGICSHVHSCDAVALEDSEVCELPFTHIEELGQNIPSLRTHFFRMMSREIVRDQGVMLLLGNMRAEERIAAFLLNLSQRLYSRGFAANDFILRMSREEIGSYLGLKLETVSRTLSKFHQEGLISVEHKHIKILNLQVLKKMVSGCSHAI

SEQ ID NO: 34170 - protein, 209 aa, Neisseria meningitidis; identical to SEQ ID NO: 7848

SEQ ID NO: 34171 - protein, 380 aa, Neisseria meningitidis; identical to SEQ ID NO: 314

SEQ ID NO: 34172 - protein, 453 aa, Neisseria meningitidis
MSSPSNTNRQTSSRLTYILTVAGATVGFGATWRFPYLVGENGGGAYVFLFCIAMLVIGIPMILVENVIGRRKGVNALDAFGGPMNGKPIAKIWKLVGWMGLLGAFGIMAYYMALGGWVISYIVNIIGGNLNISSPIDGVVTKGFFAEHINSPWEIAFYTLLFVAVNQWILVKGVIGGIEKAAKLMPLLFLFLIAMVVRNVTLPGAMEGVAFYLKPDFSKITAELFVFVLGQVFFALSLGFGVMITLSSYLDKNENLVQTAVITAITNTIIAILAGFMIFPSLFSFGVAPDSGPTLVFQSLPIVFSHMWAGSVFAVIFFSLLLIAALTTSLTIYEVLITTIQEKTKIRRTAAITIVLAAIFIFGNIPSILSYGPWKDVSVFGKNIFDAFDYISGNILFMLTALGSALFAGFVMKDEAKDELLYKGNHTTVNIWFAYVKYLVPLVILLIFVSNLF

SEQ ID NO: 34173 - protein, 169 aa, Neisseria meningitidis; identical to SEQ ID NO: 26042

SEQ ID NO: 34174 - protein, 448 aa, Neisseria meningitidis
MSQALPYRPDIDTLRAAAVLSVIVFHIEKNWLPGGFLGVDIFFVISGFLMTEILLREMSGGRFSLKAFYIRRIKRILPAFFAVLAATLAGGFFLFTKDDFFLLWKSALTALGFASNLYFARGKDYFDPAQEEKPLLHIWSLSVEEQFYFVFPILLLLVARKSLRVQFGFLAALCALSLAASFIPSALDKYYLPHLRACELLIGSLTAVWMRYRQQRNLAVGKRYAAVGALFSACILSACLFAYSEQTAYFPGPAALIPCLAVAALIYFNHYEHPLKKFFQWKITVAAGLISYSLYLWHWPILAFMRYIGPDNLPPYSPAAAIVLTLAFSLISYHCIEKPFKKWKGSFAQSVLWIYALPMLILGAGSFFAMRLPFMAQYDRLGLTRSNTSCHNNTGKQCLWGDTEKQPELLVLGDSHADHYKTFFDAVGKKEKWSATMVSADACAYVEG

SEQ ID NO: 34175 - protein, 324 aa, Neisseria meningitidis
MQENPTVWLFDLDNTLHDADAGIFTLINRAMTRYMARRLKLSESAASDLRQEYWHRYGATLAGLQIHHPEIDIAEFLRESHPIDAILTKLHGMADTEHTLCRLNGRKAVFSNGPSFYVRAVVGALGLENRFDALFGTDDFGLLYKPNPQAYLNVCRLLDVPPECCIMVDDSADNLHQAKALGMKTVWFGAKSHALSFIDACARDMAQLARYAETLSEHRQTHYNTLILKIRKKTMRKTFLILMTTAALLSGCAWETYQDGNGKTAVRQKYPAGTPVYYQDGSYSKNMNYNQYRPERHAVLPNQTGNNADEEHRQHWQKPKFQNR

SEQ ID NO: 34176 - protein, 372 aa, Neisseria meningitidis; identical to SEQ ID NO: 3260

SEQ ID NO: 34177 - protein, 91 aa, Neisseria meningitidis
MIHEEISAMPMGYETLIGDMGSALSGGQKQRIVLARALILRTENPIFRCSDQPFGYCQKSSQCKLEWLVYHKNYGGTQKGNGGISRENVFR

SEQ ID NO: 34178 - protein, 558 aa, Neisseria meningitidis
MSQQYVYSMLRVSKVVPPQKTIIKDISLSFFPGAKIGLLGLNGAGKSTVLRIMAGVDKEFEGEAVPMGGIKIGYLPQEPELDPEKTVREEVESGLGEVAAAQKRLEEVYAEYANPDADFDALAEEQGRLEAIIAAGSSTGGGAEHELEIAADALRLPDWDAKIGNLSGGEKRRVALCKLLLSKPDMLLLDEPTNHLDAESVEWLEQFLVRFPGTVVAVTHDRYFLDNAAEWILELDRGHGIPWKGNYSSWLEQKEKRLENEAKSEAARVKAMKQELEWVRQNAKGRQAKSKARLARFEEMSNYEYQKRNETQEIFIPVAERLGNEVIEFVNVSKSFGDKVLIDDLSFKVPAGAIVGIIGPNGAGKSTLFKMIAGKEQPDSGEVKIGQTVKMSLIDQSREGLQNDKTVFDNIAEGRDILQVGQFEIPARQYLGRFNFKGSDQSKITGQLSGGERGRLHLAKTLLGGGNVLLLDEPSNDLDVGTLRALEDALLEFAGSVMVISHDRWFLDRIATHILACEGDSKWVFFDGNYQEYEADKKRRLGEEGTKPKRIKYKPVTR

SEQ ID NO: 34179 - protein, 209 aa, Neisseria meningitidis; identical to SEQ ID NO: 1847

SEQ ID NO: 34180 - protein, 141 aa, Neisseria meningitidis; identical to SEQ ID NO: 7863

SEQ ID NO: 34181 - protein, 89 aa, Neisseria meningitidis; identical to SEQ ID NO: 3886

SEQ ID NO: 34182 - protein, 153 aa, Neisseria meningitidis; identical to SEQ ID NO: 7521

SEQ ID NO: 34183 - protein, 97 aa, Neisseria meningitidis; identical to SEQ ID NO: 19990

SEQ ID NO: 34184 - protein, 124 aa, Neisseria meningitidis; identical to SEQ ID NO: 1868

SEQ ID NO: 34185 - protein, 96 aa, Neisseria meningitidis; identical to SEQ ID NO: 3692

SEQ ID NO: 34186 - protein, 127 aa, Neisseria meningitidis; identical to SEQ ID NO: 26053

SEQ ID NO: 34187 - protein, 78 aa, Neisseria meningitidis; identical to SEQ ID NO: 1011

SEQ ID NO: 34188 - protein, 78 aa, Neisseria meningitidis; identical to SEQ ID NO: 1011

SEQ ID NO: 34189 - protein, 66 aa, Neisseria meningitidis; identical to SEQ ID NO: 3905

SEQ ID NO: 34190 - protein, 64 aa, Neisseria meningitidis; identical to SEQ ID NO: 3555

SEQ ID NO: 34191 - protein, 63 aa, Neisseria meningitidis; identical to SEQ ID NO: 24296

SEQ ID NO: 34192 - protein, 139 aa, Neisseria meningitidis; identical to SEQ ID NO: 7880

SEQ ID NO: 34193 - protein, 80 aa, Neisseria meningitidis; identical to SEQ ID NO: 1154

SEQ ID NO: 34194 - protein, 77 aa, Neisseria meningitidis
MQGCNHYIFLFRKHLLYGQLLLYVPSFSAPYFRILDEAFSSVSCRPKPSQTILVLVAATPIRLFKRPQEHDWLVALA

SEQ ID NO: 34195 - protein, 67 aa, Neisseria meningitidis; identical to SEQ ID NO: 10269

SEQ ID NO: 34196 - protein, 64 aa, Neisseria meningitidis; identical to SEQ ID NO: 631

SEQ ID NO: 34197 - protein, 147 aa, Neisseria meningitidis; identical to SEQ ID NO: 20005

SEQ ID NO: 34198 - protein, 72 aa, Neisseria meningitidis; identical to SEQ ID NO: 292

SEQ ID NO: 34199 - protein, 40 aa, Neisseria meningitidis; identical to SEQ ID NO: 11881

SEQ ID NO: 34200 - protein, 263 aa, Neisseria meningitidis; identical to SEQ ID NO: 26069

SEQ ID NO: 34201 - protein, 114 aa, Neisseria meningitidis
LRTHFVISNVPSTPTTIRGRELEGKLILEVPAQVNPIPQSVLRAAQEENVIIRDTTGRIYNRWWFSIRWLCRCTSCKKRTIDTNRENRGRCVSNCKCKHWISMDCQFVRAKRRS

SEQ ID NO: 34202 - protein, 100 aa, Neisseria meningitidis; identical to SEQ ID NO: 20013

SEQ ID NO: 34203 - protein, 124 aa, Neisseria meningitidis; identical to SEQ ID NO: 6571

SEQ ID NO: 34204 - protein, 101 aa, Neisseria meningitidis; identical to SEQ ID NO: 705

SEQ ID NO: 34205 - protein, 73 aa, Neisseria meningitidis; identical to SEQ ID NO: 3916

SEQ ID NO: 34206 - protein, 72 aa, Neisseria meningitidis; identical to SEQ ID NO: 7897

SEQ ID NO: 34207 - protein, 71 aa, Neisseria meningitidis; identical to SEQ ID NO: 19861

SEQ ID NO: 34208 - protein, 37 aa, Neisseria meningitidis; identical to SEQ ID NO: 14718

SEQ ID NO: 34209 - protein, 61 aa, Neisseria meningitidis
VPEQARARPIQTAMTLCRRFGAGWRHTRRLPRFISHRSSETRDPPGPTCGMKRLSWREVFY

SEQ ID NO: 34210 - protein, 219 aa, Neisseria meningitidis; identical to SEQ ID NO: 20022

SEQ ID NO: 34211 - protein, 74 aa, Neisseria meningitidis; identical to SEQ ID NO: 13735

SEQ ID NO: 34212 - protein, 692 aa, Neisseria meningitidis; identical to SEQ ID NO: 20024

SEQ ID NO: 34213 - protein, 410 aa, Neisseria meningitidis; identical to SEQ ID NO: 24659

SEQ ID NO: 34214 - protein, 133 aa, Neisseria meningitidis; identical to SEQ ID NO: 9910

SEQ ID NO: 34215 - protein, 96 aa, Neisseria meningitidis; identical to SEQ ID NO: 20028

SEQ ID NO: 34216 - protein, 71 aa, Neisseria meningitidis; identical to SEQ ID NO: 3925

SEQ ID NO: 34217 - protein, 54 aa, Neisseria meningitidis; identical to SEQ ID NO: 1909

SEQ ID NO: 34218 - protein, 53 aa, Neisseria meningitidis
LEHIARGMCVAIMAYFGGFVRALFDLGVFERGDVKGRGKWFSRFWRRCRRCCA

SEQ ID NO: 34219 - protein, 375 aa, Neisseria meningitidis; identical to SEQ ID NO: 20031

SEQ ID NO: 34220 - protein, 333 aa, Neisseria meningitidis; identical to SEQ ID NO: 20032

SEQ ID NO: 34221 - protein, 218 aa, Neisseria meningitidis; identical to SEQ ID NO: 3932

SEQ ID NO: 34222 - protein, 203 aa, Neisseria meningitidis; identical to SEQ ID NO: 11924

SEQ ID NO: 34223 - protein, 243 aa, Neisseria meningitidis; identical to SEQ ID NO: 20036

SEQ ID NO: 34224 - protein, 1066 aa, Neisseria meningitidis
MRTTPTFPTKTFKPAAMALAVATTLSACLGGGGGTSAPDFNAGGTGIGSNSRATTAKSAAVSYAGIKNEMCKDRSMLCAGRDDVAVTDRDAKINAPPNLHTGDFTNPNDAYKNLINLKPAIEAGYTGRGVEVGIVDTGESVGSISFPELYGRKEHGYNENYKNYTAYMRKEAPEDGDGKDIEASFDDEAVIETEAKPTDIRHVKEIGHIDVVSHIIGGRSVDGRPAGGIAPDATLHIMNTHDGTKNEIMSAAIRNAWVKLGERGVRIVNNSFGTTSRAGTADHFQIANSEEQYRQALLAYSGGDKTDEGIRLMQQSDYGNLSYHIRNKNMLFIFSASNDAQAQPNTLTLLPFYEKDAQKGIITVAGVDRSGEKFNGSNHCGITAMWCLSAPYEASVRFTRTNPIQIAGTSFSAPIVTGTAALLLQKYPWMSNDNLRTTLLTTAQDIGAVGVDSKFGWGLLDAGKAMNGPASFPFGDFTADTKGTSDIAYSFRNDISGTGGLIKKGGSQLQLHGNNTYTGKTIIEGGSLVLYGNNKSDMRVETKGALIYNGAASGGSLNSDGIVYLADTDRSGANETVHIKGDLQLGGEGTLYTRLGKLLKVDGTAMTGGKLYMSARGKGAGYLNRTGQRVPFLSAAKIGRDYSFFTNIETDGGLLASLDSVEKTAGSEGDTLSYYVRRGNAARTASAAAHSAPAGLKHAVEQGGSNLENLMVELDASESSATPETVETAAADRTDMPGIRPYGATFRAAAAVQHANAADGVRIFNSLAATVYADSTAAHADMQGRRLKAVSDGLDHNGTGLRVIAQTQQDGGTWEQGGVEGKMRGSTQTVGIAAKTGENTTAAATLGMGRSTWSENSANAKTDSISLFAGIRHDAGDIGYLKGLFSYGRYKNSISRSTGADEHAEGSVNGTLMQLGALGGVNVPFAATGDLTVEGGLRYDLLKQDAFAEKGSALGWSGNSLTEGTLVGLAGLKLSQPLSDKAVLFATAGVERDLNGRDYTVTGGFTGATAATGKTGARNMPHTRLVAGLGADVEFGNGWNGLARYSYAGSKQYGNHSGRVGVGYRF

SEQ ID NO: 34225 - protein, 388 aa, Neisseria meningitidis
MDIQSKAKKLIEMIQTAPVEWKPLGEVASIGKGKQLNKSLLREKDKYPVINGGINPSGYWHEYNNEAGTIVISQGGASAGFVNWMDIPFFAGAHAYTIKANEDKLLQRFAYIFKNEANYIHAMSIRRGIPALAKSELQNLLIPIPPLETQQKIVKILDKFTELEAELALRKRQYRYYRDFLLDFDNQIGGGIADGYQCRLKDVVWKTLGEIAEYSKNRICSDKLNEHNYVGVDNLLQNREGKKLSGYVPSEGKMTEYIANDILIGNIRPYLKKIWQADCTGGTNGDVLVIRVTDEKVNPKYLYQVLADDKFFAFNMKHAKGAKMPRGSKAAIMQYKIPIPPLPEQEKIVAILDKFDTLTHSVSEGLPYEIALRRKQYEYYREQLLAFR

SEQ ID NO: 34226 - protein, 547 aa, Neisseria meningitidis
MKQSARIKNMDQTLKNTLGICALLAFCFGAAIASGYHLEYEYGYRYSAVGALASVVFLLLLARGFPRVSSVVLLIYVGTTALYLPVGWLYGAPSYQIVGSILESNPAEAREFVGNLPGSLYFVQALFFIFGLTVWRYCVSGGFADVKNYKRRSKIWLTILLTLILSCAVMDKIASDKDLREPDAGLLLNIFDLYYDLASAPAQYAAKRAHILEAAKKASTWHIRHVAPKYKNYVVVIGESARSDYMNVYGFPLPDTPFLSQTKGLLINGYQSTAHATNLSLPQTLGLPGEPNNNIVSLAKQAGFRTAWLSNQGMLGHFANEISTYALRSDYPWFTQRGDYGKSAGLSDRLLLPAFKRVLIGNAGTKPRLIVMHLMGSHSDFCTRLDKDARRFQYQTEKISCYVSTIAQTDKFLEDTVKILNENKESWSLVYFSDHGLMHVGKGGERTLTHGAWKRQSYGVPLVKISSDDTRREMIKVRRSAFNFLRGFGSWTGIETDELPDDGYDFWGNVPDVPGEGNNLAFIDGLPDDPAPWYAGKGKSTKNTSKK

SEQ ID NO: 34227 - protein, 533 aa, Neisseria meningitidis
MIYGSMPSEKLTIFQTAFVMQVNIQIPYILPRRVRAEDTPYACYLKQLQTAKNVDWKQVQLAYDKWDYKQEGLTGAGAAIIALAVTVVTAGAGVGAALGLNGAAAAAADAAFASLASQASVSLINNKGDVGKTLKELGRSRTVKNLVVAAATAGVSNKLGASSLATWSETPWVNNLNVNLANAGSAALINTAVNGGSLKDNLEANILAALVNTAHGEAASKIKQLDQHYIAHKVAHAVAGCAAAAANKGKCQDGAIGAAVGEILGEALLDGRDPGSLNVKDRAKIIAKAKLAAGTVAALSKGDVNAAANAAAVAVESNALSKERMDKLTKCLSGKTCSTTMEKVNAIKKDEQFSKVIDTEIQKVCSRNPLGDGCRNGINMSIKYIAMPAAWKYMPTDVSRVAKEVFGYLYNSQGASTRFDKYFNTIDNRADFFAASNLYEQNLGSKARWFGGADFVSRAAITGLGADGEASYITFAAGKVVGNPPIYEWRAASGNALIVNGFYNFRDLFNKKTNPREWDIQQLKSEQKLLQPI

SEQ ID NO: 34228 - protein, 947 aa, Neisseria meningitidis
MCNHHPRHSHDNDTIRIRGARTHNLKNIDLDIPRHKLVVITGLSGSGKSSLAFDTLYAEGQRRYVESLSAYARQFLQMMDKPDVDLIEGLSPAISIEQKSTSHNPRSTVGTVTEIHDYLRLLYARVGTPYCPEHNLPLSSQTVSQMVDAVLKLPEDTRVMILAPAVRERKGEFVDFFADLQAQGFARVRVDGEVYQLDEVPKLEKNIKHNIDVVIDRVKVKADIKQRLAESFETALRHGNERALAIEMDSGEEHWFSARFACPVCSYSLPELEPRLFSFNNPMGSCPTCDGLGNTNFFDSEKVVAHPELSLASGAIDGWDKRNQFYFQMIQSLARHYGFDVQAAWETLPAKIKKVVLHGSGKEVIDFTYLSERGTTFNRSHAFEGIIPNLERRYRETDSETVREKLREYQNHRACPSCGGARLRKEARYVYVGGEPLHEVSAWPLTKTHRFFETLDLDGNKKQIAEKILKEITERLGFLINVGLDYLNLSRSAETLSGGEAQRIRLASQIGSGLTGVMYVLDASIGLHQRDNDRLLATLKRLRDLGNSVIVVEHDEDAIREADFVVDMGPGAGEHGGNVLIADTPENVAKCENSVTGQYLSGKKSIAVPSERTPVNPDRMLVLKGARGNNLKNVTLELPLGLITCITGVSGSGKSTLINDTLAKITARELNRAQEEPAPYDDIRGLEHLDKVINVDQSPIGRTPRSNPATYTGLFTPIRELFAGVPLSRERGYNVGRFSFNVKGGRCEACQGDGVIKVEMHFLPDVYVPCEVCHGKRYNRETLEIQYKGKNISQVLDMTVEEAREFFDAVPTVSRKLQTLMDVGLGYIRLGQSATTLSGGEAQRVKLALELSKRDTGRTLYILDEPTTGLHFADIALLLEVIDRLKGKGNSIVIIEHNLDVIKTADWIVDLGPEGGDGGGRIIASGSPEEVAKVKGSYTGKYLKNIL

SEQ ID NO: 34229 - protein, 101 aa, Neisseria meningitidis
MEYCEPEEASDPYATYRRANLMARLPLFVVILVLLNIFPLPAHPLAWLVPAGFMVLVGGFPLSLPLVALLVLTCCILAHCPPLSRLLCYPCPNHPMSKNSA

SEQ ID NO: 34230 - protein, 875 aa, Neisseria meningitidis
MQEQYQPAAIEPAAQKKWDDARIFNVSEDASKPKYYCLSMFPYPSGKLHMGHVRNYTIGDVLSRFKLLNGFNVMQPMGWDAFGMPAENAAMKNNVAPAAWTYDNIEYMKTQLKSLGFAIDWARETATCKPEYYRWEQWLFTKLFEKGIVYRKNGTVNWDPVDQTVLANEQVIDGRGWRSGALIEKREIPMYYFKITDYAEELLNDLDKLEHWPEQVKTMQRNWIGKSRGMTVRFAVSDDSKQGLEGDYAKFLQVYTTRPDTLMGATYVAVAAEHPLATAAAADKPELQEFIAECKAGSVAEADMATMEKKGVPTGRYVVNPLNGDKLEVWIANYVLWGYGDGAVMAVPAHDERDFEFATKYNLPKKQVIAGDNAFDENQWQEWYGDKENGVLVNSGDLDGLDFQTAFDAVAAKLQSQGAGEPKTQYRLRDWGISRQRYWGCPIPIVHCEQCGDVPVPADQLPVVLPENVVPDGMGSPLAKMPEFYETACPCCGGAAKRETDTMDTFMESSWYFFRYMSPKFSDGMVDPAAAKYWGAVDQYIGGIEHAILHLLYARFFTKLMRDEGLVNVDEPFERLLTQGMVVCETYYRENDKGGKDWINPADVELTFDDKGRPISAVLKADGLPVVISGTEKMSKSKNNGVDPQELINAYGADTARLFMMFAAPPEQSLEWSDSGVEGAHRFLRRLWRTVYEYLKQGEAVKAFAGSQDGLSKELKDLRHKLHATTAKVSDDYGRRQQFNTAIAAVMELLNQYDKTDTGGEQGRAVAQEVLETAVRLLWPIVPHICETLWSELNGAKLWEAGWPTVDEAALVKSEIEVMVQVNGKLRGKITVAADASKADLEAAALATEGAVKFMEGKPAKKIIVVPGRLVNIVV

SEQ ID NO: 34231 - protein, 266 aa, Neisseria meningitidis
MPTVFIFLTAVYAGLGAFAWHCQQQGRGRDYPWKTELPVLGAALTVHGAALLMPVIQDKIIIMGFGYSGSLIVWMMLFIYFAGSFFYPLRGVQLLLYPCAALMLLSGLVFPGKFSGYEITDLPFMLHIGTSLLAYGLFGIATLLSVLTLLNRSLHCKKLSKLAGFLPSLLREKLMFQAMWAGFIQLTYSVVSGTFFAEAVFGKPMTFTHKTVFGILSWLIYGGLLLKHSMTAWRGKKAAVWTIIGFVSLMIAYMGSKFVLEIILNR

SEQ ID NO: 34232 - protein, 387 aa, Neisseria meningitidis
MRKFNLTALSVMLALGLTACQPPEAEKAAPAASGETQSANEGGSVSIAVNDNACEPMELTVPSGQVVFNIKNNSGRKLEWEILKGVMVVDERENIAPGLSEMTVTLLPGEYEMTCGLLTNPRGKLVVTDSGFKDTANEADLEKLSQPLADYKAYVQGEVKELVAKTKTFTEAVKAGDIEKAKSLFADTRVHYERIEPIAELFSELDPVIDAREDDFKDGAKDAGFTGFHRIEYALWVEKDVSGVKEIAAKLMTDVEALQKEIDALAFPPGKVVGGASELIEEVAGSKISGEEDRYSHTDLSDFQANVDGSKKIVDLFRPLIETKNKALLEKTDTNFKQVNEILAKYRTKDGFETYDKLGEADRKALQASINALAEDLAQLRGILGLK

SEQ ID NO: 34233 - protein, 238 aa, Neisseria meningitidis
MDTFLDRLKFLWPHGAKPSDIYNKIEMSASGFNRVWKEGAIPTADYLVKIQEVTGCDLNWLLTGKGLPYLDKARPENAGAFSVSRNSDGITDTMGNLDLSEFVFVPRYNVAAAAGYGAPVFGEEPLFCLAFRKYWIDNYVTKQPEKLSVITVKGDSMEGVLNHGDSILINHAETDPRDGLYVLRIGNDLFVKRVQRIPGKLLVTSENPRYAPFEIDLSNAQDDIAIIGRVEWYGRSID

SEQ ID NO: 34234 - protein, 64 aa, Neisseria meningitidis; identical to SEQ ID NO: 3951

SEQ ID NO: 34235 - protein, 83 aa, Neisseria meningitidis
SVCCYFLFDIGLYFSMDKRYSNKIKKNFGKILIYYRNNKCNNQLCINKYIGFCFGWRWNKICCNIFIKSFFFGQYCMFLKDYL

SEQ ID NO: 34236 - protein, 696 aa, Neisseria meningitidis
MTLKASKQASKQASKQASKQASKQASKQASGRVNLLTLSVLSLFCTPYVGSDAYDPVKEAEIKNKFILEAAEDRNSHVWRGPCSVSFDCFGAFSYQPGSDTRSTNIGDAADFSFSDKPANGVSHYFSSGKTDPNSSEALYDEINITGKNYNSGILAVDNMPVVKKYVTENYGADLKQAVKDQLKDLYKTRPEDWGKNKKIVEEAIIKQYGIPRNKINKFRKVIDPIIEEAVLTPHSNTTPTNLDNIFNKKLHVKIENKSHVAGQVLELTKMTLKDSLWEPRRHSDIHTLETSDNARIRLNTKDEKLTVHKDYAGGADFLFGYDVRESDEPALTFEDKVSGQSGVVLERRPENLKTLDGRKLIAAKTADSGSFAFKQNYRQGLYELLLKQCEGGFCLGVQRLAIPEAEAVLYAQQAYAANTLFGLRAADRGDDVYAADPSRQNIRGGAAADGRRKGVQIGGEVFVRQNEGSRLAIGVMGGRVGQHASVNSKGGAAGSDLHGYGGGVYAAWHQLRDKQTGAYLDGWLQYQRFKHRINDENRAERYKTKGWTASVEGGYNTLVAEGVVGKGNNVRFYLQPQAQFTYLGVNGGFTDSEGTGVGLLGSGQWQSRAGIRAKNRFALRNGVNLQPFAAFNVLHRSKSFGVEMDGEKQTLAGRTALEGRFGIEAGWKGHMSARIGYGKRTDGDKEAALSLKWLF

SEQ ID NO: 34237 - protein, 680 aa, Neisseria meningitidis; identical to SEQ ID NO: 11925

SEQ ID NO: 34238 - protein, 201 aa, Neisseria meningitidis; identical to SEQ ID NO: 2273

SEQ ID NO: 34239 - protein, 225 aa, Neisseria meningitidis; identical to SEQ ID NO: 25428

SEQ ID NO: 34240 - protein, 364 aa, Neisseria meningitidis
MSSAIGPYKGGLRFHPTVDLGVLKFLAFEQVFKNALTTLPMGGGKGGSDFDPKGKSDAEVMRFCQAFMTELYRHIGADTDVPAGDIGVGGREIGYLFGQYKKIRNEFSSVLTGKGLEWGGSLIRPEATGYGCVYFAQAMLQTRNDSFEGKRVLISGSGNVAQYAAEKAIQLGAKVLTVSDSNGFVLFPDSGMTEAQLAALIELKEVRRERVATYAKEQGLQYFENQKPWGVAAEIALPCATQNELDEEAAKTLLANGCYVVAEGANMPSTLGAVEQFIKAGILYAPGKASNAGGVATSGLEMSQNAIRLSWTREEVDQRLFGIMQSIHESCLKYGKVGDTVNYVNGANIAGFVKVADAMLAQGF

SEQ ID NO: 34241 - protein, 163 aa, Neisseria meningitidis; identical to SEQ ID NO: 2563

SEQ ID NO: 34242 - protein, 269 aa, Neisseria meningitidis; identical to SEQ ID NO: 1709

SEQ ID NO: 34243 - protein, 473 aa, Neisseria meningitidis; identical to SEQ ID NO: 19913

SEQ ID NO: 34244 - protein, 319 aa, Neisseria meningitidis; identical to SEQ ID NO: 25194

SEQ ID NO: 34245 - protein, 98 aa, Neisseria meningitidis
MDAKHRLKKYVYHLLVAIDQLFNALTGGAADETLSSRTYRGARLAQKPKTRWKVLYTLINGVFFDRHHCRQAYISELKGRQHDARFNQSRAAGEKGTR

SEQ ID NO: 34246 - protein, 300 aa, Neisseria meningitidis; identical to SEQ ID NO: 6138

SEQ ID NO: 34247 - protein, 463 aa, Neisseria meningitidis; identical to SEQ ID NO: 19954

SEQ ID NO: 34248 - protein, 945 aa, Neisseria meningitidis
MNRRHTFPLTLTALAIAAAFPSYAANPETAAPDAAQTQSLKEVTVRAAKVGRRSKEATGLGKIVKTSETLNKEQVLGIRDLTRYDPGVAVVEQGNGASGGYSIRGVDKNRVAVSVDGVAQIQAFTVQGSLSGYGGRGGSGAINEIEYENISTVEIDKGAGSSDHGSGALGGAVAFRTKEAADLISDGKSWGIQAKTAYGSKNRQFMKSLGAGFSKDGWEGLLIRTERQGRETRPHGDIADGVAYGIDRLDAFRQTYDIQHPNKKAEYFLAEGESEPKPVAKLAGNGNYLKNQLNRWVEERRSKGQALNSEEEAMVREAQARHENLSAQSYTGGGRILPDPMDYRSGSWLAKLGYRFGGRHYVGGVFEDTKQRYDIRDMTEKQYYGTDEANKFRNKSGVYDGDDFRDGLYFVPNIEEWKGDTNLVKGIGLKYSRTKFIDEHHRRRRMGLLYRYENEAYSDNWADKAVLSFDKQGVATDNNTLKLNCAVYPAVDKSCRASADKPYSYDSSDRFHYREQHNVLNASFEKSLKNKWTKHHLTLGFGYDASNAISRPEQLSHNAARISEHTGEYTADGKDKYRLGKPEVVEGSVCGYIETLRSRKCVPRKINGSNIHISLNDRFSIGKYFDFSLGGRYDRKNFTTSEELVRSGRYVDRSWNSGIVFKPNRHFSLSYRASSGFRTPSFQELFGIDIYHDYPKGWQRPALKSEKAANREIGLQWKGDFGFLEISSFRNRYTDMIAVADHKTKLPNQAGQLTEIDIRDYYNAQNMSLQGVNILGKIDWNGVYGKLPEGLYTTLAYNRIKPKSVSNRPGLSLRSYALDAVQPSRYVLGFGYDQPEGKWGANIMLTYSKGKNPDELAYLAGDQKRYSTKRASSSWSTADVSAYLNLKKRLTLRAAIYNIGNYRYVTWESLRQTAESTANRHGGDSNYGRYAAPGRNFSLALEMKF

SEQ ID NO: 34249 - protein, 348 aa, Neisseria meningitidis; identical to SEQ ID NO: 2437

SEQ ID NO: 34250 - protein, 162 aa, Neisseria meningitidis
  misc_feature 156, 157: 'Xaa' is any amino acid
LADFKPDFAWLLKRPLCFLAFGFGSGLAPFAPGTFGTLAALPLAFVLILLGIDGLLLAFLCIVLFMWGIRICAYAERETGVSDHGGIVWDEIVAMLFVLAFVPFRWTWWLAAFVLFRLFDALKPSPVGWFDKNLHGGLGIMADDMAAAVMTLIVLXXTHLIN

SEQ ID NO: 34251 - protein, 249 aa, Neisseria meningitidis; identical to SEQ ID NO: 1060

SEQ ID NO: 34252 - protein, 227 aa, Neisseria meningitidis
  misc_feature 223, 224, 225: 'Xaa' is any amino acid
MAKIGDFAAKSMIEIRSKRMITLPSLNNLPSKWDEIRYWLETRVCECGVMPHPNLTECEAGQFDRDFWDNIGCAPEEYVRIRRAIRLLEARYPDSLNELVCAAIATPLGEMLAVFGNKGLCLLEFVGQKHLEQEIAAVQKALRGRFVFREDERTQLLRQELDLYFKGRLKTFATPLEQIGTEFQKQAWDALLAIPYGETRSYKEQAQRLGNPNAVRAVAAANXXXHT

SEQ ID NO: 34253 - protein, 121 aa, Neisseria meningitidis; identical to SEQ ID NO: 10590

SEQ ID NO: 34254 - protein, 206 aa, Neisseria meningitidis; identical to SEQ ID NO: 18065

SEQ ID NO: 34255 - protein, 229 aa, Neisseria meningitidis; identical to SEQ ID NO: 18366

SEQ ID NO: 34256 - protein, 43 aa, Neisseria meningitidis
VASSPSDIKGKYVQKVEVAKGVITATMLSSNVNNEIKDKKLSL

SEQ ID NO: 34257 - protein, 461 aa, Neisseria meningitidis; identical to SEQ ID NO: 19333

SEQ ID NO: 34258 - protein, 312 aa, Neisseria meningitidis
MLELNGLCKRFGGKTVADNICLTVGRGKILAVLGRSGCGKSTLLNMIAGIIRPDGGEIRLNGENITRMPPEKRRISLMFQDYALFPHMSALENAAFGLKMQKMPKAEAERLAMAALAEVGLENEVHRKPEKLSGGEKQRLALARALVVRPSLLLLDESFSSLDTHLRDRLRRMTAERIRNGGIPAVLVTHSPEEACTTADEIAVMHEGRILQYGTPETLVQTPAGVQVARLMGLPNTDDDRHIPQNAVRFDQDGMECRVLSRTCLPESFSLSVLHPEHGILWLNLDMRHAGAVSGKDTVRIHIEEREIVRFR

SEQ ID NO: 34259 - protein, 313 aa, Neisseria meningitidis; identical to SEQ ID NO: 19639

SEQ ID NO: 34260 - protein, 318 aa, Neisseria meningitidis; identical to SEQ ID NO: 19442

SEQ ID NO: 34261 - protein, 123 aa, Neisseria meningitidis; identical to SEQ ID NO: 4020

SEQ ID NO: 34262 - protein, 290 aa, Neisseria meningitidis
VKGLDYCRQKAEESRSSFLSGFRFLTQEKRDAVTVLYAFCRELDDVVDECSNPDVAQATLNWWRGDLDKVFGGAMPEHPVNQALRQVKETFKLPKYELEALIDGMQMDLLRVRYGSFEELKLYCRRVAGVVGCLIARILGFSDDQTLEYADKMGLALQLTNIIRDVGEDARRGRIYLPMEEMRRFDVPASVILQCSPTGNFAELMAFQIKRARETYREAVSLLPDADKKAQKVGLVMAAVYYALLNEIDRDGAQNVLKYKIALPSPRKKRIALKTWLFGFKPRPGTPERA

SEQ ID NO: 34263 - protein, 149 aa, Neisseria meningitidis
MMAMVGFIMIAAQGFAAVMNATGHIQPLVESSMAIFGNSKGMAALAMLVVGLLVTMGIGSSFSTLPIIAAIYVPLCVGLGFSPLATVAIVGTAGALGDAGSPASDSTLGPTMGLNADGQHDHIRDSVIPTFIHYNIPLLIAGWIAAMVL

SEQ ID NO: 34264 - protein, 418 aa, Neisseria meningitidis
MKVLVLGAGVAGVSSAWYLAEAGHEVTVIDRAEGVAMETSFANAGQLSYGYTTPWAAPGIPTKALKWLFKSHPPLLFRPDGSLYQIEWLWQMLQNCTAAHYQTNKERMVRISEYSREMFRRFEAQTGMNFEERKKGTLQIFRQTKEVEAAEQDIAVLERYGVPYRRLKPEECAEFEPALARVTAKIAGGLHLPADATGDCHLFTENLYKLCQEKGVQFHFNQTISRIDHNGLRIKAVETETGRFEADAVVCALGCFSRTVLAQLDLNLPIYPVKGYSLTLPVTNSDGAPVSTVLDESYKVAITRFDNRIRVGGMAELSGYEIKLPEKRRETLALVVNDLFPEGGDLSQASFWSGLRPMTPDSTPLIGRTRFDNLFLNTGHGTLGWTMSLGSAKLTADIVSGKDTEIRSDDLSLSRYQA

SEQ ID NO: 34265 - protein, 242 aa, Neisseria meningitidis; identical to SEQ ID NO: 19330

SEQ ID NO: 34266 - protein, 451 aa, Neisseria meningitidis; identical to SEQ ID NO: 5920

SEQ ID NO: 34267 - protein, 247 aa, Neisseria meningitidis
MSEHRVNHEPVFLLASSPWRESSLRVEAFSRRYGRVALLARSARKRQSELRGVLVSFVPVSASWYGSQELKTLHRAEWVGGWRQPQGRALFSGLYVNELVLKLTAREDPMPELYDALAKVMEAVCREANHIADLRRFEWKLLNALGVAPDLHADGTGGDILADKTYRLMPEEAVMPVCEDADALSHEAGAIVEGQSLIDLREGSFRTAESLQQALKITRLLIGTLLPEGLKSRQVLEQIRQFDRNTA

SEQ ID NO: 34268 - protein, 205 aa, Neisseria meningitidis; identical to SEQ ID NO: 24431

SEQ ID NO: 34269 - protein, 52 aa, Neisseria meningitidis
MKTPLPICTLSALAACALSGQGGSRVYGEIKARDLCVTAPILLSAFCLACSR

SEQ ID NO: 34270 - protein, 113 aa, Neisseria meningitidis; identical to SEQ ID NO: 6827

SEQ ID NO: 34271 - protein, 294 aa, Neisseria meningitidis; identical to SEQ ID NO: 19808

SEQ ID NO: 34272 - protein, 160 aa, Neisseria meningitidis; identical to SEQ ID NO: 2526

SEQ ID NO: 34273 - protein, 151 aa, Neisseria meningitidis
  misc_feature 2, 3, 4: 'Xaa' is any amino acid
VXXXPLTDAAFEAEYLAVDQVEKLGNEEQALLFSIFNRFRNSGKGFLLLGSEYTPQQLVIREDLRTRMAYCLVYEVKPLTDQEKIDALASMAAARQVTVDSEIFEYLLKHWRRDMDSLMMMLDTLDNYAVTMGKRITLPLLRQLLKQQETQ

SEQ ID NO: 34274 - protein, 650 aa, Neisseria meningitidis; identical to SEQ ID NO: 24317

SEQ ID NO: 34275 - protein, 123 aa, Neisseria meningitidis; identical to SEQ ID NO: 1296

SEQ ID NO: 34276 - protein, 261 aa, Neisseria meningitidis
  misc_feature 2, 3: 'Xaa' is any amino acid
VXXKTITETLNLAPKGKNFLTADWPAPANVKTLITTRNGGVSQGAYQSLNLGTHVDDNPEAVRRNREIVQQQVGLPVAYLNQIHSTVVVNAAEALGGTPDADASVDDTGKVACAVMTADCLPVLFCDRAGTTVAAAHAGWRGLAGGVLQNTIAAMKVPPVEMMAYLGPAISADAFEVGQDVFDAFCTPMPEAAAAFEGIGGGKFLADLYALARLILKREGVGGVYGGTHCTVLERDTFFSYRRDGATGRMASLIWLDGNAV

SEQ ID NO: 34277 - protein, 416 aa, Neisseria meningitidis; identical to SEQ ID NO: 19980

SEQ ID NO: 34278 - protein, 163 aa, Neisseria meningitidis; identical to SEQ ID NO: 6300

SEQ ID NO: 34279 - protein, 200 aa, Neisseria meningitidis; identical to SEQ ID NO: 18122

SEQ ID NO: 34280 - protein, 242 aa, Neisseria meningitidis; identical to SEQ ID NO: 2996

SEQ ID NO: 34281 - protein, 879 aa, Neisseria meningitidis
LKNNRQIKLIAASVAVAASFQAHAGLGGLNIQSNLDEPFSGSITVTGEEAKALLGGGSVTVSEKGLTAKVHKLGDKAVIAVSSAQAVRDPVLVFRIGAGAQVREYTAILDPVGYSPKTKSALSDGKTHRKTAPTAESQENQNAKALRKTDKKDSANAAVKPAYNGKTHTVRKGETVKQIAAAIRPKHLTLEQVADALLKANPNVSAHGRLRAGSVLHIPNLNRIKAEQPKPQTAKPKAETVSMPSEPSKQATVEKPIEKPVEKPVEKPVEKPVEKPVEKPEAKVAAPEAKVEKPAVRPEPKPAASETPASATERQPEPVPAANTAASETAAESAPQEAAASAIDTPTDETGNAVSEPVEQVSAEEETESGLFDGLFGGSYTLLLAGGGAALIALLLLLRLAQSKRARRTEESVPEEEPDLDDAADDGIEITFAEVETPATPEPAPKNDVNDTLALDGESEEELSAKQTFDVETDTPSNRIDLDFDSLAAAQNGILSGALTQDEETQKRADADWNAIESTDSVYEPETFNPYNPVEIVIDTPEPESVAQTAENKPETVDTDFSDNLPSNNHIGTEETASAKPASPSGLAGFLKASSPETILEKTVAEVQTPEELHDFLKVYETDAVAETAPETPDFNAAADDLSALLQPAEAPSVEENITETVAETPDFNATADDLSALLQPSKVPAVEENAAETVADDLSALLQPAEAPAVEENVTETVAETPDFNATADDLSALLQPSEVPAVEENAAETVADDLSALLQPAEAPAVEENAAEITLETPDSNTSEADALPDFLKDGEEETVDWSIYLSEENIPNNADTSFPSESVGSDAPSEAKYDLAEMYLEIGDRDAAAETVQKLLEEAEGDVLKRAQALAQELGI

SEQ ID NO: 34282 - protein, 125 aa, Neisseria meningitidis
LARISLALQVVASQYTQVPTLIFDEVDTGIGGGVAEMVGKALRALGRKHQVLAVTHLPQVASCGENHWRVRKHSEGEQTVSEISILDEIQRIEEVARMLGGEVITDTTRQHAAELLQLASKNSLF

SEQ ID NO: 34283 - protein, 197 aa, Neisseria meningitidis
MASIQDLYETVSRVLGNQAGKVISALGEITVECLPEHYVSVMTTLRDHEELHFELLVDLCGVDYSTYKNEAWRGKRFAVVSQLLSVKNNQRIRVRVWVSDDDFPVVESVVNIYNSADWYEREAFDMYGIMFNNHPDLRRILTDYGFVGHPFRKDFPISGYVEMRYDEEQKRVIYQPVTIEPREITPRIVREENYGGQ

SEQ ID NO: 34284 - protein, 171 aa, Neisseria meningitidis; identical to SEQ ID NO: 19365

SEQ ID NO: 34285 - protein, 240 aa, Neisseria meningitidis
MKPAYFISDLHLSEKQPELTALLLRFLRSSAAGQARAVYILGDLFDFWVGDDEVSELNTSVAREIRKLSDKGVAVFFVRGNRDFLIGQDFCRQAGMTLLPDYSVLDLFGCKTLICHGDTLCTDDRAYQRFRKIVHRKRLQKLFLMLPLKWRTRLAAKIRRVSKMEKQVKPADIMDVNAAFTARQVRAFNAERLIHGHTHREHIHHENGFTRIVLGDWHNDYASILRVDGDGAVFVPLEKC

SEQ ID NO: 34286 - protein, 58 aa, Neisseria meningitidis; identical to SEQ ID NO: 6347

SEQ ID NO: 34287 - protein, 84 aa, Neisseria meningitidis; identical to SEQ ID NO: 19256

SEQ ID NO: 34288 - protein, 178 aa, Neisseria meningitidis
  misc_feature 2, 3, 4: 'Xaa' is any amino acid
VXXXFVSDLLSVILFFATYTVTKNMIAATAVALVAGVVQAAFLYWKYKKLDTMQWVGLVLIVIFGGATIVLGDSRFIMWKPSVLFWLGALFLWGSHLAGKNGLKASIGREIQLPDAVWAKLTYMWVGFLIFMGIANWFVFTRFESQWVNYKMFGSTALMLVFFIIQGIYLSICLKKED

SEQ ID NO: 34289 - protein, 74 aa, Neisseria meningitidis; identical to SEQ ID NO: 444

SEQ ID NO: 34290 - protein, 45 aa, Neisseria meningitidis; identical to SEQ ID NO: 19478

SEQ ID NO: 34291 - protein, 246 aa, Neisseria meningitidis; identical to SEQ ID NO: 24130

SEQ ID NO: 34292 - protein, 208 aa, Neisseria meningitidis; identical to SEQ ID NO: 339

SEQ ID NO: 34293 - protein, 472 aa, Neisseria meningitidis
MENILSVLVGTVNRFLWDYLLIYALLGIGLFFTLYLGAPQITKLGAGFKSVFGGLFAKGDKDDKSLSQFQALAVAISAQIGTGNVAGVATAITAGGPGAIFWMWVSAVLGMSTIFAEALLAQKYRVVSHGKYIGGPAFYITHGLTPKIGRGAARFLSGFFSIALIIALGFIGNATQANSIASAVTIAFDVPSLAVGIVLAVLAGMVVIGGVNRIANIAQFVVPFMAVVYILCAVVILFEFSDHIVPMFNHIFTAAFNPEAVLGGAAGIGMREAIRFGVARGLFSNEAGMGSTPHAHATADVKHPVQQGMAAFVGVFIDTILVCTATALIILLTDANLSGEQGAAVTQFAFNKAFPGFGSQLLAVCLTFFAFTTIIGWYYFGESNIRFLFRGRHLGIYRALVLLAIVLGTLGKVDLVWSLSDMFNGFMVIPNLIALFLLRKEIRAIYDDYLAQKKAGRDLSYPYEFHEFHDKG

SEQ ID NO: 34294 - protein, 207 aa, Neisseria meningitidis; identical to SEQ ID NO: 24453

SEQ ID NO: 34295 - protein, 312 aa, Neisseria meningitidis
MDAYPEAEAPPQSIVELVPVLIAVTDGGLRVLTVAQGTLLPNGPLSPLRNSLQAGVKLWVAKQTSQPMGYVEQLYTFVDTHRRNEHGMPVLYVSYLGLVREAADSILHPDAKWQDCYGYFPWEDLRTDGGQRDAVVGRLRIWANSADTEEVRQMRLKRIHLCWGVEPENWSEEYVLQRYEMLYESGLIVEAAEPQANFDFALTGQPMRHDHRRVLATALSRLRAKIKYRPVIFELMPPEFTLLQLQNSVEAISGRLLHKQNFRRQIQQQNLIEPSDTGVSGSKGRPAQLCRFRDDVLPDRLISDIGLPLGSR

SEQ ID NO: 34296 - protein, 212 aa, Neisseria meningitidis; identical to SEQ ID NO: 3536

SEQ ID NO: 34297 - protein, 136 aa, Neisseria meningitidis
  misc_feature 132, 133, 134: 'Xaa' is any amino acid
MSSNAWLFWALASAGFASLTAIFAKMGLQGIDSDFATFIRTLVILAALLLFLTYTGKWQGVNGFTGHNWTFLILSGLATGASWLAYFKALQLGNASQVAPVDKFSLVLVALMAVVFLDERPNTQEWIGLGLXXXHT

SEQ ID NO: 34298 - protein, 720 aa, Neisseria meningitidis
MQQKIRFQIEGMTCQACASRIEKVLNKKDFVESAGVNFASEEAQVVFDDSKTSVADIAKIIEKTGYGAKEKTEDTLPQPEAEHHIGWRLWLLFTINVPFLIGMAGMMIGRHDWMIPPLWQFALASVVQLWLAIPFYKSAWASIKGGLANMDVLVTIGTVSIYLYSVYMLFFSPHAAHGMAHVYFEAGVMVIGFVSLGKFLEHRTKKSSLNSLGLLLKLTPTQVNVQRNGEWKQLPIDQVQIGDLIRANHGERIAADGIIESGSGWADESHLTGESNPEEKKAGGKVLAGALMTEGSVVYRATQLGSQTQLGDMMNALSEAQGSKAPIARVADKAAAVFVPAVVGIALLTFIVTWLIKGDWTVALMHAVAVLVIACPCALGLATPAAIMVGMDKAVKHGIWFKDAAAMEEAAHVDAVVLDKTGTLTEGRPQVAAVYCVPDSGFDEDDLYRIAAAVEQNATHPLARAIVSAAQTRSLEIPAAQNAQTVVGAGIAAEVEDVGLVKAGKAEFAELTLPEFSDGVWDIASIVAVSVDNKPIGAFALADALKADTAEAIGRLKKHNIDVYIMSGDNQGTVEYVAKQLGIAHAFGNMSPRDKAAEVQKLKAAGKTVAMVGDGINDAPALAAANVSFAMKGGADVAEHTASATLMQHSVNQLADALLVSQATLKNIKQNLFFAFFYNILGIPLAALGFLNPVIAGAAMAASSVSVLSNALRLKRVKID

SEQ ID NO: 34299 - protein, 112 aa, Neisseria meningitidis; identical to SEQ ID NO: 8651

SEQ ID NO: 34300 - protein, 260 aa, Neisseria meningitidis
LQKVVRHIAQTEIMPRFLNTPSCRKEDGSMLSEADIAAQTAFAAALPLLIDCPMLGEEMSRQEQSALWEQYSGEKGLWIVDPIDGTNNFVNGLPHFAVSVAFVRNGRAELGVIYNPVSGECFYAERGQGAFLNGTRLPLRLVDKKLNEAIAGVEIKYLRSGKLSSRMSTLAPFGTIRSMGSSTLDWCYLACGRYDVYVHGGQKLWDYAAGALIFEEAGGRLTTLEGDGFWSGEHVFKRSVVAALEPKLFERWVEWIRENQ

SEQ ID NO: 34301 - protein, 417 aa, Neisseria meningitidis; identical to SEQ ID NO: 18875

SEQ ID NO: 34302 - protein, 692 aa, Neisseria meningitidis
MKSLKTFSFEHSVLVGLASFTTLALSRGEQVSAVWMVTAAISVYCIAYRFYSLYIANRVMRLDPNRLTPAERHNDGLDYVPTHKGVLFGHHFAAIAGAGPLVGPVLAAQMGYLPGTLWIIFGVVFAGAVQDMMVLFVSMRRDGKSLGDIVKQELGTVPGVIASIGILMIMVIIMAVLALIVVKALVHSPWGTFTIAATMPIALFMGIYTRYIRPGKIGEISIVGFILLMLAVIYGEDVAKSSIGHWFDLDGIQLTWAIMIYGFVASVLPVWLLLTPRDYLSTFLKIGTIAALALGIVIVNPTLQMPAVTHFIDGSGPVFSGALFPFLFITIACGAVSGFHALISSGTTPKMLENETHVRMIGYGGMLMESFVAIMALAAAASLDPGVYFAMNSPAALIGTDANTAAEVITTKLQFPVDAATLLHTAKEVGENTILSRAGGAPTLAVGMAHIMSRLIPGEAMMAFWYHFALLFEALFILTAVDAGTRVARFMIQDLGSIFYKPFGNTDSIPANLIATFFAVALWGYFLYTGVTDPLGGINSLWPLFGIANQMLAGVALIMCAVVLIKMKRDRYVWVVLVPAVGVLFVTCYAGLQKLFHSDPRISFLAHAGKYSDALAKNEVLAPAKDIGEMAQIIFNDKINAGLTILFLSVVVIVAAYGLRTALKARKVGWPTAKEIPAVYRDGKQPEAQSEA

SEQ ID NO: 34303 - protein, 317 aa, Neisseria meningitidis; identical to SEQ ID NO: 18507

SEQ ID NO: 34304 - protein, 269 aa, Neisseria meningitidis; identical to SEQ ID NO: 18208

SEQ ID NO: 34305 - protein, 375 aa, Neisseria meningitidis; identical to SEQ ID NO: 1713

SEQ ID NO: 34306 - protein, 222 aa, Neisseria meningitidis; identical to SEQ ID NO: 24152

SEQ ID NO: 34307 - protein, 332 aa, Neisseria meningitidis; identical to SEQ ID NO: 18743

SEQ ID NO: 34308 - protein, 233 aa, Neisseria meningitidis; identical to SEQ ID NO: 18301

SEQ ID NO: 34309 - protein, 397 aa, Neisseria meningitidis
MQNYLTPNFAFAPMIPERASGSRVWDTKGREYIDFSGGIAVNALGHCHPALVDALNAQMHKLWHISNIYTTRPAQELAQKLVANSFADKVFFCNSGAEANEAALKLARKYARDRFGGGKSEIVACINSFHGRTLFTVSVGGQPKYSKDYAPLPQGITHVPFNDIAALEAAVGEQTCAVIIEPIQGESGILPATAEYLQTARRLCDRHNALLILDEVQTGMGHTGRLFAYEHYGIVPDILSSAKALGCGFPIGAMLATEKIAAAFQPGTHGSTFGGNPMACAVGSRAFDIINTPETLNHVREQGQKLQTALLDLGRKTGLFSQVRGMGLLLGCVLDAPYRGHASEITAAALKHGVMILVAGADVLRFAPSLLLNDEDTAEGLRRLEHVLTEFAAANRP

SEQ ID NO: 34310 - protein, 469 aa, Neisseria meningitidis; identical to SEQ ID NO: 18465

SEQ ID NO: 34311 - protein, 125 aa, Neisseria meningitidis; identical to SEQ ID NO: 348

SEQ ID NO: 34312 - protein, 207 aa, Neisseria meningitidis; identical to SEQ ID NO: 3013

SEQ ID NO: 34313 - protein, 231 aa, Neisseria meningitidis; identical to SEQ ID NO: 1993

SEQ ID NO: 34314 - protein, 352 aa, Neisseria meningitidis; identical to SEQ ID NO: 25433

SEQ ID NO: 34315 - protein, 355 aa, Neisseria meningitidis; identical to SEQ ID NO: 19325

SEQ ID NO: 34316 - protein, 392 aa, Neisseria meningitidis
MAFLKLTEQNVQGKTVLIRADMNVPFKDGKISDDTRIRASLASIKYCLDNGASVIVMTHLGRPTEGEFHSEDDVAPVAAHLGSLLGKDVKVLNDWRENKPALNAGDVVMLQNVRINKGEKKNDLELGKAYASLCDVFVNDAFGTAHRAQASTEAVAQAAPVACAGVLMAGELDALGKALKQPARPMVAIVAGSKVSTKLTILESLADKVDQLIVGGGIANTFLLAEGKAIGKSLAEHDLVEESKKIMAKMAAKGGSVPLPTDVVVAKAFAADAEAVVKDIADVAEDEMILDIGPKSAAALADLLKAADTVVWNGPVGVFEFDQFAGGTKALAEAIAQSKAFSIAGGGDTLAAIAKFGVTDQIGYISTGGGAFLEFLEGKELPAVAALEKRGE

SEQ ID NO: 34317 - protein, 87 aa, Neisseria meningitidis; identical to SEQ ID NO: 19135

SEQ ID NO: 34318 - protein, 233 aa, Neisseria meningitidis
  misc_feature 3, 4: 'Xaa' is any amino acid
VCXXDLQVLGQRHKDIKNGLSAPPKPTIANLINLATKPEWCMKMLNTERRTFRNIVGHAKNVGDLSSLSSWTSEQFDPRLSWDDVARIKDLWGGKLIIKGIMEPEDAEKAAKSGADALIVSNHGGRQLDDTVSAIKALPDIVSAVGSDIEVWMDSGIRSGQDILKAWALGAKGTMIGRAFLYGLGAYGEEGVTRALEILYKEMDISMAFTGHRDIQDVDASILRGKDWGRETV

SEQ ID NO: 34319 - protein, 611 aa, Neisseria meningitidis; identical to SEQ ID NO: 8062

SEQ ID NO: 34320 - protein, 131 aa, Neisseria meningitidis; identical to SEQ ID NO: 12068

SEQ ID NO: 34321 - protein, 907 aa, Neisseria meningitidis
MGVMLYHHSYAEDAGRAGSEAQIQVLEDVHVKAKRVPKDKKVFTDARAVSTRQDIFKSSENLDNIVRSIPGAFTQQDKSSGIVSLNIRGDSGFGRVNTMVDGITQTFYSTSTDAGRAGGSSQFGASVDSNFIAGLDVVKGSFSGSAGINSLAGSANLRTLGVDDVVQGNNTYGLLLKGLTGTNSTKGNAMAAIGARKWLESGASVGVLYGHSRRSVAQNYRVGGGGQHIGNFGAEYLERRKQRYFVQDGQLKFNSDSGKWERDLQRQQWKYPWYKKYENPQELQKYIEEHDKSWRENLAPQYDITPIDPSSLKQQSAGNLFKLEYDGVFNKYTAQFRDLNTKIGSRKIINRNYQFNYGLSLNSYANLNLTAAYNSGRQKYPKGSKFTGWGLLKDFETYNNAKILDLNNTATFRLPRETELQTTLGFNYFHNEYGKNRFPEELGLFFDGPDQDNGLYSYLGRFKGDKGLLPQKSTIVQPAGSQYFNTFYFDAALKKDIYRLNYSTNTVGYRFGGEYTGYYGSDDEFKRAFGENSPTYREHCNQSCGIYEPVLKKYGKKRANNHSVSISADFGDYFMPFASYSRTHRMPNIQEMYFSQIGDSGVHTALKPERANTWQFGFNTYKKGLLKQDDTLGLKLVGYRSRIDNYIHNVYGKWWDLNGNIPSWVSSTGLAYTIQHRNFKDKVHKHGFELELNYDYGRFFTNLSYAYQKSTQPTNFSDASESPNNASKEDQLKQGYGLSRVSALPRDYGRLEVGTRWLGNKLTLGGAMRYFGKSIRATAEERYIDGTNGGNTSNVRQLGKRSIKQTETLARQPLIFDFYAAYEPKKNLIFRAEVKNLFDRRYIDPLDAGNDAATQRYYSSFDPKDKDEDVTCNADGLCNGKYGGTSKSVLTNFARGRTFLITMSYKF

SEQ ID NO: 34322 - protein, 887 aa, Neisseria meningitidis
VLKTPPTLAAELSGKTGVSISAPYANENSRISLSAANIEAENGKIKIQSYGDQYYYARQSELYTFERRSYKTGKWYNRKHITEVKEHKNAKPDAVNLSASQGIDIKSGGSIDAYATAFDAPKGSINIEAGRKLTLYAVEELNYDKLDSQKRRRFLGISYSKAHDTTTQVMKTALPSRVVAESANLQSGWDTKLQGTQFETTLGGATIRAGVGEQARADAKIILEGIKTTIHNETVSSSKSALWQKQAGRGSNIETLQLPSFTGPVAPVLSAPGGYIVDIPKGNLKTEIEKLAKQPEYAYLKQLQTAKNVDWKQVQLAYDKWDYKQEGLTGAGAAIVVIIVTALTYGYGAAAAGSVTAAGSSTAAAATTTAAATTTVSTAAAMQTAALASLYSQAAVAIINNKGDVGKALKDLGTSDTVKQIVTSALTAGALNQMGADIAQLNSKVRTELFSSTGNQTIANLGGRLATNLSNAGISAGINTAVNGGSLKDNLGNAALGALVNSFQGEAASKIKTTFSDDYVAKQFAHALAGCVSGLVQGKCKDGAIGAAVGEIVAESILGGRNPATLSDAEKHKVISYSKIIAGSVAALNGGDVNTAANAAEVAVVNNALNFDSTPTNAKKHQPQKPDKTALEKIIQSIMPAHAAGAMTNPQDKDAAIWISNIRNGITGPIVITSYGVYAAGWTAPLIGTAGKLAISTCMANPSGCTVMVTQAAEAGAGIATGAVTVGNAWEAPVGALSKAKAAKQAIPTQTVKELDGLLQESKNIGAVNTRINIANSTTRYTPMRQTGQPVSAGFEHVLEGHFHRPIANNRSVFTISPNELKVILQSNKVVSSPVSMTPDGQYMRTVDVGKVIGTTSIKEGGQPTTTIKVFTDKSGNLITTYPVKGN

SEQ ID NO: 34323 - protein, 701 aa, Neisseria meningitidis; identical to SEQ ID NO: 6719

SEQ ID NO: 34324 - protein, 256 aa, Neisseria meningitidis; identical to SEQ ID NO: 27638

SEQ ID NO: 34325 - protein, 402 aa, Neisseria meningitidis; identical to SEQ ID NO: 18265

SEQ ID NO: 34326 - protein, 336 aa, Neisseria meningitidis; identical to SEQ ID NO: 19047

SEQ ID NO: 34327 - protein, 160 aa, Neisseria meningitidis; identical to SEQ ID NO: 236

SEQ ID NO: 34328 - protein, 464 aa, Neisseria meningitidis; identical to SEQ ID NO: 19187

SEQ ID NO: 34329 - protein, 280 aa, Neisseria meningitidis; identical to SEQ ID NO: 3261

SEQ ID NO: 34330 - protein, 797 aa, Neisseria meningitidis; identical to SEQ ID NO: 15316

SEQ ID NO: 34331 - protein, 217 aa, Neisseria meningitidis; identical to SEQ ID NO: 18682

SEQ ID NO: 34332 - protein, 127 aa, Neisseria meningitidis; identical to SEQ ID NO: 1080

SEQ ID NO: 34333 - protein, 305 aa, Neisseria meningitidis; identical to SEQ ID NO: 24197

SEQ ID NO: 34334 - protein, 225 aa, Neisseria meningitidis; identical to SEQ ID NO: 1002

SEQ ID NO: 34335 - protein, 1102 aa, Neisseria meningitidis
MNEGEVVLTPEQIQTLRGYAFRGDTYGGWRYLANLGDRYADDAAAIVGKDANLNGLNLWMKKGVENLWDDTVGKKTRLEKFDRVALQHFSQYVDLINENNGRLPNTSEIERSYYKAVTENGVSSSAAIDLVINRSLPDMADGYWALGLGIEAERIHNAQAVNNPNGSEWDNRKQLISALDKGFDGSFKEKHFTFLQSVIMDVTKLGVEYTIDGWQKIGGWGNGIINDLYKSVAKREWTGIFEIVNNNIKQFRDLFPNPEGWIDDGHQCFAPWVKETKKRNGKYHVYDPLALDLDGDGIETVATKGFAGSLFDHTNNGIRTATGWVSADDGLLVRDLNGNGIIDNGAELFGDNTKLADGSFAKHGYAALAELDSNGDNIINAADAAFQTLRVWQDLNQDGISQANELRTLEELGIQSLDLAYKDVNKNLGNGNTLAQQGSYTKTDGTTAKMGDLLLAADNLHSRFKDKVELTAEQAKAANLAGIGRLRDLREAAALSGDLANMLKAYSAAETKEAQLALLDNLIHKWAETDSNWGKKSPMRLSTDWTQTANEGIALTPSQVAQLKKNALVSLSDKAKATIDAARDRIAVLDAYTGQDSNTLYYMSEEDALNIVKVTNDTYDHLAKNIYQNLLFQTRLQPYLNQISFKMENDTFTLDFSGLVQAFNHVKETNPQKAFVDLAEMLAYGELRSWYEGRRLMADYVEEAKKAGKFEDYQKVLGQETVALLAKTSGTQADDILQNVGFGHNKNVSLYGNDGNDTLIGGAGNDYLEGGSGSDTYVFGKGFGQDTVYNYDYATGRKDIIRFTDGITADMLTFTREGNHLLIKAKDGSGQVTVQSYFQNDGSGAYRIDEIHFDNGKVLDVATVKKLVQQSTDGSDRLYAYQSGSTLNGGLGDDYLYGADGNDLLNGDAGNDSIYSGNGNDTLNGGEGNDALYGYNGNDALNGGEGNDHLNGEDGNDTLIGGAGNDYLEGGSGSDTYVFGEGFGQDTVYNYHVDKNSDTMHFKGFKAADVHFIRSGSDLVLSASEQDNVRISGFFYGENHRVDTFVFDDAAISNPDFAKYINAGNNLVQSMSVFGSNTAATGGNVDANTQSVQQPLLVTPSA

SEQ ID NO: 34336 - protein, 239 aa, Neisseria meningitidis; identical to SEQ ID NO: 1086

SEQ ID NO: 34337 - protein, 154 aa, Neisseria meningitidis; identical to SEQ ID NO: 6562

SEQ ID NO: 34338 - protein, 279 aa, Neisseria meningitidis; identical to SEQ ID NO: 19598

SEQ ID NO: 34339 - protein, 112 aa, Neisseria meningitidis; identical to SEQ ID NO: 191

SEQ ID NO: 34340 - protein, 241 aa, Neisseria meningitidis
  misc_feature 235, 236: 'Xaa' is any amino acid
MNEGEVVLTPEQIQTLRGYAFRGDTYGGWRYLANLGDRYADDAAAIVGKDANLNGLNLWMKKGVENLWDDTVGKKTRLEKFDRVALQHFSQYVDLINENNGRLPNTSEIERSYYKAVTENGVSSSAAIDLVINRSLPDMADGYWALGLGIEAERIHNAQAVNNPNGSEWDNRKQLISALDKGFDGSFKEKHFTFLQSVIMDVTKLGVEYTIDGWQKIGGWGNGIINDLYKSVAKXXTHLIN

SEQ ID NO: 34341 - protein, 160 aa, Neisseria meningitidis; identical to SEQ ID NO: 515

SEQ ID NO: 34342 - protein, 768 aa, Neisseria meningitidis; identical to SEQ ID NO: 19576

SEQ ID NO: 34343 - protein, 212 aa, Neisseria meningitidis
  misc_feature 3, 4: 'Xaa' is any amino acid
VCXXKAGDDFVITENGRKFWVNLDKYLDTGLFLDHRNTRKKVGETAAGKRFLNLFSYTGSFTVYAATGGAASSETVDLSNTYLDWAKRNFELNGIDTERHKIVRADVFQYLQTAYGEGRRFDLIVMDPPSFSNSKKMLDILDIQRDHKKLIDGAVKLLASDGILYFSNNLRSFVLDDLVSEQYAVKDISKQSVPEDFRNKKIHRCWEIRHKS

SEQ ID NO: 34344 - protein, 133 aa, Neisseria meningitidis
MKDKHDSSAMRLDKWLWAARFFKTRSLAQKHIELGRVQVNGSKVKNSKTIDIGDIIDLTLNSLPYKIKVKGLNHQRRPASEARLLYEEDTKTATLREERKQLDQFSRITSAYPDGRPTKRDRRQLDRLKKGDW

SEQ ID NO: 34345 - protein, 95 aa, Neisseria meningitidis
LDLAYKDVNKNLGNGNTLAQQGSYTKTDGTTAKMGDLLLAADNLHSRFKDKVELTAEQAKAANLAGIGRLRDLREAAALSGRFGQYAESLFCRRN

SEQ ID NO: 34346 - protein, 157 aa, Neisseria meningitidis; identical to SEQ ID NO: 140

SEQ ID NO: 34347 - protein, 258 aa, Neisseria meningitidis; identical to SEQ ID NO: 2897

SEQ ID NO: 34348 - protein, 89 aa, Neisseria meningitidis; identical to SEQ ID NO: 1905

SEQ ID NO: 34349 - protein, 99 aa, Neisseria meningitidis; identical to SEQ ID NO: 17519

SEQ ID NO: 34350 - protein, 472 aa, Neisseria meningitidis
MSIKNVVKLIEESEARFVDLRFTDTKGKQHHFTVPARIVLEDPEEWFENGQAFDGSSIGGWKGIQASDMQLRPDASTAFVDPFYDDVTVVITCDVIDPADGQGYDRDPRSIARRAEAYLKSSGIGDTAYFGPEPEFFVFDGVEFETDMHKTRYEITSESGAWASGLHMDGQNTGHRPAVKGGYAPVAPIDCGQDLRSAMVNILEELGIEVEVHHSEVGTGSQMEIGTRFATLVKRADQTQDMKYVIQNVAHNFGKTATFMPKPIMGDNGSGMHVHQSIWKDGQNLFAGDGYAGLSDTALYYIGGIIKHAKALNAITNPSTNSYKRLVPHFEAPTKLAYSAKNRSASIRIPSVNSSKARRIEARFPDPTANPYLAFAALLMAGLDGIQNKIHPGDPADKNLYDLPPEEDALVPTVCASLEEALAALKADHEFLLRGGVFSKDWIDSYIAFKEEDVRRIRMAPHPLEFEMYYSL

SEQ ID NO: 34351 - protein, 301 aa, Neisseria meningitidis; identical to SEQ ID NO: 7688

SEQ ID NO: 34352 - protein, 300 aa, Neisseria meningitidis
MSIIHYLSLHVESARTALKQLLRQPFGTLLTLIMLAVAMTLPLFMYLGIQSGQSVLGKLNESPQITIYMETAAAQSDSDTVRSLLARDKRLDNIRFIGKEDGLEELQSNLDQNLISMLDGNPLPDVFIVTPDPATTPAQMQAIYRDITKLPMVESASMDTEWVQTLYQINEFIRKILWFLSLTLGMAFVLVAHNTIRLQILSRKEEIEITKLLGAPASFIRRPFLYQAMWQSILSAAVSLGLCGWLLSAVRPLVDAIFKPYGLNIGWRFFYPGEIALVFGFVVALGILGAWLATTNTCSV

SEQ ID NO: 34353 - protein, 262 aa, Neisseria meningitidis; identical to SEQ ID NO: 30192

SEQ ID NO: 34354 - protein, 109 aa, Neisseria meningitidis; identical to SEQ ID NO: 4604

SEQ ID NO: 34355 - protein, 174 aa, Neisseria meningitidis
  misc_feature 168, 169: 'Xaa' is any amino acid
MAGHSKWANIQHKKARQDAKRGKIFTRLIKEITVAARMGGGDPGANPRLRLALEKAAENNMPKDNVQRAIDKGTGNLEGVEYIELRYEGYGIGGAALMVDCLTDNKTRTVADVRHAFTKNGGNLGTDGCVAFNFVHQGYLVFEPGVDEDALMEAALEAGAEDVVTNDXXTHLIN

SEQ ID NO: 34356 - protein, 586 aa, Neisseria meningitidis
MRTNYCGLISEQYLDQTVTVKGWVHRRRDHGGVIFIDLRDREGIVQVVIDPDTPEAFAAADSARNEYVLSITGRVRNRPEGTTNDKMISGKIEILAKEIEVLNAAATPPFQIDDENISENVRLTNRVIDLRRPVMQRNLRLRYQVAMGVRRYLDAQGFIDIETPMLTRSTPEGARDYLVPSRVHPGEFFALPQSPQLFKQLLMVAGFDRYYQITKCFRDEDLRADRQPEFTQIDLETSFLNEDEIMDITEGMAKQVFKDALNVDLGDFPRMPYAEAMFYYGSDKPDMRINLKFTELTDLMKTEEFKVFRGAADMKGGRVVALRVPNGAKFSRKEIDEYTKFVGIYGAKGLAYIKVNDVGNLSNGEDSGLQSPIVKFLSENALKEIIERTGAQNGDIIFFGADKTKVVNEAIGALRIKVGLEHGKDNGYFTDEWKPLWVVDFPMFEYDEEADRYVAVHHPFTAPKEGHEDLMVSDPANCLARAYDMVLNGWEIGGGSIRIHRADVQEKVFAALKISPEEQQEKFGFLLDNLKFGAPPHGGLAFGLDRLVTLMTGAESYPRRDCLPENTTCPMPADQRAQQRGRQAVA

SEQ ID NO: 34357 - protein, 157 aa, Neisseria meningitidis; identical to SEQ ID NO: 3094

SEQ ID NO: 34358 - protein, 373 aa, Neisseria meningitidis; identical to SEQ ID NO: 18063

SEQ ID NO: 34359 - protein, 386 aa, Neisseria meningitidis
MRKKLTALVLSALPLAAVADVSLYGEIKAGVEGRNIQLQLTEQPSKAQGQTNNQVKVTKAKSRIRTKISDFGSFIGFKGSEDLGEGLKAVWQLEQDVSVAGGGATQWGNRESFIGLAGEFGTLRAGRVANQFDDASQAIDPWDSNNDVASQLGIFKRHDDMPVSVRYDSPDFSGFSGSVQFVPAQNSKSAYTPAYVDEKQVSHAAVVGKPGSDVYYAGLNYKNGGFAGSYAFKYAKHANEGRDAFFLFLLGSGSDEAKGTDPLKNHQVHRLTGGYEEGGLNLALAAQLDLSENADKTKNSTTEIAATASYRFGNAVPRISYAHGFDFIERGKKGENTSYDQIIAGVDYDFSKRTSAIVSGAWLKRNTGIGNYTQINAASVGLRHKF

SEQ ID NO: 34360 - protein, 145 aa, Neisseria meningitidis; identical to SEQ ID NO: 7320

SEQ ID NO: 34361 - protein, 128 aa, Neisseria meningitidis; identical to SEQ ID NO: 7193

SEQ ID NO: 34362 - protein, 119 aa, Neisseria meningitidis
  misc_feature 113, 114: 'Xaa' is any amino acid
MKPVNIGLLGLGTVGGGTAAVLRDNAEEISRRLGREIRISAVCDLSEEKARQTCPSAAFVKDPFELVAREDVDVVVELFGGTGIAKDAVLKAIENGKHIVTANKKLLAEYGNXXTHLIN

SEQ ID NO: 34363 - protein, 96 aa, Neisseria meningitidis; identical to SEQ ID NO: 3537

SEQ ID NO: 34364 - protein, 798 aa, Neisseria meningitidis; identical to SEQ ID NO: 6178

SEQ ID NO: 34365 - protein, 408 aa, Neisseria meningitidis; identical to SEQ ID NO: 3316

SEQ ID NO: 34366 - protein, 362 aa, Neisseria meningitidis; identical to SEQ ID NO: 18731

SEQ ID NO: 34367 - protein, 281 aa, Neisseria meningitidis; identical to SEQ ID NO: 49

SEQ ID NO: 34368 - protein, 357 aa, Neisseria meningitidis; identical to SEQ ID NO: 29378

SEQ ID NO: 34369 - protein, 187 aa, Neisseria meningitidis; identical to SEQ ID NO: 2230

SEQ ID NO: 34370 - protein, 363 aa, Neisseria meningitidis
MSLKCGIVGLPNVGKSTLFNALTQSGIEAANYPFCTIEPNVGIVEVPDPRMAELAKIVNPQKMQPAIVEFVDIAGLVAGASKGEGLGNQFLANIRETDAIVNVVRCFDDDNIVHVAGRVDPIADIETIGTELALADLASVEKAIVREEKRARSGDKDAQKLVELCKKLLPHLDEGKPVRSFGLDAEERAMLKPLFLLTAKPAMYVGNVAEDGFENNPHLDRLKELAAKENAPVVAVCAAMESEIAELEDGEKAEFLAEMGLEEPGLNRLIRAGYDLLGLQTYFTAGVKEVRAWTIHKGDTAPQAAGVIHTDFERGFIRAQVIAYDDFVSLGGEAKAKEAGKMRVEGKEYVVQDGDVMHFLFNV

SEQ ID NO: 34371 - protein, 243 aa, Neisseria meningitidis; identical to SEQ ID NO: 19739

SEQ ID NO: 34372 - protein, 791 aa, Neisseria meningitidis
MNKNIKSLNLREKDPFLSREKQRYEHPLPSREWIIELLERKGVPSKIEALVRELSIKEEEYEFFERRLKAMARDGQVLINRRGAVCAADKLDLVKCRVEAHKDGFGFAVPLTPAKDGDFVLYERQMRGIMHGDIVTVRPAGMDRRGRREGTVLDIVERAQSKVVGRFYMDRGVAILEPEDKRLNQSIVLEPDGVARFKPESGQVIVGEIEVYPEQNRPAVAKIIEVLGDYADSGMEIEIAVRKHHLPHQFSEACAKAAKKIPDHVRKSDLKGRVDLRDLPLVTIDGETARDFDDAVFAEKIGRNYRLVVAIADVSHYVRPDDAIDTDAQERSTSVYFPRRVIPMLPENLSNGICSLNPNVERLCMVCDMVITYAGNIKEYRFYPAVMRSHARLTYNQVWKWLSDGIGHPFKAQIDTLYKLFKILQKKRFERGAVEFDSIETQMLFDDNGKIEKIVPVVRNDAHKLIEECMLAANVCAADFLLKNKHTALFRNHLGPTPEKLAALREQLGLLGLQLGGGDNPSPKDYAALAGQFKGRPDAELLQVMMLRSMQQAVYEPHCDGHFGLAYEAYAHFTSPIRRYPDLTVHRAIKAVLNQQTYTPKKSWQALGVHTSFCERRADDASRDVENWLKTYYMRDKVGEVFEGKISGMTSFGIFVTLDGIHIDGLVHISDLGEDYFNFRPEIMAIEGERSGIRFNMGDRVAVRVARADLDDGKIDFVLIAEGSGRGRKVKSSASAKPAGTAGKGKPKTAAEKKTARGGKVRGRGVSAAAESGKKAKKPVPIKVKKRKGKS

SEQ ID NO: 34373 - protein, 275 aa, Neisseria meningitidis; identical to SEQ ID NO: 9306

SEQ ID NO: 34374 - protein, 297 aa, Neisseria meningitidis; identical to SEQ ID NO: 25315

SEQ ID NO: 34375 - protein, 524 aa, Neisseria meningitidis; identical to SEQ ID NO: 2756

SEQ ID NO: 34376 - protein, 239 aa, Neisseria meningitidis
LTLTRKTLFLLTAAFGTHSLQTASADAVVKAEKLHASANRSYKVAGKRYTPKNQVAEFTQTGNASWYGGRFHGRKTSGGERYDMNAFTAAHKTLPIPSYVRVTNTKNGKSVIVRVNDRGPFHGNRIIDVSKAAAQKLGFVNQGTAHVKIEQIVPGQSAPVAENKDIFIDLKSFGTEHEAQAYLNQAAQNFAASASSPNLAIEKRRYEYVVKMGPFASQERAAEAEAQARGMVRAVLTAG

SEQ ID NO: 34377 - protein, 228 aa, Neisseria meningitidis
MYAFTDAQQQKALFRLVLFHILIIAASNYLVQFPFQIFGIHTTWGAFSFPFIFLATDLTVRIFGSHLARRIIFWVMFPALLLSYIFSVLFHNGSWTGLGALSEFNTFVGRIALASFAAYALGQILDIFVFNKLRRLKAWWIAPTASTVIGNALDTLVFFAVAFYASSDEFMAANWQGIAFVDYLFKLTVCGLFFLPAYGVILNLLTKKLTTLQTKQAQDRPAPSLQNP

SEQ ID NO: 34378 - protein, 451 aa, Neisseria meningitidis; identical to SEQ ID NO: 26399

SEQ ID NO: 34379 - protein, 130 aa, Neisseria meningitidis; identical to SEQ ID NO: 18694

SEQ ID NO: 34380 - protein, 186 aa, Neisseria meningitidis; identical to SEQ ID NO: 2604

SEQ ID NO: 34381 - protein, 245 aa, Neisseria meningitidis; identical to SEQ ID NO: 882

SEQ ID NO: 34382 - protein, 39 aa, Neisseria meningitidis
  misc_feature 33, 34: 'Xaa' is any amino acid
VTGKRPMSGNNVSHANNKTKRRFLPNLQSRRFXXTHLIN

SEQ ID NO: 34383 - protein, 307 aa, Neisseria meningitidis
MQYSTLAGQTDNSLVSNNFGFLRLPLNFMPYESQADWVITGVPYDMAVSGRSGARFGSEAIRRASVNLAWEHRRFPWTFDVRERLNIIDCGDLVFSFGDSRDFVEKMEAHAGKLLSSGKRCLSLGGDHFITLPLLRAHARYFGKLALIHFDAHTDTYENGSEYDHGTMFYTAPKEGIIDPAHSVQIGIRTEHSKKLPFTVLTAPQVNEDSVEETVRKIKETVGNMPVYLTFDIDCLDPSFAPGTGTPVCGGLSSDRALKILRGLTDLDIVGMDVVEVAPSYDQSDITALAGATIALEMLYLQGAKKD

SEQ ID NO: 34384 - protein, 900 aa, Neisseria meningitidis
MQLHILNNPKDAALAADAEFLKQSLFNLLHEEASPLVVETVKLLSTSDDSAALIEKVLPQLDERQTYDLTLACGLFAQILNIAEDVHHERRRQIHEDAGHNAAEGSLTETVRRLKAGKADGKSVQQQLDNTSVTAVLTAHPTEVQRQTVLNFNRRIRALLPQRERCTNADALARLRREIDTVLLGLWQTSETRRHKLSVNDEINNGVSIFPMSFFEALPKLYRKMEHDFQTAYPDVRVPNILKIGGWIGGDRDGNPFVSAETLRFAFRRHADAVFRFYRSELDKLYRELPLSIRRVKVNGDVTALSDKSPDEEIARAEEPYRRAIAYIMARAMGKARALGLGMGCKFGFLEPYASAQEFLDDLKKLQRSLIDNGSRLLAEGRLADIIRSVSVFGFHMMPLDLRQHAGKHADVVAELFQHAGLEDYNSLNEEQKQAALLRELSHQRPLYSPFITYSDHTRHELAIFNEARKIKDEFGEDAVTQSIISNCEQPSDLLALALLLKESGLLAVENGKPRSRINIVPLFETIEALENACPVMETMFRLDWYDALLESCGNIQEIMLGYSDSNKDGGYVTSSWCLYQAELGLVELFKKYDVRMRLFHGRGGSVGRGGGPSYQAILAQPAGSVAGQIRITEQGEVITAKYADPGNAQRNLETLVAATLEASILPDKKDPDAKLMQALSDVSFKYYRELITHPDFIDYFLQTSPIQEIATLNLGSRPASRKTLARIQDLRAIPWVFSWMQNRLMLPAWYGFGSAVETLCEDKPETLAALREHAQSNPFFQAMLSNMEQVMAKTDITLAENYAGLSESPEKAAVIFGMIKEEYQRSRKALLDLLQTEELLRDNRSLARSLALRIPYLNALNGLQVAMLKRLRKEPDNPHALLMVHLTINGVAQGLRNTG

SEQ ID NO: 34385 - protein, 117 aa, Neisseria meningitidis; identical to SEQ ID NO: 3438

SEQ ID NO: 34386 - protein, 431 aa, Neisseria meningitidis; identical to SEQ ID NO: 18939

SEQ ID NO: 34387 - protein, 46 aa, Neisseria meningitidis
VHYSAFSLPDVLMLFVLFLYMLMLVTSRFFGKFNRQGADTLFHLFA

SEQ ID NO: 34388 - protein, 51 aa, Neisseria meningitidis; identical to SEQ ID NO: 7347

SEQ ID NO: 34389 - protein, 553 aa, Neisseria meningitidis; identical to SEQ ID NO: 18342

SEQ ID NO: 34390 - protein, 352 aa, Neisseria meningitidis; identical to SEQ ID NO: 15871

SEQ ID NO: 34391 - protein, 60 aa, Neisseria meningitidis; identical to SEQ ID NO: 32969

SEQ ID NO: 34392 - protein, 344 aa, Neisseria meningitidis; identical to SEQ ID NO: 19264

SEQ ID NO: 34393 - protein, 344 aa, Neisseria meningitidis; identical to SEQ ID NO: 2299

SEQ ID NO: 34394 - protein, 394 aa, Neisseria meningitidis; identical to SEQ ID NO: 277

SEQ ID NO: 34395 - protein, 233 aa, Neisseria meningitidis; identical to SEQ ID NO: 3223

SEQ ID NO: 34396 - protein, 321 aa, Neisseria meningitidis; identical to SEQ ID NO: 31283

SEQ ID NO: 34397 - protein, 230 aa, Neisseria meningitidis; identical to SEQ ID NO: 1058

SEQ ID NO: 34398 - protein, 305 aa, Neisseria meningitidis; identical to SEQ ID NO: 18247

SEQ ID NO: 34399 - protein, 207 aa, Neisseria meningitidis; identical to SEQ ID NO: 6966

SEQ ID NO: 34400 - protein, 291 aa, Neisseria meningitidis; identical to SEQ ID NO: 22789

SEQ ID NO: 34401 - protein, 97 aa, Neisseria meningitidis; identical to SEQ ID NO: 910

SEQ ID NO: 34402 - protein, 92 aa, Neisseria meningitidis; identical to SEQ ID NO: 1287

SEQ ID NO: 34403 - protein, 159 aa, Neisseria meningitidis; identical to SEQ ID NO: 38

SEQ ID NO: 34404 - protein, 135 aa, Neisseria meningitidis; identical to SEQ ID NO: 18873

SEQ ID NO: 34405 - protein, 402 aa, Neisseria meningitidis; identical to SEQ ID NO: 13595

SEQ ID NO: 34406 - protein, 314 aa, Neisseria meningitidis
MSASKKFPIPLSYFSIALGLFALGLSWRYGASVGLLPALAAESLLAAASVVWLLLVAAYLIKMFAYRNDFLSDLRDLVQCCFISAIPITAMLEGLALKPYQAGAAAVLIYAGVAGQLAFSMYRAAGLWRGLHSLEATTPIIYLPTVATNFVSASSLAALGHHDYAALFFGAGMFSWLSLEASILGRLRTAAPVGTAARGVVGIQLAPAFVGCGAYFAVGGKVDGFALALIGYGCLQLLFLLRLTRWFWEGGFTMSFWGFSFGFAAMAGCGLHLAASGILSGLGLTLATAGSAGVALLLVGTLHRIATGRFLVRG

SEQ ID NO: 34407 - protein, 60 aa, Neisseria meningitidis; identical to SEQ ID NO: 2288

SEQ ID NO: 34408 - protein, 1397 aa, Neisseria meningitidis
  misc_feature 1391, 1392: 'Xaa' is any amino acid
MNKGLHRIIFSKKHSTMVAVAETANSQGKGKQAGSSVSVSLKTSGDLCGKLKTTLKTLVCSLVSLSMVLPAHAQITTDKSAPKNQQVVILKTNTGAPLVNIQTPNGRGLSHNRYTQFDVDNKGAVLNNDRNNNPFLVKGSAQLILNEVRGTASKLNGIVTVGGQKADVIIANPNGITVNGGGFKNVGRGILTIGAPQIGKDGALTGFDVRQGTLTVGAAGWNDKGGADYTGVLARAVALQGKLQGKNLAVSTGPQKVDYASGEISAGTAAGTKPTIALDTAALGGMYADSITLIANEKGVGVKNAGTLEAAKQLIVTSSGRIENSGRIATTADGTEASPTYLSIETTEKGAAGTFISNGGRIESKGLLVIETGEDISLRNGAVVQNNGSRPATTVLNAGHNLVIESKTNVNNAKGSANLSAGGRTTINDATIQAGSSVYSSTKGDTELGENTRIIAENVTVLSNGSIGSAAVIEAKDTAHIESGKPLSLETSTVASNIRLNNGNIKGGKQLALLADDNITAKTTNLNTPGNLYVHTGKDLNLNVDKDLSAASIHLKSDNAAHITGTSKTLTASKDMGVEAGLLNVTNTNLRTNSGNLHIQAAKGNIQLRNTKLNAAKALETTALQGNIVSDGLHAVSADGHVSLLANGNADFTGHNTLTAKADVNAGSVGKGRLKADNTNITSSSGDITLVAGNGIQLGDGKQRNSINGKHISIKNNGGNADLKNLNVHAKSGALNIHSDRALSIENTKLESTHNTHLNAQHERVTLNQVDAYAHRHLSITGSQIWQNDKLPSANKLVANGVLALNARYSQIADNTTLRAGAINLTAGTALVKRGNINWSTVSTKTLEDNAELKPLAGRLNIEAGSGTLTIEPANRISAHTDLSIKTGGKLLLSAKGGNAGAPSAQVSSLEAKGNIRLVTGETDLRGSKITAGKNLVVATTKGKLNIEAVNNSFSNYFPTQKAAELNQKSKELEQQIAQLKKSSPKSKLIPTLQEERDRLAFYIQAINKEVKGKKPKGKEYLQAKLSAQNIDLISAQGIEISGSDITASKKLNLHAAGVLPKAADSEAAAILIDGITDQYEIGKPTYKSHYDKAALNKPSRLTGRTGVSIHAAAALDDARIIIGASEIKAPSGSIDIKAHSDIVLEAGQNDAYTFLKTKGKSGKIIRKTKFTSTRDHLIMPAPVELTANGITLQAGGNIEANTTRFNAPAGKVTLVAGEELQLLAEEGIHKHELDVQKSRRFIGIKVGKSNYSKNELNETKLPVRVVAQTAATRSGWDTVLEGTEFKTTLAGADIQAGVGEKARVDAKIILKGIVNRIQSEEKLETNSTVWQKQAGRGSTIETLKLPSFESPTPPKLSAPGGYIVDIPKGNLKTEIEKLSKQPEYAYLKQXXTHLIN

SEQ ID NO: 34409 - protein, 59 aa, Neisseria meningitidis; identical to SEQ ID NO: 5877

SEQ ID NO: 34410 - protein, 197 aa, Neisseria meningitidis
MRKQNALTGIPTSDGQRGFALFIVLMVMIVVAFLVVTAAQSYNTEQRISANESDRKLALSLAEAALREGELQVLDLEYDTDSKVTFSENCGKGLCTAVNVRTNNDNEEAFDNIVVQGKPTVEAVKRSCTANSTNLCIDNKGTEYKKGTQSVSKMPRYIIEYLGVKNGENVYRVTAKAWGKNANTVVVLQSYVSNNDE

SEQ ID NO: 34411 - protein, 233 aa, Neisseria meningitidis; identical to SEQ ID NO: 25609

SEQ ID NO: 34412 - protein, 306 aa, Neisseria meningitidis
  misc_feature 2, 3: 'Xaa' is any amino acid
VXXRHCTVTEIAKQLNRHKSTISREIRRHRTQGQQYSAEKAQRQSRTIKQRKRQPYKLDSQLIQHIDPLIRRKLSPEQVCAYLCKHHQITLHHSTIYRYLRQDKSNGSTLWQHLRICSKPYRKRYGSTWTRGKVPNRVGIENRPAIVNQKSRIGDWEADTIVGKGQKSALLTLVERVTRYTIICKLDSLKAEDTARAAVRALKAHKDRVHTITMDNGKEFYQHTKITKALKAETYFCRPYHSWEKGLNENTNGLIRQYFPKQTDFRNISDREIRRVQDELNHRPRKTLGYETPSVLFLNLFQPLIH

SEQ ID NO: 34413 - protein, 371 aa, Neisseria meningitidis; identical to SEQ ID NO: 27700

SEQ ID NO: 34414 - protein, 339 aa, Neisseria meningitidis; identical to SEQ ID NO: 25568

SEQ ID NO: 34415 - protein, 447 aa, Neisseria meningitidis
MNQNHTILQNLPVGQKVGIAFSGGLDTSAALLWMKLKGALPYAYTANLGQPDEDDYNAIPKKAMEYGAENARLIDCRAQLAHEGIAAIQCGAFHVSTGGIAYFNTTPLGRAVTGTMLVSAMKEDDVNIWGDGSTYKGNDIERFYRYGLLTNPALKIYKPWLDQQFIDELGGRHEMSEFLIANGFNYKMSVEKAYSTDSNMLGATHEAKDLEFLNSGIKIVKPIMGVAFWDENVEIEPEEVSVRFEEGVPVALNGKEYADPVELFLEANRIGGRHGLGMSDQIENRIIEAKSRGIYEAPGMALFHIAYERLVTGIHNEDTIEQYRINGLRLGRLLYQGRWFDSQALMLRETAQRWVAKAVTGEVTLELRRGNDYSILNTESPNLTYQPERLSMEKVEDAAFTPLDRIGQLTMRNLDITDTRVKLGIYSQSGLLSLGEGSVLPQLGNKQ

SEQ ID NO: 34416 - protein, 273 aa, Neisseria meningitidis; identical to SEQ ID NO: 18262

SEQ ID NO: 34417 - protein, 198 aa, Neisseria meningitidis; identical to SEQ ID NO: 1998

SEQ ID NO: 34418 - protein, 141 aa, Neisseria meningitidis; identical to SEQ ID NO: 7081

SEQ ID NO: 34419 - protein, 202 aa, Neisseria meningitidis
  misc_feature 198, 199, 200: 'Xaa' is any amino acid
LELPVLEASIGHDVVDIRGLTKNTGLFSFDPGFVSTASCESKITYIDGDQGLLYYRGYPIEQLAEKSDYLEVCYLLIYGELPTPEQKAEFDNTVRRHTMVHEQLTWFFRGFRRDAHPMAMMVGVVGALSAFYQDSLDISNPEHRKIAIYRLISKIPTIAAMCYRYSNGLPFNYPKNNLSYSENFLHMMFATPCEDYKXXXHT

SEQ ID NO: 34420 - protein, 67 aa, Neisseria meningitidis
MKKSLIALCVAHCAKLKNDFGVPPLPEIKITPSPVRVGSLKQHPRLRLGKSGVAAAKRAARKRKNRR

SEQ ID NO: 34421 - protein, 279 aa, Neisseria meningitidis
MLVAFLIMLREGIEAALIVGIVAGFLKQSGHSKLMPKVWFGVVLASLMCLGLGYGIHSATGEIPQKQQEFVVGIIGLVAVAMLTYMILWMKKAARSMKQQLQDSVQAALNRGSGQGWALVGMAFLAVAREGLESVFFLLAVFKQSPTWQMPAGAVAGVLAAAVIGALIYQGGMRLNLAKFFRWTGAFLIAVAAGLLAGSLRALHEAGIWNALQDIVFESSKYLHEDSPLGVLLGGFFGYTDHPTQGEALVWLLYLIPVMTWFLCGSRPSETLTRKEELK

SEQ ID NO: 34422 - protein, 257 aa, Neisseria meningitidis; identical to SEQ ID NO: 780

SEQ ID NO: 34423 - protein, 741 aa, Neisseria meningitidis
MTQKSTIVYTHTDEAPALATQSLLPIVQAFARHADIDVKTADISLSGRILAAFPEYLTEAQRVPDALAELGELVKQPDANVIKLPNISASVPQLTAAIKELQSKGFTIPDYPADPQTDEEKAVRERYDRIKGSAVNPVLREGNSDRRAPKAVKNFAKKNPHSMGAWTKDSKTHVATMQSGDFFHNEQSVTVPDATSVSIVFTDKQGNKKELREPVALKAGEIIDATVMSKKALLAFLAEQVKDAKAKGVLFSLHMKATMMKVSDPIIFGHAVKVFFAPVFEKFGDKLAAAGVNVNNGFGNLLANLDKLDADTRTAVEAEIAAVYAANPDLAMVDSDKGITNLHVPSDVIVDASMPAMIRNSGRMWDKNGKAQDTKAVIPDSSYAGVYQATIDFCREHGAFDPTTMGTVPNVGLMAQAAEEYGSHNKTFEIEADGQVQVIDAEGKVLMQHDVEAGDIWRMCQTKDAPVKDWVQLAVNRARLSNTPAVFWLDENRPHDKSLLAKVKAYLAELDTNGLDIRILAPEEAAKFSLGRLKNGEDTISVTGNVLRDYLTDLFPILELGTSAKMLSIVPLMNGGGMFETGAGGSAPKHVQQFLEENHLRWDSLGEFLALAVSFEHLAQKTGNTKAQVLADTLDAATEKLLLNDKSPKRKAGELDNRGSHFYLTLYWAQELAAQDKDAELKAAFTPLAAALTADEAKIVAELSAVQGKAADIGGYYAANPEKAAQVMRPSVTFNQALNAL

SEQ ID NO: 34424 - protein, 248 aa, Neisseria meningitidis; identical to SEQ ID NO: 14834

SEQ ID NO: 34425 - protein, 264 aa, Neisseria meningitidis; identical to SEQ ID NO: 19309

SEQ ID NO: 34426 - protein, 472 aa, Neisseria meningitidis
VKPLRRLTNLLAACAVAAAALIQPALAADLAQDPFITDNTQRQHYEPGGKYHLFGDPRGSVSDRTGQINVIQDYTHQMGNLLIQQAAIQGNLGYTVRFSGHGYEEHAPFDNHAADSASKEQGNVDDGFTVYRLNWEGHEHHPADAYDGPKGGNYPKPTGARDEYTYHVNGTARSIKLNPTDTRSIRQRISDNYNNLGSNFSDRADEANRKMFEHNAKLDRWGNSMEFINGVAAGALNPFISAGEALGIGDILYGTRYAIDKAAMRNIAPLPAEGKFAVIGGLGSVAGFEKNTREAVDRWIQENPNAAETVEAVFNVAAAAKVAKLAKAAKPGKAAVSGDFSDSYKHNTASRLSQSVDGEMFQTRNVDFKAKSIGTKIHDGAQGKHISGHRNYIEGKSTLNQNINPQELLNGIHSGAYPVISKGARGNPVVDFGYPIGSDGKSGLSTNFGTIHSGKNGVHIVPANPKTIKKVQ

SEQ ID NO: 34427 - protein, 262 aa, Neisseria meningitidis; identical to SEQ ID NO: 24738

SEQ ID NO: 34428 - protein, 225 aa, Neisseria meningitidis; identical to SEQ ID NO: 11441

SEQ ID NO: 34429 - protein, 380 aa, Neisseria meningitidis
MNTLYTLFATCPRGLETVLSQELESLGCTDVQAFDGGVSCRGGLEQAYAANLHSRTAGRILLRLTKGTYRTERDIYKLAKNINWFNWFTLQQTFKVKVEAKRANVKSIQFVGLTVKDAVCDAFRDIYDARPSVDKAAPDVRIHAFLDERNVEIFIDTSGEALFKRGYRLDTGEAPLRENLAAGLLLSAGYDGTQPFQDPFCGSGTIAIEAAWIAARRAPGMMRRFGFEKLQNFDKTLWADLRRRAEAQVKPAFAPIAGSDNDRRIVQTALDNARSAEVDDIVSFSVADAQSVRPNGENGIMVSNPPYGVRLEEVRVLQALYPQLGTWLKKYYAGWLAAMFTGDREMPKFMRLSPKRKIPLYNGNLDCRLFLIDMVQGSNR

SEQ ID NO: 34430 - protein, 675 aa, Neisseria meningitidis
MEVIRYPDSPFKLHQPFPPAGDQPTAIADLLEGLSDGLAYQTLLGVTGSGKTYTMANVIAQSGRPAIIMAHNKTLAAQLYAEMREFFPENAVEYFVSYYDYYQPEAYVPSRDLFIEKDSAINEHIEQMRLSATKNLMTRDDVIIVATVSAIYGIGDPTEYQQMVLSVKEGDTIEQRDIIATLVSMQYERGDLDFKRGSFRVRGDVIDVYPAESSENALRISLFDDEIDRLDMFDPLSGSLHQRVGRYTVFPSSHYVTPRDTVLRACESIKEELRERIDFFTKENRPVEQQRIEQRTRFDLEMLYEMGFCKGIENYSRHFSGKKEGEPPPTLMDYLPDNAIMFIDESHVTVTQIGGMYKGDASRKQNLVDYGFRLPSARDNRPLKFHEFEKVMPQTVFVSATPAKYEEEHAGQVVEQVVRPTGLVDPQIIIRPVATQVDDLMSEINDRIQKGERVLVTTLTKRMAEQLTDYYSELGIKVRYLHSDIDTVERVEIIRDLRLGLFDVLVGINLLREGLDIPEVSLVAILDADKEGFLRSHRSLIQTIGRAARNVNGVAILYADKITDSMKAAIDETERRREKQIKFNEEHGIVPQQIKKQVKDIIDGVYHEEDSGKGRRQGKNKVKVGEIHNEEDAIKEIAKLEKAMQQAARDLQFEEAAVLRDRIRNIKESLLFGAE

SEQ ID NO: 34431 - protein, 54 aa, Neisseria meningitidis
MENGQRNNRFPLEKRIFYLEHSGRYLMICALSDYSQNKHTVVMANFIYPDEKTD

SEQ ID NO: 34432 - protein, 405 aa, Neisseria meningitidis; identical to SEQ ID NO: 18927

SEQ ID NO: 34433 - protein, 612 aa, Neisseria meningitidis; identical to SEQ ID NO: 11628

SEQ ID NO: 34434 - protein, 460 aa, Neisseria meningitidis; identical to SEQ ID NO: 19249

SEQ ID NO: 34435 - protein, 238 aa, Neisseria meningitidis; identical to SEQ ID NO: 18492

SEQ ID NO: 34436 - protein, 208 aa, Neisseria meningitidis; identical to SEQ ID NO: 24661

SEQ ID NO: 34437 - protein, 163 aa, Neisseria meningitidis
MKYRRFYRNGGTYFFTVVANKRQKILTDDAVRLALRQAVMAVRERYPFEILAWVLMPDHLHTIWRLPDNDSAYSERWRQIKRHSKYLIGGNLRLWQKRFWEHTIRDEADFAWHFDYLHFNPVKHGYVGQISDWRFSTFHRYVKQGIYPHNWGGGNADFSIEYD

SEQ ID NO: 34438 - protein, 594 aa, Neisseria meningitidis
MELMTVLLPLAALVSGVLFTWLLMKGRFQGEFAVLNAQLVEKAARCDFIEQAHAEMASELAVLDGKYEHLQDENYALGNRFSAAEKQIAHLQEKEAESARLKQSYIELQEKAQGLAVENERLATQLGQEQKAFADQYALERQIRQRIETDLEESRQTVRDVQNDLSDVGNRFAAAEKQIAHLQEKEAEAERLRQSHIDLQEKAQGLAVENERLTTQIEQERLASEEKLSLLGEARKSLSDQFQNLANTILEEKSRRFTEQNREQLHQVLNPLNERIHGFGELVRQTYDKESRERLTLENELKRLQGLNAQLHSEAKALTNALTGTQNKVQGNWGEMILETVLENSGLQKGREYVVQAAAVRKEEDGGTRRLQPDVLVNLPDNKQIVIDSKVSLTAYVRYTQAADADTAARELAAHVASIRAHMKGLSLKDYTDLEGVNTLDFVFMFIPVEPAYLLALQNDAGLFQECFDKRIMLVGPSTLLATLRTVANIWRNEQQNQNALAIADEGGKLYDKFVGFVQTLESVGKGIDQAQNSFQTAFKQLAEGRGNLVGRAEKLRLLGVKANKQLARDLTERANETTALSESLEYAAEDEAV

SEQ ID NO: 34439 - protein, 868 aa, Neisseria meningitidis
MAANQRYRKPLPGTDLEYYDARAACEDIKPGSYDKLPYTSRILAENLVNRADKVDLPTLQSWLGQLIEGKQEIDFPWYPARVVCHDILGQTALVDLAGLRDAIAEKGGDPAKVNPVVQTQLIVDHSLAVECGGYDPDAFRKNREIEDRRNEDRFHFINWTKTAFENVDVIPAGNGIMHQINLEKMSPVVQVKNGVAFPDTCVGTDSHTPHVDALGVISVGVGGLEAETVMLGRASMMRLPDIVGVELTGKRQPGITATDIVLALTEFLRKERVVGAFVEFFGEGARSLSIGDRATISNMTPEFGATAAMFAIDEQTIDYLKLTGRDDAQVKLVETYAKTAGLWADALKTAVYPRVLKFDLSSVTRNMAGPSNPHARFATADLAGKGLAKPYEEPSDGQMPDGAVIIAAITSCTNTSNPRNVVAAALLARNANRLGLQRKPWVKSSFAPGSKVAEIYLKEAGLLPEMEKLGFGIVAFACTTCNGMSGALDSKIQKEIIDRDLYATAVLSGNRNFDGRIHPYAKQAFLASPPLVVAYALAGSIRFDIENDVLGVADGKEIRLKDIWPADEEIDAVVAEYVKPQQFRDVYVPMFDTGTAQKAPSPLYDWRPMSTYIRRPPYWEGALAGERTLRGMRPLAILPDNITTDHLSPSNAILAVSAAGEYLAKMGLPEEDFNSYATHRGDHLTAQRATFANPKLFNEMVKNEDGSVRQGSFARVEPEGETMRMWEAIETYMNRKQPLIIIAGADYGQGSSRDWAAKGVRLAGVEAIVAEGFERIHRTNLIGMGVLPLQFKPGTNRHTLQLDGTETYDVVGERTPRCDLTLVIHRKNGETVEVPVTCRLDTAEEVLVYEAGGVLQRFAQDFLEGVVA

SEQ ID NO: 34440 - protein, 389 aa, Neisseria meningitidis
MTAHKILPVLLSIILGVSHTTAASPAPNKLTVHAAPTLQTPETLTAAHIVIDLQSKQILSAKNINTPVEPAALTQLMTAYLVFKNMKSGNIRSEENLKIPESAWASEGSRMFVRPGDTVSTDKLLKGMIALSANDAALTLAGRLGNGSIENFVQQMNKEARRLGMKNTVFKNPTGLSREGQVSTAKDLAQLSEALMRDFPEYYPLFSIKSFKFKNIEQNNRNILLYRDNNVNGLKAGHTESGGYNLAVSYSGNGRHILVITLGSESAETRASDNSKLLNWALQAFDTPKIYPKGKTVAQIQISGGSKKTVRAGFLKEAYITLPHKEAKMAEQILETIQPIPAPVKKGQILGKIKIRQNGYTIAEKEIVALENVKKRSRWQRLWACLTGQ

SEQ ID NO: 34441 - protein, 268 aa, Neisseria meningitidis; identical to SEQ ID NO: 9528

SEQ ID NO: 34442 - protein, 96 aa, Neisseria meningitidis; identical to SEQ ID NO: 11797

SEQ ID NO: 34443 - protein, 65 aa, Neisseria meningitidis; identical to SEQ ID NO: 127

SEQ ID NO: 34444 - protein, 192 aa, Neisseria meningitidis; identical to SEQ ID NO: 18256

SEQ ID NO: 34445 - protein, 212 aa, Neisseria meningitidis; identical to SEQ ID NO: 9292

SEQ ID NO: 34446 - protein, 374 aa, Neisseria meningitidis; identical to SEQ ID NO: 25378

SEQ ID NO: 34447 - protein, 99 aa, Neisseria meningitidis; identical to SEQ ID NO: 19651

SEQ ID NO: 34448 - protein, 178 aa, Neisseria meningitidis; identical to SEQ ID NO: 1654

SEQ ID NO: 34449 - protein, 353 aa, Neisseria meningitidis; identical to SEQ ID NO: 19269

SEQ ID NO: 34450 - protein, 215 aa, Neisseria meningitidis
  misc_feature 209, 210: 'Xaa' is any amino acid
MLEILFRHQDFVAINKPGGISVHQDSGETGLARTLAIQLGVERVWLLHRLDKQTSGILLFALNRESASALSGQFAGKSIKKTYLALSDRKPSKKQGWIKGGMEKSRRGMWKLTRNTENIAVTRFHSISIAEKLRLFILEPHTGKTHQLRVAMKSLGSPILGDSLYGGTESETMFLYAWKIQFAYQNRQIEIVAPLKNEWQTENISHALXXTHLIN

SEQ ID NO: 34451 - protein, 354 aa, Neisseria meningitidis; identical to SEQ ID NO: 18215

SEQ ID NO: 34452 - protein, 119 aa, Neisseria meningitidis; identical to SEQ ID NO: 7953

SEQ ID NO: 34453 - protein, 404 aa, Neisseria meningitidis
MSEVEYFSHFISDGKGKLLEIPQRRGKQDGVFVDWISFTFHEDTLLKVSGCPLFSDAEYMYVLSRKLEEILGFGITRKCKSRGNKFYESMYRLGSDDVDYGEVHFGGQRNTVLVELKGTGCSVASPGWELRLKQFLDDSIRTRITRIDLALDFFDGEYTPDQALLDHDNGFFDNSNQRPKSETIGTAWRNEDGSGKTFYVGRKKNSRFVRVYEKGRQLGDKESKWVRFEIQFNYGDIEIPLDILINQGSYFCGAFPICRKFKNMPVPERFDQRKKTLNLTFEHKLHYAKNAVGKLVNFMIEMGFDNSEIVESLKADSGFPKGLEPEKYALEMLKDGLKHGFIHEQPDIDLEIELDELGVIAFKNSDKFDREKRLFSPDYDVEKERKYQEYLSKVYHQNVDYDYF

SEQ ID NO: 34454 - protein, 483 aa, Neisseria meningitidis; identical to SEQ ID NO: 19390

SEQ ID NO: 34455 - protein, 581 aa, Neisseria meningitidis; identical to SEQ ID NO: 2972

SEQ ID NO: 34456 - protein, 154 aa, Neisseria meningitidis; identical to SEQ ID NO: 24221

SEQ ID NO: 34457 - protein, 266 aa, Neisseria meningitidis; identical to SEQ ID NO: 8298

SEQ ID NO: 34458 - protein, 171 aa, Neisseria meningitidis; identical to SEQ ID NO: 29480

SEQ ID NO: 34459 - protein, 98 aa, Neisseria meningitidis; identical to SEQ ID NO: 18505

SEQ ID NO: 34460 - protein, 384 aa, Neisseria meningitidis; identical to SEQ ID NO: 19546

SEQ ID NO: 34461 - protein, 619 aa, Neisseria meningitidis
MPEYRSKTSTHGRNMAGARALWRATGVMETDFGKPIIAVANSFTQFVPGHVHLHNMGQLVAREIEKAGAIAKEFNTIAIDDGIAMGHSGMLYSLPSRDLIADSIEYMVNAHCADALVCISNCDKITPGMLIAAMRLNIPTIFVSGGPMEAGKVIGVANIQPERRLDLIDAMIESADDNVSNRQVEEVEQNACPTCGSCSGMFTANSMNCLTEALGLSLPGNGSYLATHAGRKELFLEAGRMIVEITKRYYEQNDETVLPRNIATKKAFENAMTMDIAMGGSTNTILHLLAVANEAGVDFKMADIDRLSRVVPCICKTAPNNHDYYMEDVHRAGGIFAILKELDKAGKLHTDVHTIHAPTLKDAIEKWDVTNPENTRAIERFKAAPGGVRTTQAFSQNRMWKTLDLDREKGCIRDVAHAYSQDGGLAVLFGNIAERGCVVKTAGVDESILKFTGRARVFESQEAAVEGILGNQIVAGDIVIIRYEGPKGGPGMQEMLYPTSYLKSKGLGKACALLTDGRFSGGTSGLSIGHASPEAAEGGAIGLVHEGDTVEIDIPNRSIHLVISDEELAARRAEMEARGSKAWKPENRDRYVSAALRAYGAMATSADKGAVRDVAQIER

SEQ ID NO: 34462 - protein, 132 aa, Neisseria meningitidis; identical to SEQ ID NO: 1178

SEQ ID NO: 34463 - protein, 100 aa, Neisseria meningitidis; identical to SEQ ID NO: 20013

SEQ ID NO: 34464 - protein, 185 aa, Neisseria meningitidis; identical to SEQ ID NO: 19919

SEQ ID NO: 34465 - protein, 295 aa, Neisseria meningitidis; identical to SEQ ID NO: 19389

SEQ ID NO: 34466 - protein, 347 aa, Neisseria meningitidis; identical to SEQ ID NO: 18084

SEQ ID NO: 34467 - protein, 92 aa, Neisseria meningitidis; identical to SEQ ID NO: 600

SEQ ID NO: 34468 - protein, 407 aa, Neisseria meningitidis; identical to SEQ ID NO: 12938

SEQ ID NO: 34469 - protein, 102 aa, Neisseria meningitidis; identical to SEQ ID NO: 254

SEQ ID NO: 34470 - protein, 761 aa, Neisseria meningitidis; identical to SEQ ID NO: 540

SEQ ID NO: 34471 - protein, 258 aa, Neisseria meningitidis; identical to SEQ ID NO: 2774

SEQ ID NO: 34472 - protein, 72 aa, Neisseria meningitidis; identical to SEQ ID NO: 9949

SEQ ID NO: 34473 - protein, 230 aa, Neisseria meningitidis; identical to SEQ ID NO: 1269

SEQ ID NO: 34474 - protein, 382 aa, Neisseria meningitidis
MNTPPFVCWIFCKVIDNFGDIGVSWRLARVLHRELGWQVHLWTDDVSALRALCPDLPDVPCVHQDIHVRTWHSDAADIDTALVPDIVIETFACDLPENVLHIIRRHKPLWLNWEYLSAEESNERLHLMPSLQESVQKYFWFMGFSEKSGGLIRERDYRNAVRFDTEALRERLMLPEKNAPEWLLFGYRSDVWAKWLEMWRQAGSPMTLLLAGTQIIDSLKQSGVIPQDALQNDGDVFQTASVRLVKIPFVPQQDFDKLLHLADCAVIRGEDSFVRAQLAGKPFFWHIYPQDENVHLDKLHAFWDKAHGFYSPETASAHRRLSDDLNGGEALSATQRLECWQILQQHQNGWRQGAEDWSRYLFGQPSASEKLAAFVSKHQKIR

SEQ ID NO: 34475 - protein, 145 aa, Neisseria meningitidis
MPVKKVEKNILVLHSSDKMFELVDKVEDYPHFLPWYSKTEVIGRSGNELKARLFMDYMHVRQSFATHNRNIPGREIRMELLEGPFKTLRGTWKFIDLGDDMCKIEFNLEYDFSNAVLSALISPVFNHLSATLVEAFVKEADRRYA

SEQ ID NO: 34476 - protein, 188 aa, Neisseria meningitidis
  misc_feature 2, 3, 4: 'Xaa' is any amino acid
VXXXRSNRPIKDGSYLVIAEYQPTFWSKNKAGWKQAGIKEMPDASYCEQTRMFGKNIVNVGHESADTAIITKPVGQNLEIVPLDNPANIHVGERFKVRVLFRGEPLPNATVTATFDGFDTSDRSKTHKTEAQAFSDSTDDKGEVDIIPLRQGFWKANVEHKADFPDQSVCQKQANYSTLTFQIGHSHH

SEQ ID NO: 34477 - protein, 1392 aa, Neisseria meningitidis
MNYSFTEKKRIRKSFAKRENVLEVPFLLATQIDSYAKFLQLENAFDKRTDDGLQAAFNSIFPIVSHNGYARLEFVHYTLGEPLFDIPECQLRGITYAAPLRARIRLVILDKEASKPTVKEVRENEVYMGEIPLMTPSGSFVINGTERVIVSQLHRSPGVFFEHDKGKTHSSGKLLFSARIIPYRGSWLDFEFDPKDLLYFRIDRRRKMPVTILLKALGYGNEQILDIFYDKETFYLSSNGVQTDLVAGRLKGETAKVDILDKEGNVLVAKGKRITAKNIRDITNAGLTRLDVEPESLLGKALAADLIDSETGEVLASANDEITEELLAKFDINGVKEITTLYINELDQGAYISNTLRTDETAGRQAARVAIYRMMRPGEPPTEEAVEQLFNRLFFSEDSYDLSRVGRMKFNTRTYEQKLSEAQQNSWYGRLLNETFAGAAEKGGYVLSVEDIVASIATLVELRNGHGEVDDIDHLGNRRVRSVGELTENQFRSGLARVERAVKERLNQAESENLMPHDLINAKPVSAAIKEFFGSSQLSQFMDQTNPLSEVTHKRRVSALGPGGLTRERAGFEVRDVHPTHYGRVCPIETPEGPNIGLINSLSVYARTNDYGFLETPYRRVIDGKVTEEIDYLSAIEEGRYVIAQANADLDSDGNLIGDLVTCREKGETIMATPDRVQYMDVATGQVVSVAASLIPFLEHDDANRALMGANMQRQAVPCLRPEKPMVGTGIERSVAVDSATAIVARRGGVVEYVDANRVVIRVHDDEATAGEVGVDIYNLVKFTRSNQSTNINQRPAVKAGDVLQRGDLVADGASTDLGELALGQNMTIAFMPWNGYNYEDSILISEKVAADDRYTSIHIEELNVVARDTKLGAEDITRDIPNLSERMQNRLDESGIVYIGAEVEAGDVLVGKVTPKGETQLTPEEKLLRAIFGEKASDVKDTSLRMPTGMSGTVIDVQVFTREGIQRDKRAQSIIDSELKRYRLDLNDQLRIFDNDAFDRIERMIVGQKANGGPMKLAKGSEITTEYLAGLPSRHDWFDIRLTDEDLAKQLELIKVSLQQKREEADELYEIKKKKLTQGDELQPGVQKMVKVFIAIKRRLQAGDKMAGRHGNKGVVSRILPVEDMPYMADGRPVDIVLNPLGVPSRMNIGQILEVHLGWAAKGIGERIDRMLKEQRKAGELREFLNKLYNGSGKKEDLDALTDEEIIELASNLRKGASFASPVFDGAKESEIREMLNLAYPSEDPEVEKLGFNDSKTQITLYDGRSGEPFDRKVTVGVMHYLKLHHLVDEKMHARSTGPYSLVTQQPLGGKAQFGGQRFGEMEVWALEAYGAAYTLQEMLTVKSDDVNGRTKMYENIVKGEHKIDAGMPESFNVLVKEIRSLGLDIDLERY

SEQ ID NO: 34478 - protein, 161 aa, Neisseria meningitidis
MSNKMEQKGFTLIEMMIVVAILGIISVIAIPSYQSYIEKGYQSQLYTEMVGINNISKQFILKNPLDDNQTIKSKLEIFVSGYKMNPKIAEKYNVSVHFVNKEKPRAYSLVGVPKTGTGYTLSVWMNSVGDGYKCRDAASARAYSETLSADVGCEAFSNRKK

SEQ ID NO: 34479 - protein, 436 aa, Neisseria meningitidis; identical to SEQ ID NO: 18100

SEQ ID NO: 34480 - protein, 179 aa, Neisseria meningitidis
  misc_feature 2, 3: 'Xaa' is any amino acid
VXXDAAVAGDDIWVSGRVGMAAAALNCRLKRCVLPDDVFAECEQKLLRPEPRVGLGLALLPFARAAQDVSDGLAQDLGHILTASGVGAEIWADSLPSLSVLKDILPRAQWLSYTLAGGDDYELVFTAPESCRSRVLDAAERCGVPVTRIGKINGGCRLKVLDADGRELELHSLGFDHFG

SEQ ID NO: 34481 - protein, 227 aa, Neisseria meningitidis; identical to SEQ ID NO: 19572

SEQ ID NO: 34482 - protein, 458 aa, Neisseria meningitidis
MHDKTWSGRFNEPVSELVKQYTASIGFDRRLAEWDIQGSLAHAQMLKETGVLDEGDLADIRQGMAEILEEIRSGKIEWSSDLEDVHMNIERRLTDKIGDAGKRLHTGRSRNDQVATDIRLWLRDQITVIQNLIQNLQTALLDLAEQNAETVMPGFTHLQVAQPVSFGHHMLAYVEMLGRDNERMADCRRRVNRMPLGAAALAGTTYPIRREITAELLGFEQICQNSLDAVSDRDFAIEFTAAASLVMVHLSRLSEELILWMSPRFGFIDIADRFCTGSSIMPQKKNPDVPELVRGKSGRVIGHLIGLITLMKSQPLAYNKDNQEDKEPLFDTADTLIDTLRIYADMMRGVTVKPDNMRTAVMQGFATATDLADYLVKKGMPFRDAHEVVAQAVRHADQAGVDLSKLPLEVLQGFSDLIADDVYGVLTPEGSLNARNHLGGTAPEQVRFQVKRWREMLA

SEQ ID NO: 34483 - protein, 67 aa, Neisseria meningitidis; identical to SEQ ID NO: 966

SEQ ID NO: 34484 - protein, 296 aa, Neisseria meningitidis; identical to SEQ ID NO: 25102

SEQ ID NO: 34485 - protein, 172 aa, Neisseria meningitidis
  misc_feature 168, 169, 170: 'Xaa' is any amino acid
MTMILSILSLFFIIRLLFLAVSIKHEKALIAKGAKQYGKTNSTLLAAVHTLYYLACFVWVWLSDTAFNGISLIGTLTVMASFVILSLIIKQLGEIWTVKIYILPNHQINRSWLFKTFRHPNYFLNIIPELIGIALLCQAWYVLLIGLPIYLLVLFKRIRQEEQAMATXXXHT

SEQ ID NO: 34486 - protein, 371 aa, Neisseria meningitidis
MKVGFVGWRGMVGSVLMQRMKEENDFAHIPEAFFFTTSNVGGAAPDFGQAAKTLLDANDVAELAKMDIIVTCQGGDYTKSVFQALRDSGWNGYWVDAASSLRMKDDAIIVLDPVNRNVIDNGLKNGVKNYIGGNCTVSLMLMALGGLFQNDLVEWATSMTYQAASGAGAKNMRELISGMGAVHAQVADELADPAGSILDIDRKVSDFLRSEDYPKANFGVPLAGSLIPWIDVDLGNGQSKEEWKGGVETNKILGRSDNPTVIDGLCVRIGSMRCHSQALTLKLKKDLPVSEIEAILAGANDWVKVIPNEKEASIHELTPAKVTGTLSVPVGRIRKLGMGGEYISAFTVGDQLLWGAAEPLRRVLRIVLGSL

SEQ ID NO: 34487 - protein, 428 aa, Neisseria meningitidis
MTAQHQTPLRFITAGSVDDGKSTLIGRLLYDSKALLSDQIKTLESGKSNGLKETIDFSILTDGLEAEREQGITIDVAYRYFSTAKRKFIIADTPGHEQYTRNMVTGASTASAAVVLVDASQLDFGAQPLQLLPQTKRHSAILRQLNCPHIVVAVNKMDLLDYSEDKFNAIVEAYRRLAEQLGLKDVHFVPVSALLGDNIVYPGGNMPWYKGEPLLSILENLPGADETGRSAADFYFPVQLVVRQDADKADDFRGYQGRIERGSVAVGQTVRIEPNGLTAEVSEIITPKGEVAQAFAGEAATLRLDRDIDVSRGDLFVDKNSPLAPQKHLEVTLCWFDERPLNTARKYLLKHGTQTVSAKVGEIESVLDVRTLEQEAGAESLKMNDIAKVRINLQKPVTATPYAENTAAGSFILIDEATYGTVAAGMIL

SEQ ID NO: 34488 - protein, 265 aa, Neisseria meningitidis
MDTAQKQRWAITLSYDGSRFYGWQKQADGVPTVQAALENALAQIAGEAVSTIVAGRTDTGVHATAQVVHFDTTAARPQQAWVRGVNAHLPEGIAVLHARQVAPEFHARFDAYGRHYRYLLESVPVRSPLLKNRAGWTHLKLDIEPMRRAAAYLIGEQDFSSFRAAECQAKSPVKTIYRADLTQSSGLVRLDLHGNAFLHHMVRNIMGALVYVGSGRLSVEGFAALIQERSRLKAPPTFMPDGLYLTGVDYPEAYGIVRPQIPEWL

SEQ ID NO: 34489 - protein, 321 aa, Neisseria meningitidis
MSYTQLTQGERYHIQYLSRHCTVTEIAKQLNRHKSTISREIRRHRTQGQQYSAEKAQRQSRTIKQRKRQPYKLDSQLIQHIDTLIRRKLSPEQVCAYLCKHHQITLHHSTIYRYLRQDKSNGSTLWQHLRICSKPYRKRYGSTWTRGKVPNRVGIENRPAIVNQKSRIGDWEADTIVGKGQKSALLTLVERVTRYTIICKLDSLKAEDTARAAVRALKAHKDRVHTITMDNGKEFYQHTKITKALKAETYFCRPYHSWEKGLNENTNGLIRQYFPKQTDFRNISDREIRRVQDELNHRPRKTLGYETPSVLFLNLFQPLIH

SEQ ID NO: 34490 - protein, 397 aa, Neisseria meningitidis; identical to SEQ ID NO: 19315

SEQ ID NO: 34491 - protein, 116 aa, Neisseria meningitidis; identical to SEQ ID NO: 4624

SEQ ID NO: 34492 - protein, 164 aa, Neisseria meningitidis; identical to SEQ ID NO: 24985

SEQ ID NO: 34493 - protein, 101 aa, Neisseria meningitidis; identical to SEQ ID NO: 1251

SEQ ID NO: 34494 - protein, 163 aa, Neisseria meningitidis; identical to SEQ ID NO: 18129

SEQ ID NO: 34495 - protein, 318 aa, Neisseria meningitidis; identical to SEQ ID NO: 46

SEQ ID NO: 34496 - protein, 243 aa, Neisseria meningitidis
LVKTADGYKAIAHIQAGDRVFAKDEASGKTGYKPVTARYGNPYQETVYIEISDGIGNNQTLISNKIHPFYSQGKWIQAGRLKKGDTLLSESGAKQTVQNITFKQQPLKAYNLTVADWHTYFVKGSQAETEGVWVHNDCPYDKGNQRYKDASYHGKNDNSVKSRAPTNGQAALDNSVQVKSTSPRRVGVDKANNEIVVLDKTQTFNNGFAEYHGHVRSWQDLHTDQKNALKKAGLVNSKGKIKK

SEQ ID NO: 34497 - protein, 208 aa, Neisseria meningitidis; identical to SEQ ID NO: 18194

SEQ ID NO: 34498 - protein, 361 aa, Neisseria meningitidis; identical to SEQ ID NO: 7621

SEQ ID NO: 34499 - protein, 452 aa, Neisseria meningitidis
MKPLDLNFICQALKLPMPSESKPVSRIVTDSRDIRAGDVFFALAGGRFDAHDFVEDVLAAGAAAVVVSREDCVAMDGALKVDDTLTALQMVAKAWRENVNPFVFGITGSGGKTTVKEMLAAVLRRRFGDNAVLATAGNFNNHIGLPLTLLKLNEKHRYAVIEMGMNHFGELAVLTQIAKPDAALINNAMRAHVGCGFDGVGDIAKAKSEIYQGLCSDGMALIPQEDANMAVFKTATLNLNTRTFGIDSGDVHAENIVLKPLSCEFDLVCGDERAAVVLPVPGRHNVHNAAAAAALSLAAGLSLNDVAEGLKGFSNIKGRLNVKAGIKGATLIDDTYNANPDSMKAAIDVLARMPAPRIFVMGDMGELGEDEAAAMHAEVGAYARDQGIEAAYFVGDNSVEAAEKFGADGLWFAAKDPLIQVLRHDLPERATVLVKGSRFMQMEEVVEALEDK

SEQ ID NO: 34500 - protein, 415 aa, Neisseria meningitidis; identical to SEQ ID NO: 138

SEQ ID NO: 34501 - protein, 119 aa, Neisseria meningitidis; identical to SEQ ID NO: 9294

SEQ ID NO: 34502 - protein, 291 aa, Neisseria meningitidis; identical to SEQ ID NO: 19797

SEQ ID NO: 34503 - protein, 153 aa, Neisseria meningitidis; identical to SEQ ID NO: 25231

SEQ ID NO: 34504 - protein, 299 aa, Neisseria meningitidis; identical to SEQ ID NO: 167

SEQ ID NO: 34505 - protein, 238 aa, Neisseria meningitidis; identical to SEQ ID NO: 945

SEQ ID NO: 34506 - protein, 261 aa, Neisseria meningitidis
MAVFIPASAGAADLMLAQEYKDQEIAGWAMSEKLDGVRAYWDGKHLISRQGYAFTPPKGFTAQFPPYPLDGELYSGRGQFEQISATVRSVSSDWRGIRLHVFDVPKAQGNLYQRLAVATQWLKTHPNAPITIIPQIKVRDRQHAMDFLKQIEAQGGEGVMLRQPESRYSGGRSSQLLKLKSQYDDECTVTRHYEGKGRNAGRLGAVGCKNRYGEFRIGSGFKDKDRDNPPKIGTLITYRYRGFTQKGTPKFATFVRVRTDR

SEQ ID NO: 34507 - protein, 119 aa, Neisseria meningitidis; identical to SEQ ID NO: 3183

SEQ ID NO: 34508 - protein, 218 aa, Neisseria meningitidis; identical to SEQ ID NO: 19582

SEQ ID NO: 34509 - protein, 476 aa, Neisseria meningitidis
MTWETVIGLEIHVQLNTKSKIFSGASTAFGAEPNAHAGVVECALPGVLPVMNREVVEKAIKLGLALDAKINRKNVFDRKNYFYPDLPKGYQISQLDLPIVEHGKLEIVVGDDVKTINVTRAHMEEDAGKSVHEGLNGATGIDLNRAGTPLLEVVSEPEMRSAAEAVAYAKALHSLVTWLNICDGNMAEGSFRVDANVSVRPKGQAEFGTRREIKNLNSFRFLEQAINYEAEAQIEILEDGGKVQQATMLFDPEKGETRVMRLKEDAQDYRYFPDPDLLPVIISDAQMQKAKAEMPELPKEMAARFVADYGVSEYDARLLTASRAQAAYFEEAAKESGQGKPTANWMNGELAAALNKEGMELADSPITAPRLAALVGKIADGTLSSKLAKKAFEAMWAESEATIAEIIEKHGLQQMTDTGAIEAMVDEVLANNAKAVEQFKSGNEKALNAIVGQVMKASKGKANPAQVQELIKAKLA

SEQ ID NO: 34510 - protein, 484 aa, Neisseria meningitidis; identical to SEQ ID NO: 24959

SEQ ID NO: 34511 - protein, 206 aa, Neisseria meningitidis; identical to SEQ ID NO: 18030

SEQ ID NO: 34512 - protein, 41 aa, Neisseria meningitidis
MVYLGKNNVFKEDDTQVLPKTAKMPSEQFRRHFQNRFTLER

SEQ ID NO: 34513 - protein, 728 aa, Neisseria meningitidis
VGLETVTVVGKSRPRATSGLLHTSTASDKIISGDTLRQKAVNLGDALDGVPGIHASQYGGGASAPVIRGQTGRRIKVLNHHGETGDMADFSPDHAIMVDTALSQQVEILRGPVTLLYSSGNVAGLVDVADGKIPEKMPENGVSGELGLRLSSGNLEKLTSGGINIGLGKNFVLHTEGLYRKSGDYAVPRYRNLKRLPDSHADSQTGSIGLSWVGEKGFIGVAYSDRRDQYGLPAHSHEYDDCHADIIWQKSLINKRYLQLYPHLLTEEDIDYDNPGLSCGFHDDDNAHAHTHSGRPWIDLRNKRYELRAEWKQPFPGFEALRVYLNRNDYRHDEKAGDAVENFFKNKTQNARIELRHQPIGRLKGSWGVQYLQQKSSALSATSEAVKQPMLIDNNVRHYSFFGVEQANWDNFTLEGGVRVEKQKASIRYDKALIDRENYYNHPLPDLGAHRQTARSFALSGNWYFTPQHKLSLTASHQERLPSTQELYAHGKHVATNTFEVGNKHLNKERSNNIELALGYEGDRWQYNLALYRNRFGNYIYAQTLNDGRGPKSIEDDSEMKLVRYNQSGADFYGAEGEIYFKPTPRYRIGVSGDYVRGRLKNLPSLPGREDAYGNRPFIAQDDQNAPRVPAARLGFHLKASLTDRIDANLDYYRVFAQNKLARYETRTPGHHMLNLGANYRRNTRYGEWNWYVKADNLLNQSVYAHSSFLSDTPQMGRSFTGGVNVKF

SEQ ID NO: 34514 - protein, 187 aa, Neisseria meningitidis
MKKIIFAALAAAAISTASAATYKVDEYHANARFAIDHFNTSTNVGGFYGLTGSVEFDQAKRDGKIDITIPIANLQSGSQHFTDHLKSADIFDAAQYPDIRFVSTKFNFNGKKLVSVDGNLTMHGKTAPVKLKAEKFNCYQSPMAKTEVCGGDFSTTIDRTKWGVDYLVNVGMTKSVRIDIQIEAAKQ

SEQ ID NO: 34515 - protein, 1463 aa, Neisseria meningitidis
MKTTDKRTTETHRKAPKTGRIRFSPAYLAICLSFGILPQAWAGHTYFGINYQYYRDFAENKGKFAVGAKDIEVYNKKGELVGKSMTKAPMIDFSVVSRNGVAALVGDQYIVSVAHNGGYNNVDFGAEGSNPDQHRFSYQIVKRNNYKAGTKGHPYGGDYHMPRLHKFVTDAEPVEMTSYMDGWKYTDQNNYPDRVRIGAGRQYWRSDEDEPNNRESSYHIASAYSWLVGGNTFAQNGSGGGTVNLGSEKIKHSPYGFLPTGGSFGDSGSPMFIYDAQKQKWLINGVLQTGNPYIGKSNGFQLVRKNWFYDEIFTGDTHSVFYEPHQNGKYTFHDNNNGTGKINAKHEHNSLPNRLKTRTVQLFNVSLSETAREPVYHAAGGVNSYRPRLNNGENISFIDEGKGELILTSNINQGAGGLYFQGDFTVSPENNETWQGAGVHISEDSTVTWKVNGVANDRLSKIGKGTLHVQAKGENQGSISVGDGTVILDQQADDKGKKQAFSEIGLVSGRGTVQLNADNQFNPDKLYFGFRGGRLDLNRHSLSFHRIQNTDEGAMIVNHNATTTSTVTITGNESITQPSGKNINRLNYSKEIAYNGWFGEKDATKTNGRLNLVYQPAAEDRTLLLSGGTNLNGNITQTNGKLFFSGRPTPHAYNHLNNHWSQKEGIPHGEIVWDNDWINRTFKAENFHIQGGQAVISRNVAKVEGDWHLSNHAQAVFGVAPHQSHTICTRSDWTGLTNCVENTITDDKVIASLTNTDISGNVDLADHAHLNLTGLATLNGNLTAGGDTHYEVTHNATQRGNLSLVGNAQATFNQATLNGNTSASGNASFNLSNNAVQNGSLTLSGNAKANVSHSALNGNVSLADKAVFHFENSRLTGQISGGKDTALHLKDSEWTLPSGTELGNLNLDNATITLNSAYRHDAAGAQTGSVSDTPRRRSRRSRRSLLSVTPPTSAESRFNTLTVNGKLNGQGTFRFMSELFGYRSDKLKLAESSEGTYTLAVNNTGNEPASLEQLTVVEGKDNKPLSENLNFTLQNEHVDAGAWRYQLIRKDGEFRLHNPVKEQELSDKLGKAEAKKQAGKDNAQSLDALIAAGRDAVEKTESVAEPARQAGGENVGIMQAEEEKKRVQADKDSALAKQREAETRPATTAFPRARRARRDLPQPQPQPQPQPQPQPQRDLISRYANSGLSEFSATLNSVFAVQDELDRVFAEDRRNAVWTSGIRDTKHYRSQDFRAYRQQTDLRQIGMQKNLGSGRVGILFSHNRTENTFDDGIGNSARLAHGAVFGQYGIDRFYIGISAGAGFSSGSLSDGIGGKIRRRVLHYGIQARYRAGFGGFGIEPHIGATRYFVQKADYRYENVNIATPGLAFNRYRAGIKADYSFKPAQHISITPYLSLSYTDAASGKVRTRVNTAVLAQDFGKTRSAEWGVNAEIKGFTLSLHAAAAKGPQLEAQHSAGIKLGYRW

SEQ ID NO: 34516 - protein, 149 aa, Neisseria meningitidis
MSIYAVAHIVHLYCAIAFVGGVFFEVLVLSVLHTGRVSCEARRKVEKAMSYRAVRVMPFVVGLLFASGVVMAANRYLSILGEPFATSFGTMLTLKILLAFSVLAHFAIAVVKMARSTLTVGWSKYIHAVVFTHMLLIVFLAKAMFYISW

SEQ ID NO: 34517 - protein, 210 aa, Neisseria meningitidis
MTVWVGLTGGIGSGKSAAAQCFADLGVPRIDADAAAHSLTASDGIALPEIRRLFGDTVFDTQGLLRRDILRKEVFASPSRKALLESVMLPLIFSEIKKQQETFTDAAYGIVEIPLLTEKRQFISLIRRVLTISAPLEKRIGRVMARSGLTRGEVADIISHQASESERLLLADDVLLNDGSLKNLREKTMRLHAFYSGIFASKPTQGKHNG

SEQ ID NO: 34518 - protein, 290 aa, Neisseria meningitidis
MSWLDKILPPKIKNRSKDGSSNVPEGLWHKCPSCSATVYSTELQQNNQVCPKCNHHNPLSARQRLNLLLDEDGREEVAGNVKPTDPLKFKDGKKYPDRLSAARKLTGEDDALVVMKGKMNGLPVVVAAFEFRFIGGSMGSVVGERFVQGIRRAVADNCPFVCVAASGGARMQEGVNSLMQMTKTSAALHLLTEKRLPFISVLTDPTMGGVSASFAFLGDVVLAEPNALIGFAGPRVIEQTVRETLPEGFQRAEFLLEKGAIDQIVDRREMKQRISGLITLLCRQDKVSAA

SEQ ID NO: 34519 - protein, 512 aa, Neisseria meningitidis
MNMLGALAKVGSLTMVSRVLGFVRDTVIARAFGAGMATDAFFVAFKLPNLLRRVFAEGAFAQAFVPILAEYKETRSKEATEAFIRHVAGMLSFVLVIVTALGILAAPWVIYVSAPGFAKDADKFQLSIDLLRITFPYILLISLSSFVGSVLNSYHKFGIPAFTPTFLNVSFIVFALFFVPYFDPPVTALAWAVFVGGILQLGFQLPWLAKLGFLKLPKLSFKDAAVNRVMKQMAPAILGVSVAQISLVINTIFASYLQSGSVSWMYYADRMMELPGGVLGAALGTILLPTLSKHSANQDTEQFSALLDWGLRLCMLLTLPAAVGLAVLSFPLVATLFMYREFTLFDAQMTQHALIAYSFGLIGLIMIKVLAPGFYARQNIKTPVKIAIFTLICTQLMNLAFIGPLKHVGLSLAIGLGACINAGLLFYLLRRHGIYQPGKGWAAFLAKMLLSLAVMGGGLYAAQIWLPFDWAHAGGMQKAARLFILIAVGGGLYFASLAALGFRPRHFKRVES

SEQ ID NO: 34520 - protein, 299 aa, Neisseria meningitidis; identical to SEQ ID NO: 7158

SEQ ID NO: 34521 - protein, 56 aa, Neisseria meningitidis
VKKVLKAVEAGDKAAAQAVYQESVKVIDRIADKGVFHKNKAARHKSRLSAKVKALA

SEQ ID NO: 34522 - protein, 257 aa, Neisseria meningitidis; identical to SEQ ID NO: 7786

SEQ ID NO: 34523 - protein, 144 aa, Neisseria meningitidis; identical to SEQ ID NO: 4464

SEQ ID NO: 34524 - protein, 257 aa, Neisseria meningitidis; identical to SEQ ID NO: 18044

SEQ ID NO: 34525 - protein, 291 aa, Neisseria meningitidis; identical to SEQ ID NO: 122

SEQ ID NO: 34526 - protein, 76 aa, Neisseria meningitidis
MNIVKKYAVKALLAAGIFTPAIVMADTFDASAIGTQVANVIMGFVSMVSAVGMAAITVILAIQGFKMAWSMIKSVK

SEQ ID NO: 34527 - protein, 208 aa, Neisseria meningitidis; identical to SEQ ID NO: 4867

SEQ ID NO: 34528 - protein, 384 aa, Neisseria meningitidis; identical to SEQ ID NO: 3277

SEQ ID NO: 34529 - protein, 305 aa, Neisseria meningitidis; identical to SEQ ID NO: 18545

SEQ ID NO: 34530 - protein, 179 aa, Neisseria meningitidis; identical to SEQ ID NO: 18824

SEQ ID NO: 34531 - protein, 354 aa, Neisseria meningitidis; identical to SEQ ID NO: 18199

SEQ ID NO: 34532 - protein, 206 aa, Neisseria meningitidis; identical to SEQ ID NO: 19411

SEQ ID NO: 34533 - protein, 259 aa, Neisseria meningitidis; identical to SEQ ID NO: 19786

SEQ ID NO: 34534 - protein, 133 aa, Neisseria meningitidis; identical to SEQ ID NO: 2156

SEQ ID NO: 34535 - protein, 490 aa, Neisseria meningitidis; identical to SEQ ID NO: 18335

SEQ ID NO: 34536 - protein, 102 aa, Neisseria meningitidis; identical to SEQ ID NO: 19543

SEQ ID NO: 34537 - protein, 245 aa, Neisseria meningitidis; identical to SEQ ID NO: 6094

SEQ ID NO: 34538 - protein, 272 aa, Neisseria meningitidis
MKGMDKLRYQQDFLNIRPIFTAGEQEYLTGLSDRLPLSVLTDSVRNIEEIGIDFVYSSAKLEGNTYNQYDTQALLKLGQTAGGKLYSDAVMLINLRESYRHLLSGLDSPEPFDWLDFLKTTHSLISENLLEKGSGGVVRRDSVTISGTDYTPLSNPQSLDTELKWLLQEAPKIENPFDRAVYLHNNLAYLQYFKDCNKRTARNCMTLSLMRSGFFPCVFSPDSYPAYAEAVVAYYETGDYGLFKKYFISAYENTVNKYGPQPDMDISRNFSL

SEQ ID NO: 34539 - protein, 252 aa, Neisseria meningitidis; identical to SEQ ID NO: 2885

SEQ ID NO: 34540 - protein, 404 aa, Neisseria meningitidis; identical to SEQ ID NO: 240

SEQ ID NO: 34541 - protein, 183 aa, Neisseria meningitidis; identical to SEQ ID NO: 18553

SEQ ID NO: 34542 - protein, 377 aa, Neisseria meningitidis
MFKKFKPVLLSFFALVFAFWLGTGIAYEINPRWFLSDTATEVPENPNAFVAKLARLFRNADRAVVIVKESMRTEESLAETVDDGPLQSEKDYLALAIRLSRLKEKAKWFHVTEQEHGKEVWLDYHIGEGGLVAVSLSQRSPEAFVNAEYLYRNDRPFSVNVYGGTAHGENYETTGEYRVVWQPDGSVFDASGRGKIGEDVYEHCLGCYQMAQVYLAKYRDVANDEQKVWDFREESNRIASDSRDSVFYQNMRELMPRGMKANSLVVGYDADGLPQKVYWSFDNGKKRQSFEYYLKNGNLFIAQSSTVALKADGVTADMQTYHAQQTWYLDGGRIVREEKQGDRLPDFPLNLEDLEKEVSRYAEAAARRSGGRRDLSH

SEQ ID NO: 34543 - protein, 408 aa, Neisseria meningitidis; identical to SEQ ID NO: 2386

SEQ ID NO: 34544 - protein, 175 aa, Neisseria meningitidis; identical to SEQ ID NO: 5

SEQ ID NO: 34545 - protein, 262 aa, Neisseria meningitidis; identical to SEQ ID NO: 19454

SEQ ID NO: 34546 - protein, 162 aa, Neisseria meningitidis; identical to SEQ ID NO: 18748

SEQ ID NO: 34547 - protein, 304 aa, Neisseria meningitidis; identical to SEQ ID NO: 19737

SEQ ID NO: 34548 - protein, 89 aa, Neisseria meningitidis; identical to SEQ ID NO: 1473

SEQ ID NO: 34549 - protein, 241 aa, Neisseria meningitidis
MPRFHLPENLSVGQTVALPDNIVRHLNVLRVRPNENITLFDGKGKAHAARLTVLEKRRAEAEILHEDTTDNESPLNITLIQSISSGERMDFTLQKSVELGVTAIQPVISERCIVRLDGERAAKRLARWQEIVISACEQSGRNTVPPVLPIIGYREALDKMPSESTKLIMSINRARKLGDIRQPSGAIVFMVGPEGGWTEQEEQQAFDAGFQAVTLGKRILRTETAPLAALAAMQTLWGDFA

SEQ ID NO: 34550 - protein, 185 aa, Neisseria meningitidis; identical to SEQ ID NO: 24513

SEQ ID NO: 34551 - protein, 433 aa, Neisseria meningitidis
MPSEHQHTSSLLDFDRTHLLHPYTSMTDPLPVYPVKRAEGVFIELADGTRLIDGMSSWWCAIHGYNHPVLNQAVEAQIKQMSHVMFGGLTHDPAVELGKLLVGILPQGLDRIFYADSGSVSVEVALKMAVQYQQARGLTAKQNIATVRRGYHGDTWNAMSVCDPETGMHHIFGSALPQRYFVDNPKSRFDDEWDGADLQPVRALFEVHHADIAAFILEPVVQGAGGMYFYHPQYLRGLRDLCDEFDIVLIFDEIATGFGRTGKMFACEHAEVVPDIMCIGKGLSGGYMTLAAAITSQKVTETISRGEAGVFMHGPTFMANPLACAVACASVKLLLSQDWQANIRRIESILKGRLKAAWDIRGVKDVRVLGAIGVIELDKGVDMARFQADCVAQGIWVRPFGRLVYLMPPYIISDGVLTKLADKTVQILKEHSK

SEQ ID NO: 34552 - protein, 221 aa, Neisseria meningitidis
MTFTAVLFDLDGVITDTAEYHYRAWKKLAEELGIGIDRKFNEQLKGVSRDDSLKRILAHGGKTVGEAEFAELTRHKNDNYVEMIQAVKPEDVYPGILPLLEALRANGKKIALASASKNGPFLLERMGLTHFFDAIADPAAVAHSKPAPDIFLAAAEGVGADIRRCIGIEDAAAGVAAIKAAGALPVGVGKAEDLGSDIALVSDTAGLTYAYLQNVWAQSGR

SEQ ID NO: 34553 - protein, 119 aa, Neisseria meningitidis; identical to SEQ ID NO: 420

SEQ ID NO: 34554 - protein, 95 aa, Neisseria meningitidis; identical to SEQ ID NO: 3028

SEQ ID NO: 34555 - protein, 452 aa, Neisseria meningitidis; identical to SEQ ID NO: 1075

SEQ ID NO: 34556 - protein, 155 aa, Neisseria meningitidis; identical to SEQ ID NO: 6437

SEQ ID NO: 34557 - protein, 164 aa, Neisseria meningitidis
  misc_feature 159, 160: 'Xaa' is any amino acid
MAKNNQYSESSITVLKGLEPVKERPGMYTRTDSPTHICQEVIDNAADEALGGFATAIDVQIHEDGSLSVRDNGRGIPVGLHPEEGVPVVELVFTRLHAGGKFNKKDGGSAYAFSGGLHGVGVSVTNALSTRLEVTVKREGKIHRIVFAGGDVVEPLAQXXHTLN

SEQ ID NO: 34558 - protein, 56 aa, Neisseria meningitidis
  misc_feature 50, 51: 'Xaa' is any amino acid
MSASQLLSRLTQTVGEKYIITDPAKTEQYRQGYRFGEGKALAVVRPGSIXXTHLIN

SEQ ID NO: 34559 - protein, 205 aa, Neisseria meningitidis
MSHKKQDAFQGLIDALKVLPNVGPKSAQRIAYHLLQHKRKEAEKLVDALQTALKQVDHCAMCNTFCEGGLCDICADETRDGRRLMVVHMPADVSNMEAANCHDGLYFVLMGQINTALGMDVSAIALDRLAQRLGGGEVEEIIIATAFTAEGNATAYVLSEFFKNLPYKVSRLSQGIPLGGELEYVDAGTLAQAVYERRLIKEGGA

SEQ ID NO: 34560 - protein, 295 aa, Neisseria meningitidis
MPYQQITVNVNDAVAERLADALMEHGALSAAIEDAYAGTQNEQAIFGEPGMPAEQIWQQSKVIALFGEHDEAAAIIQTAAQECGLKDLAYTGETLEDQDWVRLTQAQFDPIRISERLWITPSWHEAPEGTAVNLRLDPGLAFGTGSHPTTRLCLKWLDTQLKNGESVLDYGCGSGILTIAALKLGAGSAVGVDIDEQAVRAGKDNAEQNNVDAQFFLPDGLPQGQFDVVVANILANPLRMLGEMLAARTKQGGRIVLSGLLDEQAEELGGIYSQWFDLDPAETEESWARLSGTKR

SEQ ID NO: 34561 - protein, 335 aa, Neisseria meningitidis
MSTFFQQTAQAMIAKHIDRFPLLKLDQVIDWQPIEQYLNRQKTRYLRDHRGRPAYPLLSMFKAVLLGQWHSLSDPELEHSLITRIDFNLFCRFDELSIPDYSTLCRYRNRLAQDDTLSELLKLINRQLTEKGLKVEKASAAVIDATIIQTAGSKQRQAIEVDEEGQISGQTTPSKDSDARWIKKNGLYKLGYKQHTRTDAEGYIEKLHITPANAHECKHLPPLLEGIAEGTTVYADKGYDSAENRQHLEEHQLQDGIMRKACRNRPLTETQTKRNRYLSKTRYVVEQSFGTLHRKFRYARAAYFGLIKVSAQSHLKAMCLNLLKAANRLSAPVAA

SEQ ID NO: 34562 - protein, 296 aa, Neisseria meningitidis; identical to SEQ ID NO: 337

SEQ ID NO: 34563 - protein, 636 aa, Neisseria meningitidis
MNILSVENASFAIGHVALLDKTSFQLDSGEKVGLIGRNGAGKSSFLKILAGLQKLDDGQIIVQNNLKIVYVPQESFFDKDATVFDTVAEGLGEIRDLLRRYHHVSHDLEHNSDDVLLKELNELQLEIEAKDGWKLDAAVKQTLGELGLPENEKIGNLSGGQKKRVALAQAWVQKPDVLLLDEPTNHLDIDAIIWLENLLKAFEGSLVVITHDRRFLDNIATRIVELDRGILRSYPGSFSKYSEKKAQELVVEAEHNRLFDKFHAQEEAWIRKGIEARRTRNEGRVRRLEELRRQRAERRNGQGQVNFKLDSGEKSGKIIAELEHASFAYGDKVIMDKFSAILQRGDKIGLIGPNGIGKTTFLKLILGELQPTYGRIRIGSKQEVAYFDQFRSALNENDTVFYTLGQGNDYVEVGGKKKHVMSYLEDFLFPPARAQSPVSSLSGGERNRLLLAKLFTRPANILVLDEPTNDLDIDTQELLEDLLRDYQGTVFLVSHDRMFLDNVITQSLVFEGNGRLKEYIGGYQDYIDAKSREAKIQTESAPKTADAEPVKEKPKANRTVKLSYKEQRELDALPDEIAALEAEQAEINAQLSDPEIFKDYEKAGALQSRAEEIEMLLLEKLERWELLETKQNGNAV

SEQ ID NO: 34564 - protein, 358 aa, Neisseria meningitidis; identical to SEQ ID NO: 18789

SEQ ID NO: 34565 - protein, 106 aa, Neisseria meningitidis; identical to SEQ ID NO: 18989

SEQ ID NO: 34566 - protein, 158 aa, Neisseria meningitidis
MNTIAPNLDGKHLRIGIVQARFTNEIGSEMLKVCCRTLQELGVADENITVATVPGALEIPITLMNLASSEKFDALIAIGVVIRGETYHFELVSNESGAGVSRVALDYNIPIANAVLTTENDAQAIERIEEKASDAAKVAVECANLVNLLLEEQFEDEE

SEQ ID NO: 34567 - protein, 149 aa, Neisseria meningitidis; identical to SEQ ID NO: 3543

SEQ ID NO: 34568 - protein, 54 aa, Neisseria meningitidis; identical to SEQ ID NO: 1909

SEQ ID NO: 34569 - protein, 630 aa, Neisseria meningitidis
MRFSRFEPKGRLKQQIRFQTTFLSTSHHGNQTKAAHRHIHVGSTAGTTTIRSGGDTTLKGAQLIGKGIQADTRNLHIESVQDTETYQSKQQNASAQVTVGYGFSASGDYSQSKIRADHASVTEQSGIYAGEDGYQIKVGNHTDLKGGIITSSQSAEDKGKNRFQTATLTASDIQNHSQYKGESFGLGASASISGKTLGQGAQNKPQNKHLTSVADKNGASSSVGYGSDSDSQSSITKSGINTRNIHITDEAGQLARTGRTAKETEARIYTGIDTETADQHTGRLKNSFDKDAVAKEINLQREVTKEFGRNAAQAVAAVADKLGNTQSYERYQEARTLLEAELQNTDSEAEKAAIRASLGQVNAYLAENQSRYDTWKEGGIGRSILHGAAGGLTTGSLGGILAGSGTSLAAPYLDKAAENLGTAGKAAVNALGGAAIGYATGGSGGAVVGANVDWNNRQLHPSEYKLAEQYADIVASRLNISKEEALGRIIRHMQRTVDYATAKADNFRTDDAIISILGANNLPKQDQHYTNPNYNKQYIQNYVRDFNLANKYNYFGKTPTQSRDYKVGVVTDIGKAALNSGIGIFESAANLATGEIDPNSWAYVHMGRIGYTHPEYGNAWIRISSATLVY

SEQ ID NO: 34570 - protein, 376 aa, Neisseria meningitidis
MAKHLPLAVLTALLLAACGGSDKPPAEKPAPAENQNVLKIYNWSEYVDPETVADFEKKNGIKVTYDVYDSDETLESKVLTGKSGYDIVAPSNAFVGRQIKAGAYQKIDKSLIPNYKHLNPEMMRLMDGVDPGHEYAVPFYWGTNTFAINTERVKKALGTDKLPDNQWDLVFDPEYTSKLKQCGISYLDSAAEIYPMVLNYLGKNPNSSNTEDIREATALLKKNRPNIKRFTSSGFIDDLARGDTCVTIGFGGDLNIARRRAEEAGGKEKIRVMMPKEGVGIWVDSFVIPKDAKNVANAHKYINDFLDPEVSAKNGNFVTYAPSSKPARELMEDEFKNDNTIFPTEEDLKNSFIMVPIQPAALKFMVRQWQDVKAGK

SEQ ID NO: 34571 - protein, 354 aa, Neisseria meningitidis; identical to SEQ ID NO: 19573

SEQ ID NO: 34572 - protein, 99 aa, Neisseria meningitidis; identical to SEQ ID NO: 7449

SEQ ID NO: 34573 - protein, 74 aa, Neisseria meningitidis; identical to SEQ ID NO: 2464

SEQ ID NO: 34574 - protein, 310 aa, Neisseria meningitidis; identical to SEQ ID NO: 2585

SEQ ID NO: 34575 - protein, 56 aa, Neisseria meningitidis; identical to SEQ ID NO: 8938

SEQ ID NO: 34576 - protein, 123 aa, Neisseria meningitidis; identical to SEQ ID NO: 3099

SEQ ID NO: 34577 - protein, 213 aa, Neisseria meningitidis; identical to SEQ ID NO: 18305

SEQ ID NO: 34578 - protein, 74 aa, Neisseria meningitidis; identical to SEQ ID NO: 19783

SEQ ID NO: 34579 - protein, 368 aa, Neisseria meningitidis; identical to SEQ ID NO: 5075

SEQ ID NO: 34580 - protein, 281 aa, Neisseria meningitidis
  misc_feature 275, 276: 'Xaa' is any amino acid
MNIQNIRTLLDTVAVPNTARTLGGEKAVRSVEQRSDGIHIALHFGFPVAHIASETADRIQEILMPLTGDTHIHLSMDTEIGTHKVQPGVTTIKGVKNIIAVASGKGGVGKSTTTANLAAAMARMGARVGVLDADLYGPSQPTMLGVDDRKPNQKNQKLIPVESSDGIQVMSIGFLVDTDQAVVWRGPMVSQALQQLMFQSEWDEVDYLFIDLPPGTGDIQLTLSQRIPVTGSVIVTTPQDIALIDARKAVDMFRKVNIPILGVLENMSVHICTNXXTHLIN

SEQ ID NO: 34581 - protein, 321 aa, Neisseria meningitidis
MSYTQLTQGERYHIQYLSRHCTVTEIAKQLNRHKSTISREIRRHRTQGQQYSAEKAQRQSRTIKQRKRQPYKLDSQLIQHIDPLIRRKLSPEQVCAYLCKHHQITLHHSTIYRYLRQDKSNGSTLWQHLRICSKPYRKRYGSTWTRGKVPNRVGIENRPAIVNQKSRIGDWEADTIVGKGQKSALLTLVERVTRYTIICKLDSLKAEDTARAAVRALKAHKDRVHTITMDNGKEFYQHTKITKALKAETYFCRPYHSWEKGLNENTNGLIRQYFPKQTDFRNISDREIRRVQDELNHRPRKTLGYETPSVLFLNLFQPLIH

SEQ ID NO: 34582 - protein, 147 aa, Neisseria meningitidis
MPFRLFLGILCGLSMVAPVYAQGQPDAVNAYIQKKKVIVNTSKAELCFADDRQCHPVLIGVATPKGTFGLTLNSTDKPGYGGEVIGFKQEGDFLFALHRVWNQIPSERRSERIASSVVSDRIMTNGCINVSDAVYEKLRHYFVLEVI

SEQ ID NO: 34583 - protein, 1038 aa, Neisseria meningitidis
MNKTWKRQVFRHTALYTAILMFSHTGGGGGAMAQTIKYPIIMNKGNQLEVKGNGQYSTIKDKNREREYTHQGTKGGGGSVSFNNTDELVSRQNGTAVFGTATYLPPYGKVSGFDAGALKERNNAVDWIRTTRIALAGYAYTDAICRSSTGCPKLVYKTQFTFGNSGLAKKANGGELDIYVDKSRDNSPIYKLKDHPWLGVSFNLSAKGTAKDGKTINKFDEKNSNNNLVYTTEGRDISLGDWQREKTAMAYYLNAKLHLLDKKQIQNITDKTVQLGVLKPSIDVRQGNKGIAGILAYWAKWDIKDDGQIPVKLGLQQVKAGRCINKPNPNKNSKALSPALTAPALWFGPVKDGKAEMYSASVSTYPDSSSSQIFLQNLSRKDDTSKPGRYSLKPLSASDIQSKEPTFTGRQTVIRLDGGVQQIKLDKSNEAAGLNGNTNNNTFGIVKDLGVEPDTNEWKKVLLPWTVRGFADDSEFKKFNKEEKNNDNKPKYSQKYRIRENGNNSKRDLGDIVNSPIVAVGGYLATSANDGMVHIFKKGNGDARDYSLKLSYIPGTMPRKDIQSQDSTLAKELRAFAEKGYVGDRYGVDGGFVLRKVERNGKDHVFMFGAMGFGGRGAYALDLTKIDSNNLTGVSMFDVQNDKNNNKNDNNRVELGYTVGTPQIGKTHNGKYAAFLASGYATKDVNSNDNTTALYVYDLESSGNLIKKIEVKDGKGGLSSPTLVDKDLDGIVDIAYAGDRGGSMYRFDLSNNDPTKWSVRTIFKGTPDKPITSAPAISQLKDKRVVIFGTGSDLSEDDVNSQEIQHVYGIFDNDTNTGVAKDGQGNGLLEQVLEKDKDGKTLFLSDYKRSNGSGDKGWVVKLEAGQRVTVKPTVVLRTAFVTIHKYTGNDKCGAETAILGINTADGGKLTKKSARPIVPDANQAVAQYSGHKKGINGKSIPIGCMQKGNEIVCPNGYVYDKPVNVRYLDEKKTDGFSTTADGDAGGSGIDPAGKRSGKNNRCFSQKGVRTLLMNDLDSLDITGPTCGMKRISWREIFY

SEQ ID NO: 34584 - protein, 332 aa, Neisseria meningitidis; identical to SEQ ID NO: 6228

SEQ ID NO: 34585 - protein, 178 aa, Neisseria meningitidis; identical to SEQ ID NO: 1831

SEQ ID NO: 34586 - protein, 179 aa, Neisseria meningitidis; identical to SEQ ID NO: 403

SEQ ID NO: 34587 - protein, 468 aa, Neisseria meningitidis
MEKNTLSARAPSPWLPLLLAIAIFMQMLDATILNTALPEIATDLDESPLDMQLAVVAYTLTVALLIPLSGYLADRFGTKKVFFGSIAVFMLGSALCAASGSLFELTLSRVVQGIGGSMLVPIPRLTILRVYDKSKLLNAINYAVMPALIGPVLGPLAGGYLVEYASWHWIFLLNLPIGLLGFILGRNIMPDVKGNDTALDFKGYLIFSAAACLLLLSAESLSHALPPYFALLPLCGGLLFARRYFRHMKTASKPIYSADLFLIRTFRLGLAGNLFSRLGISSIPFLMPLMFQVAFGFGASLSGWLVAPVALSSLLVKPLIAPLMKRFGYRTVLLWNTKLLAAFIMLLALPDGNSPLWIWIFLSLAIGACNSLQFSAMNTLTLADLRPQQTGSGNSLMAVNQQLAISMGIVVGALILKNWTFLIPASSGLHSAFRMTLLSIGGITLASSLVFKRLHVSDGANLTRNTPS

SEQ ID NO: 34588 - protein, 526 aa, Neisseria meningitidis; identical to SEQ ID NO: 24522

SEQ ID NO: 34589 - protein, 335 aa, Neisseria meningitidis
MSTSFQQTAQAMIAKHIDRFPLLKLDQVIDWQPIEQYLNRQRTRYLRDHRGRPAYPLLSMFKAVLLGQWHSLSDPELEHSLITRIDFNLFCRFDELSIPDYSTLCRYRNWLAQDNTLSELLKLINRQLTEKGLKIEKASAAVVDATIIQTAGSKQRQAIEVDEEGQVSGQTTPSKDSDARWIKKNGLYKLGYKQHTRTDGEGYIEKLHITPANAHECKHLPPLLEGLPKGTTVYADKGYDSAENWQHLEEHQLQDGIMRKACRNRPLTEAQTKRNRYLSKTRYVVEQSFGTLHRKFRYARAAYFGLIKVSAQSHLKAMCLNLLKAANRLSAPAAA

SEQ ID NO: 34590 - protein, 146 aa, Neisseria meningitidis
MMQTFRKISLYAATLWLGMQIMAGYIVAPVLFKMLPKMQAGEIAGVLFDILSWSGLAVWGAVLAAAFAALTRRQTTLLLFLLSALAANRFLITPVIEALKYGHENWLLSALGGSFGMWHGISSMIFMATALLSAVLSWRLSGKEVV

SEQ ID NO: 34591 - protein, 109 aa, Neisseria meningitidis; identical to SEQ ID NO: 899

SEQ ID NO: 34592 - protein, 417 aa, Neisseria meningitidis; identical to SEQ ID NO: 4662

SEQ ID NO: 34593 - protein, 331 aa, Neisseria meningitidis; identical to SEQ ID NO: 12175

SEQ ID NO: 34594 - protein, 186 aa, Neisseria meningitidis; identical to SEQ ID NO: 1480

SEQ ID NO: 34595 - protein, 592 aa, Neisseria meningitidis
MTVLKLSHWRVLAELADGLPQHVSQLARMADMKPQQLNGFWQQMPAHIRGLLRQHDGYWRLVRPLAVFDAEGLRELGERSGFQTALKHECASSNDEILELARIAPDKAHKTICVTHLQSKGRGRQGRKWSHRLGECLMFSFGWVFDRPQYELGSLSPVAAVACRRALSRLGLKTQIKWPNDLVVGRDKLGGILIETVRTGGKTVAVVGIGINFVLPKEVENAASVQSLFQTASRRGNADAAVLLETLLAELDAVLLQYARDGFAPFVAEYQAANRDHGKAVLLLRDGETVFEGTVKGVDGQGVLHLETAEGEQTVVSGEISLRPDDRPVSVPKRRDSERFLLLDGGNSRLKWAWVENGTFATVGSAPYRDLSPLGAEWAEKADGNVRIVGCAVCGEFKKAQVQEQLARKIEWLPSSAQALGIRNHYRHPEEHGSDRWFNALGSRRFSRNACVVVSCGTAVTVDALTDDGHYLGGTIMPGFHLMKESLAVRTANLNRHAGKRYPFPTTTGNAVASGMMDAVCGSVMMMHGRLKEKTGAGKPVDVIITGGGAAKVAEALPPAFLAENTVRVADNLVIHGLLNLIAAEGGESEHT

SEQ ID NO: 34596 - protein, 500 aa, Neisseria meningitidis
MSREMLQLAEALAGEKNVDAEVVFQALEFALSTAAKKKADREHMDVRVQINRDTGEYQTFRRWLIVADEDYTYPDVEKTIEEIQEEIPGTTIQIGEYYEEQLPNEGFGRQAAQTAKQIILQRIRDAEREQNLNEFLAVKEDIVSGTVKRVERHGIIVEVVAGKLDALIPRDQMIPRENFRSGDRIRALFLRVEEIGNTGRKQVILSRTSGDFLVKLYANEVPEIADGMLEIRAVARDPGQRAKVAVKANDQRIDPQGTCIGVRGSRVNAVSNELSGERIDVVLWSPEPAQFVMSALSPAEVSRIVIDEDKHAVDVIVAEDQLALAIGRGGQNVRLASDLTGWQLNIMTSAEADERNAAEDAAIRRLFMDHLNVDEETADVLVQEGFATLEEVAYVPAAELLAIEGFDEEIVDMLRNRARDAILTMAIAAEEKLGEVSDDMRNLEGIDADMLRSLAEAGITTRDDLAELAVDELIEITGVNEETAKAVILTAREHWFTEDK

SEQ ID NO: 34597 - protein, 720 aa, Neisseria meningitidis
MNAPFFRLSLLSLTLAAGFAHAAENNANVALDTVTVKGDRQGSKIRTNIVTLQQKDESTATDMRELLKEEPSIDFGGGNGTSQFLTLRGMGQNSVDIKVDNAYSDSQILYHQGRFIVDPALVKVVSVQKGAGSASAGIGATNGAIIAKTVDAQDLLKGLDKNWGVRLNSGFASNEGVSYGASVFGKEGNFDGLFSYNRNDEKDYEAGKGFRNVNGGKTVPYSALDKRSYLAKIGTTFGDGDHRIVLSHMKDQHRGIRTVREEFTVGSEDSRINIKRQAPAYRETTQSNTNLAYTGKNLGFVEKLDANAYVLEKERYSADDSGTGYAGNVKGPNHTRITTRGMNFNFDSRLAEQTLLKYGINYRHQEIKPQAFLNGEFSIPTKEKKNGKEVDKPMEQQKKDRADEATVHAYKLSNPTKTDTGAYIEAIHEIDGFTLTGGLRYDRFKVKTHDGKTVSNSNLNPSFGVIWQPHEHWSFSASHNYASRSPRLYDALQTHGKRGIISIADGTKAERARNTEIGFNYNDGTFAANGSYFWQTIKDALANPQNRHVSAAVREAVNAGYIKNHGYELGASYRTGGLTAKVGVSHSKPRFYDTHKDKLLSANPEFGAQVGRTWTASLAYRFQNPNLEIGWRGRYVQKAVGSILVSGQKNREGKLENVVRQGFGVNDVFANWKPLGKDTLNVNLSVNNVFNTFYYPHSQRWTNTLPGVGRDVRLGVNYKF

SEQ ID NO: 34598 - protein, 160 aa, Neisseria meningitidis; identical to SEQ ID NO: 2123

SEQ ID NO: 34599 - protein, 218 aa, Neisseria meningitidis
MDFEKARFNMVEQQIRPWDVLDFDVLDALAEIPRELFVDEDLQGLAYADMALPLANGHKMLEPKVVARLAQGLKLTKNDTVLEIGTGSGYATALLAKLASRVVSDDIDAEQQNRAKAVLDGLGLENIDYVQNNGLTELSAGAPFDAVYVGGAVNLVPEVLKEQLKDGGRMVVIVGRRPVQRALLITRRGDVFEEKVLFDTLVAHLDDKDADPFGGFQF

SEQ ID NO: 34600 - protein, 239 aa, Neisseria meningitidis; identical to SEQ ID NO: 18283

SEQ ID NO: 34601 - protein, 37 aa, Neisseria meningitidis; identical to SEQ ID NO: 7611

SEQ ID NO: 34602 - protein, 260 aa, Neisseria meningitidis
MTDILNKILTAKAQEVAAQKAAVPLEHIRALAAEAAPVRSFIGSIRGKHRLNLPAVIAEIKKASPSKGLIRPDFRPAEIARAYENAGAACLSVLTDEPYFQGSPEYLKQAREAVSLPVLRKDFIIDEYQVYQARAWGADAVLLIAAALEREQLERFEAVAHELGMTVLLELHDESELEKCRNLTTPLWGVNNRNLRTFEVSLDQTLSLLPALEGKTVVTESGITGKADVEFMRARGVHTFLIGETFMRADDIEAEVGKLF

SEQ ID NO: 34603 - protein, 308 aa, Neisseria meningitidis; identical to SEQ ID NO: 18204

SEQ ID NO: 34604 - protein, 540 aa, Neisseria meningitidis
MQVNIQIPCMLYRRGSVKPPLFEAPRLLPSFTDPVVPKLSAPGGYIVDIPKGNLKTEIEKLAKQPEYAYLKQLQVAKNVNWNQVQLAYDKWDYKQEGLTRAGAAIIALAVTVVTAGAGVGAALGLNGAAAAAADAAFASLASQASVSLINNKGDVGKTLKELGRSRTVKNLVVAAATAGVSNKLGASSLATWSETPWVNNLNVNLANAGSAALINTAVNGGSLKDNLEANILAALVNTAHGEAASKIKQLDQHYIAHKVAHAVAGCAAATANKGKCQDGAIGAAVGEIVGEALVKNTDFSDMTPEQLDLEVKKITAYAKLVAGTVAGVTGGDVNTAAQTAQNAVENNAVKAVVTAAKVVYKVARKGLKNGKINVRDLKQTLKDEGYNLADNLTTLFDETLDWNDAKAVIDIVVGTELNRANKGEAAQKVKEVLEKNRPYIPNKGAVPNMSTYMKNNPFGKQLAQISEKTTLPTQQGQSVFLVKRNQGLLKTGDRFYLDGQHKNHLEVFDKNGNFKFVLNMDGSLNQMKTGAAKGRKLNLK

SEQ ID NO: 34605 - protein, 481 aa, Neisseria meningitidis; identical to SEQ ID NO: 24478

SEQ ID NO: 34606 - protein, 151 aa, Neisseria meningitidis; identical to SEQ ID NO: 3388

SEQ ID NO: 34607 - protein, 484 aa, Neisseria meningitidis; identical to SEQ ID NO: 18202

SEQ ID NO: 34608 - protein, 363 aa, Neisseria meningitidis; identical to SEQ ID NO: 22177

SEQ ID NO: 34609 - protein, 160 aa, Neisseria meningitidis; identical to SEQ ID NO: 1608

SEQ ID NO: 34610 - protein, 168 aa, Neisseria meningitidis; identical to SEQ ID NO: 24988

SEQ ID NO: 34611 - protein, 289 aa, Neisseria meningitidis; identical to SEQ ID NO: 2976

SEQ ID NO: 34612 - protein, 161 aa, Neisseria meningitidis; identical to SEQ ID NO: 24964

SEQ ID NO: 34613 - protein, 112 aa, Neisseria meningitidis
MNTRTIYLAGGCFWGLEAYFQRIDGVVDAVSGYANGNTKNPSYEDVSYRHTGHAETVKVTYDADKLSLDDILQYFFRVVDPTSLNKQGNDTGTQYRSGVYYTDYYLMNKKVV

SEQ ID NO: 34614 - protein, 335 aa, Neisseria meningitidis
MSTFFQQTAQAMIAKHIDRFPLLKLDQVIDWQPIEQYLNRQKTRYLRDHRGRPAYPLLSMFKAVLLGQWHSLSDPELEHSLITRIDFNLFCRFDELSIPDYSTLCRYRNWLAQDNTLSELLKLINRQLTEKGLKVEKASAAVVDATIIQTADSKQRQAIEVDEEGQINGQTTPSKDSDARWIKKNGLYKLGYKQHTRTDAEGYIEKLHITPANAHECKHLSPLLEGLPKGTTVYADKGYDSAENRQHLEEHQLLDGIMRKACRNRPLSEVQTKRNRYLSKTRYVVEQSFGTLHRKFRYARAAYFGLLKVSAQSHLKAMCLNLLKAANRLSAPAAA

SEQ ID NO: 34615 - protein, 237 aa, Neisseria meningitidis; identical to SEQ ID NO: 6270

SEQ ID NO: 34616 - protein, 202 aa, Neisseria meningitidis; identical to SEQ ID NO: 597

SEQ ID NO: 34617 - protein, 544 aa, Neisseria meningitidis; identical to SEQ ID NO: 19301

SEQ ID NO: 34618 - protein, 50 aa, Neisseria meningitidis
  misc_feature 44, 45: 'Xaa' is any amino acid
MKNVQKGFTLLELMIAVAILGILTLITYPSYKTYIRRVRLSEVXXTHLIN

SEQ ID NO: 34619 - protein, 658 aa, Neisseria meningitidis
MPRIAALPDHLVNQIAAGEVVERPANALKEIVENSIDAGATAIDVELAGGGIRLIRVSDNGSGIHPDDIELALHRHATSKIKTLNDLEHVASMGFRGEGLASIASVSRLTLTSRQEDSSHATQVKAEDGKLSSPTAAAHPVGTTIEAAELFFNTPARRKFLKSEATEYAHCATMLERLALAHPHIAFSLKRDGKQVFKLPAQSLHERIAAIVGDDFQTASLEIDSGNGALRLYGAIAKPTFAKGKTDKQYCFVNHRFVRDKVMLHAVKQAYRDVLHNALTPAFVLFLDLPPEAVDVNVHPTKTEIRFRDSRQVHQLVFHTLNKALADTRADLTESVGNAGEVLHDITGVTPAPMPSENDSENLFNRASDYPTGNKPDTRNAFGASGKTAPMPYQSAYAPQQRSLSLRESRAAMNTYAELYKKTDDIDLELSRFEQARFGNMPSETPAPQTDTPLSDGIPSQSELPPLGFAIAQLLGIYILAQAEDSLLLIDMHAAAERVNYEKMKRQRQENGRLQSQRLLIPVTFAASHEECAALADHADALAGFGLELSDMGGNTLAVRAVPAMLGKSDIVSLARDVLGELAQVGSSQTIEEHENRILATMSCHGSIRAGRRLTLPEMNALLRDMENTPRSNQCNHGRPTWVKLTLKELDALFLRGQ

SEQ ID NO: 34620 - protein, 286 aa, Neisseria meningitidis
MSDLSVLSPFAVPLAAVFGLLVGSFLNVVIYRVPVMMERGWTVFAKEYLNLPLTEEESRTFNLMKPDSCCPKCRVPIRAWQNIPIVSYLLLRGKCASCQTKISIRYPLIELLTGVLFGLVAWQYGWSWITLGGLILTAFLISLTFIDADTQYLPDSMTLSLIWLGLIFNLDGGFVPLQSAVLGAVAGYGSIWLLCAVYKLLTRKTGMGNGDFKLIAALGAWLGISALPVLIFVSSLIGLVAAIVMRVAKGQHFAFGPALTVSGWIIFTANDSVWRAVNWWLTHPVL

SEQ ID NO: 34621 - protein, 243 aa, Neisseria meningitidis
LQDRTGQKVPSVVFRTRVGDTWKDVSTDDLFKGKKVVVFSLPGAFTPTCSSSHLPRYNELFGAFKENGVDAIYCVSVNDTFVMNAWAAEEESDNIYMIPDGNGEFTEGMGMLVGKEDLGFGKRSWRYSMLVNDGVVEKMFIEPEEPGDPFKVSDADTMLQFVAPDWKAQESVAIFTKPGCQFCAKAKQALQDKGLSYEEIVLGKDATVTSVRAITGKMTAPQVFIGGKYIGGSEDLEAYLAKN

SEQ ID NO: 34622 - protein, 449 aa, Neisseria meningitidis
MANQTNSKAKALLGWVDARFPLSKMWKEHLSEYYAPKNFNFWYFFGSLSMLVLVIQIVSGIFLTMNYKPDGNLNAYHLPAAFTAVEYIMRDVSGGWIIRYMHSTGASFFFIVVYLHMFRGLIYGSYKKPRELVWIFGSLIFLALMAEAFMGYLLPWGQMSFWGAQVIINLFSAIPVIGPDLSTWIRGDFNVSDVTLNRFFALHVIAVPLVLLGLVVAHIIALHEVGSNNPDGVEIKKLKDENGVPLDGIPFFPYYVVHDILAVTIFLIVFCAVMFFAPEGGGYFLEAPNFDAANALKTPPHIAPVWYFTPFYAILRAIPSFAGTQVWGVIGMGAAVVLIALLPWLDRGEVKSVRYRGPIFKTALVLFIISFIGLGILGAMVATDTRTLVARILSFVYFAFFLGMPFYTKLDTNKPVPERVTMSTTKQKIMFFVYVGITVVGAYLFATNI

SEQ ID NO: 34623 - protein, 540 aa, Neisseria meningitidis; identical to SEQ ID NO: 19189

SEQ ID NO: 34624 - protein, 119 aa, Neisseria meningitidis; identical to SEQ ID NO: 19477

SEQ ID NO: 34625 - protein, 1862 aa, Neisseria meningitidis
MNKGLHRIIFSKKHSTMVAVAETANSQGKGKQAGSSVSVSLKTSGDLCGKLKTTLKTLVCSLVSLSMVLPAHAQITTDKSAPKNQQVVILKTNTGAPLVNIQTPNGRGLSHNRYTQFDVDNKGAVLNNDRNNNPFLVKGSAQLILNEVRGTASKLNGIVTVGGQKADVIIANPNGITVNGGGFKNVGRGILTIGAPQIGKDGALTGFDVRQGTLTVGAAGWNDKGGADYTGVLARAVALQGKLQGKNLAVSTGPQKVDYASGEISAGTAAGTKPTIALDTAALGGMYADSITLIANEKGVGVKNAGTLEAAKQLIVTSSGRIENSGRIATTADGTEASPTYLSIETTEKGAAGTFISNGGRIESKGLLVIETGEDISLRNGAVVQNNGSRPATTVLNAGHNLVIESKTNVNNAKGSANLSAGGRTTINDATIQAGSSVYSSTKGDTELGENTRIIAENVTVLSNGSIGSAAVIEAKDTAHIESGKPLSLETSTVASNIRLNNGNIKGGKQLALLADDNITAKTTNLNTPGNLYVHTGKDLNLNVDKDLSAASIHLKSDNAAHITGTSKTLTASKDMGVEAGLLNVTNTNLRTNSGNLHIQAAKGNIQLRNTKLNAAKALETTALQGNIVSDGLHAVSADGHVSLLANGNADFTGHNTLTAKADVNAGSVGKGRLKADNTNITSSSGDITLVAGNGIQLGDGKQRNSINGKHISIKNNGGNADLKNLNVHAKSGALNIHSDRALSIENTKLESTHNTHLNAQHERVTLNQVDAYAHRHLSITGSQIWQNDKLPSANKLVANGVLALNARYSQIADNTTLRAGAINLTAGTALVKRGNINWSTVSTKTLEDNAELKPLAGRLNIEAGSGTLTIEPANRISAHTDLSIKTGGKLLLSAKGGNAGAPSAQVSSLEAKGNIRLVTGETDLRGSKITAGKNLVVATTKGKLNIEAVNNSFSNYFPTQKAAELNQKSKELEQQIAQLKKSSPKSKLIPTLQEERDRLAFYIQAINKEVKGKKPKGKEYLQAKLSAQNIDLISAQGIEISGSDITASKKLNLHAAGVLPKAADSEAAAILIDGITDQYEIGKPTYKSHYDKAALNKPSRLTGRTGVSIHAAAALDDARIIIGASEIKAPSGSIDIKAHSDIVLEAGQNDAYTFLKTKGKSGKIIRKTKFTSTRDHLIMPAPVELTANGITLQAGGNIEANTTRFNAPAGKVTLVAGEELQLLAEEGIHKHELDVQKSRRFIGIKVGKSNYSKNELNETKLPVRVVAQTAATRSGWDTVLEGTEFKTTLAGADIQAGVGEKARVDAKIILKGIVNRIQSEEKLETNSTVWQKQAGRGSTIETLKLPSFESPTPPKLSAPGGYIVDIPKGNLKTEIEKLSKQPEYAYLKQLQVAKNINWNQVQLAYDRWDYKQEGLTEAGAAIIALAVTVVTSGAGTGAVLGLNGAAAAATDAAFASLASQASVSFINNKGDVGKTLKELGRSSTVKNLVVAAATAGVADKIGASALNNVSDKQWINNLTVNLANAGSAALINTAVNGGSLKDNLEANILAALVNTAHGEAASKIKQLDQHYIVHKIAHAIAGCAAAAANKGKCQDGAIGAVVGEIVGEALVKNTDFSGMTASEIEKAKANITAYAKLVAGATVGVTGGNVDVAANASETAVKNNALDIIWDIGNLVWDGGKWIYAKSIGDKQMAREAAIDFGVDAAAAAVPFVPAGATKISRGGAYVLKAGDEAVDTAKAIQEIQKQTGIKLTYDKVNKVWTTPAGLDYGLDAKHGNRIKHVLAHTIPNPNKPVHSVFNVSRKEVLPLVDEAWRMKGNPLPNDSSVYLVDMKKPIGTKGETKVRIVVQKGTNKIISAYPQK

SEQ ID NO: 34626 - protein, 716 aa, Neisseria meningitidis; identical to SEQ ID NO: 2647

SEQ ID NO: 34627 - protein, 100 aa, Neisseria meningitidis; identical to SEQ ID NO: 18276

SEQ ID NO: 34628 - protein, 201 aa, Neisseria meningitidis; identical to SEQ ID NO: 24910

SEQ ID NO: 34629 - protein, 229 aa, Neisseria meningitidis; identical to SEQ ID NO: 524

SEQ ID NO: 34630 - protein, 275 aa, Neisseria meningitidis; identical to SEQ ID NO: 22228

SEQ ID NO: 34631 - protein, 209 aa, Neisseria meningitidis
LVRTADGYKAIAHIQAGDRVLSKDEASGKTEYKPVTARYGNPYQETVYIEVSDGIGNSQTLISNRIHPFYSDGKWVKAEDLKAGSRLLSENGRTQTVRNIVVKPKPLKAYNLTVADWHTYFVKGSQAETEGVWVHNACPPKRTGSSKNEKHGDGGRSQISAESRIAELKNKIIPGMSKNERLKIERTIRNITKNANRKAKGEEHGRRGR

SEQ ID NO: 34632 - protein, 201 aa, Neisseria meningitidis; identical to SEQ ID NO: 2357

SEQ ID NO: 34633 - protein, 389 aa, Neisseria meningitidis; identical to SEQ ID NO: 19109

SEQ ID NO: 34634 - protein, 398 aa, Neisseria meningitidis
  misc_feature 2, 3, 4: 'Xaa' is any amino acid
VXXXKHAPFWGVVAQILILDAVFSIDSVITAVAMVDHIVVAMGAVVVAMAVMISASKLLTEFVDRHPTVVMLCLGFLLMIGFSLIAEAFHFHIPKGYLYAAIGFSILIELFNQISQRNSRKNDYIGSSWRKRTAENVLGMMGIRESVLADAGGESGDDAHFEENEKSMIRSVLTLAERPIMGVMIPRRDIERLDISQSREEQYAQLQNTPYSRLLVVGKAGVDEPLGYINKKDLLSQLLETGGLDIQTALRQPLVLPDGTTALGALELFRQSSADYALVVDEFGAVLGMVTMKDLLEAIAGDFPEEFEREEEPAVQGNPDESLTVEGALEYVELASQLNLPQQEEDADFHTVAGLIMEELQTIPDVGDFADFHGWRFEVVEKEGQRIERVKITKLPEE

SEQ ID NO: 34635 - protein, 242 aa, Neisseria meningitidis
MLLGVNIDHIATVRNARGTTYPSPVEAALVAETHGADLITMHLREDRRHIKDADVFAVKNAIRTRLNLEMALTEEMLENALKVMPEDVCIVPEKRQEITTEGGLDVLAQQEKIAEFTKILTDAGIRVSLFIDADDRQIQAAYDVGAPVVELHTGAYADARSHAEQIRQFERIQNGAHFAGDLGLVVNAGHGLTIHNVTPIAQILAIRELNIGHSLIAQALFLGLPEAVRQMKEAMFRARLLP

SEQ ID NO: 34636 - protein, 449 aa, Neisseria meningitidis
MLNPSRKLVELVRILDEGGFIFSGDPVQATEALRRVDGSTEEKIIRRAEMIDRNRMLRETLERVRAGSFWLWVAAATFSFFTGFSGTYLLMDNQGLNFFLVLAGVLGMNTLMLAVWLAMLFLRVKVGRFFSSPATWFRGKDPVNQAVLRLYADEWRQPSVRWKIGATSHSLWLCTLLGMLVSVLLLLLVRQYTFNWESTLLGDSSSVRLVEMLAWLPAKLGFPVPDARAVIEGRLNGNIADARAWSGLLVGSIACYGILPRFLAWAVCKILLKTSKNGLDLEKPYYQAVIRRWQNKITDADTRRETVSAVSPKIVLNDAPKWAVMLETEWQDGEWFEGRLAQEWLDKGVATNREQVAALETELKQKPAQLLIGVRAQTVPDRGVLRQIVRLSEAAQGGAVVQLLAEQGLSDDLSEKLEHWRNALAECGAAWLEPDRAAQEGRLKTNDRT

SEQ ID NO: 34637 - protein, 217 aa, Neisseria meningitidis
MKITHCKLKKKVQKELLRFFVLEVTARSAADILGIHPNSAALFYRKIRTVINHHLALAADEVFEGPVEPDESDFGGRRKGRRGRGAAGKVVVFGILKRNGRVYTVVVNNAKSETLLPVIKKKIMPDSIVYTDSLSSCDKLDVSGFIHYRINHSKECADRQNHINGIENFWNQAKRVLRKYNGIDRKSFPLFLKECEFRFNFGTPSQQLKILRDWCGI

SEQ ID NO: 34638 - protein, 385 aa, Neisseria meningitidis; identical to SEQ ID NO: 6747

SEQ ID NO: 34639 - protein, 297 aa, Neisseria meningitidis
MIIVMSRRAAEADIAGVVAFIRSRGLREHISHGDERTVIGAIGDDRVLSVREVQTLPEVEKAVRILDTWKTVSRENRAEDSRVAAKGVAFGGGETVRIAAEPSVWRNADAVFLDPFFTSANLYDTSSADEGRGRCRRLAEQTASAHDAGKPVLVRVRNVRHVEAALNAGADILYLGGGLMSDLAVLNEAGSLNIPLVLCKDKHHSAEDWLNAAEYVVSRGNRHLILGESGVLSHTKDHPYRLDVESIVKVRQISHLPVIANITGLWNRDMPQEILYGLAKAAGACGIVGTCFEKSGG

SEQ ID NO: 34640 - protein, 544 aa, Neisseria meningitidis; identical to SEQ ID NO: 13226

SEQ ID NO: 34641 - protein, 273 aa, Neisseria meningitidis; identical to SEQ ID NO: 15866

SEQ ID NO: 34642 - protein, 74 aa, Neisseria meningitidis; identical to SEQ ID NO: 801

SEQ ID NO: 34643 - protein, 215 aa, Neisseria meningitidis; identical to SEQ ID NO: 4487

SEQ ID NO: 34644 - protein, 459 aa, Neisseria meningitidis
MFAFKSLLDMPRGEALAVVVALIAAMGYTIISLEWLPHMSIIAAIVVLILYGLVRGLKYNDMQQGMIGALNQGMGAIYLFFFIGLMVSALMMSGAIPTLMYYGFGLISPTYFYFSAFALCSVIGVSIGSSLTTCATVGVAFMGMAAAFHADMAMTAGAIVSGAFFGDKMSPLSDTTGISASIVGIDLFEHIKNMMYTTIPAWLISAALMLWLLPNVAAQDLNGVESFRSQLEATGLVHGYSLIPFALLVVLALMRVNAVVAMLFTVIAAVAVTYLHSTPDLRQLGAWFYGGYKLEGEAFKDVAKLISRGGLESMFFTQTIVILGMSLGGLLFALGAIPSLLDAVRSFLTNAGRATFSVAMTSVGVNFLIGEQYLSILLSGETFKPVYDRLGLHSRNLSRTLEDAGTVINPLVPWSVCGVFISHALGVPVWEYLPYAFFCYLSLALTLLFGWTGLTLSKK

SEQ ID NO: 34645 - protein, 593 aa, Neisseria meningitidis
MPYFALFDDAVSGRAKRYQNHVESRFFRPEELDALDGALQSGWQKGLHAVLFADYGFGLPLTGVESERGGNLALHWFADCADTDAASWLARHSDGLPAGISTPQSSVSEADYLDHIRQIHEAIRRGDTYQINYTTRLHLQAYGNPVKLYQRLRQPVPYAVLSHLPDAQGQSAWTLCFSPELFLKIGSDGTISTEPMKGTAPILGDGQDERRAAELQADPKNRAENVMIVDLLRNDLGKIAQTGTVCVPEPFKVSRFGSVWQMTSTIQAQALPHTSFADILRAAFPCGSITGAPKKMSMQIIESLEAEPRGLYTGSIGYLNPSSGGLGFEGAFNVVIRTLSLTPLSDGIYQGVYGVGSGIVIDSDPAAEYRECGWKARFLNELRPDFGIFETLRVENRQCALLDRHLCRLKTSAQALNLPLPDGCENQIKQYIAHLPDGVFRVKARLASDGISLSRAVLNRLTDKQRVIISPAVLPAQNYLRRFKTTHRALFDQAWQTAETQGAFDSLFFNSDGILLEGGRSNVFVKHRGQWLTPSLDLDILNGIMRQAVLDEPQKYLQTNQVIETHITQKTLQEAEEIRLSNALRGVFAAALA

SEQ ID NO: 34646 - protein, 590 aa, Neisseria meningitidis; identical to SEQ ID NO: 14343

SEQ ID NO: 34647 - protein, 502 aa, Neisseria meningitidis
MQTDCDVLIAGNGLAALTLALSLPESFRIVILCKNRLDDTASRHAQGGIAAAWSGEDDIEKHVADTLEAGAGLCDEAAVRTILSQGKPAIEWLLAQGVAFDRNHNDLHLTREGGHTCRRIAHVADYTGEAVMQNLIAQIHRRPNIRVCERQMALDIQTESSAACGLTVLNCRTQETYRIRARHTVLAGGGLGQIYAATTTPPECTGDAIAMAIRAGCTVENLEFIQFHPTGLARPSENGRTFLISEAVRGEGGILSNQAGERFMPHYDRRAELAPRDIVARAIAAEIAKQTQDFVSLDISRQPAEFVRQHFPSIHRYCLSQCGLDITRQAIPVRPVQHYTCGGIQTDPSGRTSLPQLYALGETACTGLHGANRLASNSLLECVVTARLAAQTIADGQAFQAVPPQRPSESLSSEAGIFSDGIQSAFSRPVLQAFNQRHLGILRNDTGLRRAIAQLQLWKQNQTEPHTASEYENRNLLECSLAVAQAAYARRQNIGAHFNSDC

SEQ ID NO: 34648 - protein, 318 aa, Neisseria meningitidis; identical to SEQ ID NO: 12498

SEQ ID NO: 34649 - protein, 320 aa, Neisseria meningitidis; identical to SEQ ID NO: 18996

SEQ ID NO: 34650 - protein, 389 aa, Neisseria meningitidis; identical to SEQ ID NO: 3056

SEQ ID NO: 34651 - protein, 228 aa, Neisseria meningitidis
METFKDRLVFLWKSEAKQAKIASDIEMTIAGFSRIWNEGGLPKSETLKKIKQLKGCSIDWLLTGEGNPFPDEAPKKSLAYDTLGNEVDTDEFVFVPRYDIRAAAGYGQFVDHEEPVFTMAFRRHWIENYITRDTKNLSVISVKGDSMEGVLNDGDSILVNHGENTPRDGLYVLRINENLLVKRLQIVPGGIINVISANEAYPAFEINLNDLTDDVEIIGRVEWFGRTI

SEQ ID NO: 34652 - protein, 430 aa, Neisseria meningitidis; identical to SEQ ID NO: 10398

SEQ ID NO: 34653 - protein, 291 aa, Neisseria meningitidis
MSNEVEVMDAVSVQNYQVAHSVMVMEQWGNGEVYNEATWIERGRLAVRQTMEGMFELGRALIVLKEHTEHGRFMEIVKGQFGIGHNETARLMSATQRFATPQMQKAAPKLMDLGKSKLLELLVEEDVTLVGLAEGEEVNGMTFDDVDRMTVRELRVALRESRENLAAKDEVMKTKTAKIDELAEKLAKKQTVVREPKAEDVGSELAMQLTSLEVGIRSQVSRLKDLFDQLNAHSEAHGISHQAKMVGTLNQIILDCEQLRESYALPTEAPTDNVPEWLGGETGEGDESGND

SEQ ID NO: 34654 - protein, 929 aa, Neisseria meningitidis
MTDYSKTVNLLESPFPMRGNLAKREPAWLKSWYEQKRYQKLREIAKGRPKFILHDGPPYANGDIHIGHAVNKILKDIIIRSKTQAGFDAPYVPGWDCHGLPIEVMVEKLHGKDMPKARFRELCREYAAEQVARQKKDFIRLGVLGDWDHPYLTMDFKTEADTVRMLGEIYKSGYLYRGAKPVQFCLDCGSSLAEAEVEYKDKVSPAIDVGYPFKDTAALATAFGLAGIEGKAFAVIWTTTPWTLPASQAVSAGADVVYQLIDTPTGKLVLAKDLAEDALKRYGFSDGIAILAETTGDKLENLHMNHPFLERDIPMLNGEHVTTDAGTGLVHTAPAHGLEDYAVCNKYGIELYNPVNAEGKYISETPRVAGMRVWEANPVILQWLEETGNLLASSKIEHSYAHCWRHKTPLIYRATGQWFVGMDKAGADGKTLRDKAIKAVDDTEFFPSWGRARLEAMIEGRPDWVVSRQRYWGTPMTFFVHKETGELHPNSAELLEKVAQRIEEKGIEAWFSLDKSELLSAEDCEHYDKLPDTMDVWFDSGSTHYSVVKQREELEWPADLYLEGSDQHRGWFQSSMLTGCASSMGRAPYKQLLTHGFVVDGEGKKMSKSIGNVVAPQEVYNEFGADILRLWAASTDYSGELAISKEILKRVTESYRRIRNTLSFLFANLSDFNPIEDAVQQADMVEIDRYALVLARRLQERLAGDYYPRYAFHFAVKDIVSFCSEDLGAFYLDILKDRLYTTKADSRARRSAQTALYHITRSLVLLIAPILCFTGEEAWDIIGGGEEDSVLFHTWHEFPTINEKTEAELVKKWTAIREAREAVTAAIEPLRADKTVGSSLQAEAEITAPEEMAGYLNALGEELRFAMLVSKAEVKVGSELAVAAKASDGEKCERCWHYTRDVGAVAGYETVCKRCAENVGGEGETRHYA

SEQ ID NO: 34655 - protein, 139 aa, Neisseria meningitidis
  misc_feature 134, 135: 'Xaa' is any amino acid
VDSGGRIEALIERVLDNHTALAHIRSSKSPKPGMGLVFEGGIRAVMVGREGELFCLRFEGGQTVYELLEQNGHLPLPPYIERAADADDDSRYQTVYAKYQGAVAAPTAGLHFTEELLRRLKDKRAVTAEVTLHXXHTLN

SEQ ID NO: 34656 - protein, 245 aa, Neisseria meningitidis
  misc_feature 3, 4: 'Xaa' is any amino acid
VCXXLPSSLPDDEVVLFAQQKRRAQTGGDFMQHHLHQVVAISCCMRWGQDKVHVGTIGEMDDGEEVVIAKFFELIEKHTPQLVSWNGGGFDLPVLHYRSLLHGINAARYWDMGDGDFGDSRDFKWNNYISRYHQRHCDLMDLLALYQPRANVPLDDMAKLCGFPGKLGMDGSKVWDAFHAGRLKEIRNYCETDAVNTYLMYLRFCLVSGRFDADEYEMEIKRIRNYLSAQTEDKPHWAEFVQAWK

SEQ ID NO: 34657 - protein, 671 aa, Neisseria meningitidis; identical to SEQ ID NO: 19479

SEQ ID NO: 34658 - protein, 259 aa, Neisseria meningitidis; identical to SEQ ID NO: 24414

SEQ ID NO: 34659 - protein, 251 aa, Neisseria meningitidis; identical to SEQ ID NO: 4289

SEQ ID NO: 34660 - protein, 337 aa, Neisseria meningitidis; identical to SEQ ID NO: 1101

SEQ ID NO: 34661 - protein, 49 aa, Neisseria meningitidis; identical to SEQ ID NO: 5144

SEQ ID NO: 34662 - protein, 263 aa, Neisseria meningitidis; identical to SEQ ID NO: 18955

SEQ ID NO: 34663 - protein, 96 aa, Neisseria meningitidis; identical to SEQ ID NO: 6081

SEQ ID NO: 34664 - protein, 99 aa, Neisseria meningitidis; identical to SEQ ID NO: 3406

SEQ ID NO: 34665 - protein, 159 aa, Neisseria meningitidis
MANLVKTFLLGELVKGLGVTLKNFFARKDTIYFPEEKTPQSVRFRGLHAQRRYPNGEERCIACKLCEAVCPAMAINIESEEREDGTRRTKRYDIDLTKCIFCGFCEEACPTDAIVETHIFEYHGEKKGDLHMTKPILLAIGDKYEAEIAKRKAADAPYR

SEQ ID NO: 34666 - protein, 165 aa, Neisseria meningitidis; identical to SEQ ID NO: 19240

SEQ ID NO: 34667 - protein, 601 aa, Neisseria meningitidis
MLKAYSAAETKEAQLALLDNLIHKWAETDSNWGKKSPMRLSTDWTQTANEGIALTPSQVAQLKKNALVSLSDKAKATIDAARDRIAVLDAYTGQDSNTLYYMSEEDALNIVKVTNDTYDHLAKNIYQNLLFQTRLQPYLNQISFKMENDTFTLDFSGLVQAFNHVKETNPQKAFVDLAEMLAYGELRSWYEGRRLMADYVEEAKKAGKFEDYQKVLGQETVALLAKTSGTQADDILQNVGFGHNKNVSLYGNDGNDTLIGGAGNDYLEGGSGSDTYVFGKGFGQDTVYNYDYATGRKDIIRFTDGITADMLTFTREGNHLLIKAKDGSGQVTVQSYFQNDGSGAYRIDEIHFDNGKVLDVATVKKLVQQSTDGSDRLYAYQSGSTLNGGLGDDYLYGADGNDLLNGDAGNDSIYSGNGNDTLNGGEGNDALYGYNGNDALNGGEGNDHLNGEDGNDTLIGGAGNDYLEGGSGSDTYVFGEGFGQDTVYNYHVDKNSDTMHFKGFKAADVHFIRSGSDLVLSASEQDNVRISGFFYGENHRVDTFVFDDAAISNPDFAKYINAGNNLVQSMSVFGSNTAATGGNVDANTQSVQQPLLVTPSA

SEQ ID NO: 34668 - protein, 392 aa, Neisseria meningitidis; identical to SEQ ID NO: 18830

SEQ ID NO: 34669 - protein, 377 aa, Neisseria meningitidis; identical to SEQ ID NO: 2272

SEQ ID NO: 34670 - protein, 208 aa, Neisseria meningitidis
  misc_feature 2, 3: 'Xaa' is any amino acid
VXXGVFLLAVLPVLLAITVREVARGYTARYWGDNTAEQYGRLTLNPLPHIDLVGTIIVPLLTLMFTPFLFGWARPIPIDSRNFRNPRLAWRCVAASGPLSNLAMAVLWGVVLVLTPYVGGAYQMPLAQMANYGILINAILFALNIIPILPWDGGIFIDTFLSAKYSQAFRKIEPYGTWIILLLMLTGVLGAFIAPIVRLVIAFVQMFV

SEQ ID NO: 34671 - protein, 103 aa, Neisseria meningitidis; identical to SEQ ID NO: 2548

SEQ ID NO: 34672 - protein, 92 aa, Neisseria meningitidis
LGRKQPKTCVWVSAVGRERNFAKVSSYAGCCRPLHLRQILPPTAEALMRSRYSAYVLHLIDYSGLTKTSTALPRLAVLSVLSAASSPCPDFC

SEQ ID NO: 34673 - protein, 331 aa, Neisseria meningitidis; identical to SEQ ID NO: 6104

SEQ ID NO: 34674 - protein, 163 aa, Neisseria meningitidis
MKYRRCYRNGGTYFFTVVTDKRQKILTDDAVRLALRQAVMAVRERYPFEILAWVLMPDHLHTIWRLPDNDSAYSERWRQIKRHSQYLIGGNLRLWQKRFWEYTIRDEADFAWHFDYLHFNPVKHGYVGQISDWGFSTFHRYVKQGIYPHNWGGGNADFSIGYD

SEQ ID NO: 34675 - protein, 114 aa, Neisseria meningitidis; identical to SEQ ID NO: 3430

SEQ ID NO: 34676 - protein, 78 aa, Neisseria meningitidis; identical to SEQ ID NO: 1246

SEQ ID NO: 34677 - protein, 76 aa, Neisseria meningitidis
  misc_feature 72, 73, 74: 'Xaa' is any amino acid
MGLQKACLTVLCLIVFCFGIFYTFDRVNQGERNAVSLLKDKLFNEEGEPVNLIFCYTILQMKVAERIMAQHXXXHT

SEQ ID NO: 34678 - protein, 159 aa, Neisseria meningitidis; identical to SEQ ID NO: 19574

SEQ ID NO: 34679 - protein, 209 aa, Neisseria meningitidis; identical to SEQ ID NO: 18730

SEQ ID NO: 34680 - protein, 223 aa, Neisseria meningitidis; identical to SEQ ID NO: 2385

SEQ ID NO: 34681 - protein, 464 aa, Neisseria meningitidis
  misc_feature 458, 459: 'Xaa' is any amino acid
MKHIHIIGIGGTFMGGIAAIAKEAGFEVSGCDAKMYPPMSTQLEALGIGVHEGFDAAQLEEFKADVYVIGNVAKRGMDVVEAILNRGLPYISGPQWLAENVLHHHWVLGVAGTHGKTTTASMLAWVLEYAGLAPGFLIGGVPENFSVSARLPQTPRQDPNSQSPFFVIEADEYDTAFFDKRSKFVHYRPRTAVLNNLEFDHADIFADLGAIQTQFHHLVRTVPSEGLIVCNGRQQSLQDTLDKGCWTPVEKFGTEHGWQAGEANADGSFDVLLDGKKAGHVAWSLMGGHNRMNALAVIAAARHAGVDIQTACEALSTFKNVKRRMEIKGTVNGITVYDDFAHHPTAIETTIEGLRQRVGNARILAVLEPRSNTMKLGTMKSALPVSLKEANQVFCYAGGVDWDVAEALAPLGGRLNVGKDFDAFVAEIVKNARTGDHILVMSNGGFGGIHTKLLDALXXTHLIN

SEQ ID NO: 34682 - protein, 190 aa, Neisseria meningitidis
MTYETQASVREAQGTGASRRLRREGQIPGILYGEGQEPVAIAVDHKTVFYALEKESFHTALIKLSLNGETKDVIVRDFQMHPFRREVQHIDFQAVKADQLVRIRVPLHIVNAENSQAVKLQGGRVSLLNTTVEVLALPANIPAFLDLDCAEVVAGDILHLSDIKLPEGVESVSLKRNENLAVATVTGKKR

SEQ ID NO: 34683 - protein, 379 aa, Neisseria meningitidis
MKKTLMAAAILSLALTACGGGSDTAAQAPSAKPEAEQSGKLNIYNWSDYVDPETVAAFEKETGIKTRSDYYDSNETLEAKVLTGKSGYDLTAPSIANVGRQIKAGAYQKIDKAQIPHYGNIDKDLLKMMEAVDPGNEYAVPYFWGINTLAINTRQVQKALGTDKLPENEWDLVFKPEYTAKLKSCGISYFDSAIEQIPLALHYLGKDPNSENPEDIKAAVDMMKAVRGDVKRFSSSGYIDDMAAGNLCAAIGYGGDLNIAKTRAEEAANGVEIKVLTPKTGVGVWVDSFMIPRDAQNVANAHRYIDYTLRPEVAAKNGSFVTYAPASRPARELMDEKYTSDASIFPNKELMEKSFIVSPKSAESVKLGVKLWQGLKAGK

SEQ ID NO: 34684 - protein, 219 aa, Neisseria meningitidis; identical to SEQ ID NO: 8069

SEQ ID NO: 34685 - protein, 109 aa, Neisseria meningitidis; identical to SEQ ID NO: 3636

SEQ ID NO: 34686 - protein, 131 aa, Neisseria meningitidis; identical to SEQ ID NO: 3391

SEQ ID NO: 34687 - protein, 658 aa, Neisseria meningitidis
MHPIETPDKTFHDGDGVSELGTILPAWWLNQVQSELLAVLTAAGIQPDKSQPNQLLAALNRLAVVTTGDQTITGQKTFTAQTQFQSGIHLSANQTNWNGGHKAYIGADADNAHIVFGDDTLRLHSANNRISYNNHDIFHKANKPRFAEDIEGKPNTLSGYGIGNFKVETFRGDLNTLKTDGIYSLPTAVGSSNLPVENTACHIQVIAGTKHGWCRQLGYPAYTSDVYERHQTSSANDNWSAWKKLNSDGIPVGAIVSFPKAVQNPAGYLKANGTTFAQNTFPDLYRALGNSNRLPDLSRTDIGITAWFPSDQIPTGWLAFDDIRTRVTETAYPELYRLLTGKYGSIQNVPQAEDRFIRNAGNGLAVGTKQEDEIKRHVHKVFSHWTNHTDAAAVGYEDHNERQRSALVSTWTDGDLNDNGFLTPRLDSKMATGGAENRPKALVLKLCIKAADTLGEAVFWIKSHGETINAGALDAGTLAQNLQDKADRAHTHTAAQIQGLDEKISTAVAAQFTRQTIGGVDIVRFPDGTMIQTGSYRFTRSGGPIENEVVFPVAFADGNVKCFVSERHSGRVTGDRRQHNWLFIRAKNHAAAIITNWYEGSCDWMAIGKAASGNAASSPIGPEIPETNEEPQRESGRTSTGPRNRRRHRDGLLEALQD

SEQ ID NO: 34688 - protein, 100 aa, Neisseria meningitidis; identical to SEQ ID NO: 1023

SEQ ID NO: 34689 - protein, 89 aa, Neisseria meningitidis
MPSETFPFQTAWFYSNLNRADRSQKHTFAIPAQALPLYAPNPKPPHSRRHYPSDSRTKPRIRLHGSGHISNTGIVFRKTVKSASASQYI

SEQ ID NO: 34690 - protein, 365 aa, Neisseria meningitidis; identical to SEQ ID NO: 11

SEQ ID NO: 34691 - protein, 72 aa, Neisseria meningitidis; identical to SEQ ID NO: 292

SEQ ID NO: 34692 - protein, 463 aa, Neisseria meningitidis; identical to SEQ ID NO: 2284

SEQ ID NO: 34693 - protein, 284 aa, Neisseria meningitidis; identical to SEQ ID NO: 1842

SEQ ID NO: 34694 - protein, 203 aa, Neisseria meningitidis; identical to SEQ ID NO: 3558

SEQ ID NO: 34695 - protein, 436 aa, Neisseria meningitidis; identical to SEQ ID NO: 6841

SEQ ID NO: 34696 - protein, 1069 aa, Neisseria meningitidis
MFYLYQSNRLETLAALFARIQKVKPLKSVLQPEQIIVQSQGMRRYLNTCLARDLGVAANLSFSLPAGLTWKLMKKLIPGIPELSPFAPEVMRWRLLDLFRSEAFRNTAEFEDVRNVLQDYLGSGESADYQLAGQLADIFDQYLVYRPQWIDAWQQGRILSLGDDEIWQSKLWRYLDDGRQSAPHRVALWEKLLESLSSDKLPERYFVFGISTMAPMYLQLLHKLSEHCDVFVFALNPSGMYWGNVIEAAQILKGGGDPDLTQAGHPLLASLGKQGRDFFDFLNEMEIEGETPVFEEGGRDTLLHALQTDIQNLKMPSENVGSVGTDDGSIRIVSAHSPLRELQILKDKLLKILHEHPDWQPHDIAVLTPNIESYTPFIEAVFGQAQPGAQALPYSVSDVKISRRQPFFYTLECLSDLLESRFEVDKVLVLLETAPVLRRFGLTEDDLPLLHDMVADLNVRWGLDGEMRGGTDQLFTWKQAVERMILGWMLPEGGNPMWQDVSAWYADVNQTALFGRFAALLETLSDIVRIWQQPATVGEWVARCRDLLETLFQTEADDQKAVQNLENEWVKWQAETELAQFSGQLPPHTVIRHIRRFLDSESEAGFLRGGITFCSMVPMRSLPFKVICLLGLNDGDFPRNTKAAVFDLIAKHPAKGDRARRDDDRYLFLEALISAREILYLSYIGRDIRKDEELAPSSLLGELIDTVAAMAGIGSRQLAQNWIEQHPLQAFSRRYFQEGGRSDGIFGTRTDYATALGQTPEPPQPFFDQPVENAEPVAEIGQDEFIRFWRNPVKVWLQQQLAWSEPHIGEAWEPAEPFEPQHADQIAEIYIEARREGQDFSQTAARIRAESLLPSGELGRLWQQDFQTAAKQIDTAVLNSPKLPPLPYAIPSDGQILKGSLGNLYRCGQVFYAYGKPNAPQRIAFLLEHLIFCAVMPSEAEMRQTFIVQSGETEILAEIAQDRALQLLSEWMAFFNIGQNRPLPFFAKTSLAAAEAFAQKQDWEAALKKAQTAYHGNKVSKGQKDYTEVALVFGNASQNPLEQPLFENLVRLLADTFAAAEKKEEAGAA

SEQ ID NO: 34697 - protein, 105 aa, Neisseria meningitidis; identical to SEQ ID NO: 18770

SEQ ID NO: 34698 - protein, 92 aa, Neisseria meningitidis; identical to SEQ ID NO: 19825

SEQ ID NO: 34699 - protein, 153 aa, Neisseria meningitidis; identical to SEQ ID NO: 7513

SEQ ID NO: 34700 - protein, 210 aa, Neisseria meningitidis; identical to SEQ ID NO: 3262

SEQ ID NO: 34701 - protein, 71 aa, Neisseria meningitidis; identical to SEQ ID NO: 6296

SEQ ID NO: 34702 - protein, 283 aa, Neisseria meningitidis; identical to SEQ ID NO: 19031

SEQ ID NO: 34703 - protein, 182 aa, Neisseria meningitidis
  misc_feature 177, 178: 'Xaa' is any amino acid
MSTFFQQTAQAMIAKHIDRFPLLKLDQVIDWQPIEQYLNRQKTRYLRDHRGRPAYPLLSMFKAVLLGQWHSLSDPELEHSLITRIDFNLFCRFDELSIPDYSTLCRYRNWLAQDDTLSELLKLINRQLTEKGLKVEKASAAVIDATIIQTAGSKQRQAIEVDEEGQISGQTTPSKDXXHTLN

SEQ ID NO: 34704 - protein, 121 aa, Neisseria meningitidis; identical to SEQ ID NO: 4117

SEQ ID NO: 34705 - protein, 278 aa, Neisseria meningitidis; identical to SEQ ID NO: 13945

SEQ ID NO: 34706 - protein, 206 aa, Neisseria meningitidis; identical to SEQ ID NO: 12065

SEQ ID NO: 34707 - protein, 167 aa, Neisseria meningitidis; identical to SEQ ID NO: 25469

SEQ ID NO: 34708 - protein, 65 aa, Neisseria meningitidis; identical to SEQ ID NO: 9839

SEQ ID NO: 34709 - protein, 384 aa, Neisseria meningitidis; identical to SEQ ID NO: 3177

SEQ ID NO: 34710 - protein, 320 aa, Neisseria meningitidis; identical to SEQ ID NO: 1339

SEQ ID NO: 34711 - protein, 65 aa, Neisseria meningitidis; identical to SEQ ID NO: 981

SEQ ID NO: 34712 - protein, 273 aa, Neisseria meningitidis; identical to SEQ ID NO: 15186

SEQ ID NO: 34713 - protein, 64 aa, Neisseria meningitidis
LESHDLAEGYTYFFNENTDDCYVLKEDFINNERYEKTELYPQKDKVILFPKFGEYDLVLNPDII

SEQ ID NO: 34714 - protein, 506 aa, Neisseria meningitidis; identical to SEQ ID NO: 32510

SEQ ID NO: 34715 - protein, 366 aa, Neisseria meningitidis
METQLYIGIMSGTSMDGADAVLIRMDGGKWLGAEGHAFTPYPDRLRRQLLDLQDTGADELHRSRILSQELSRLYAQTAAELLCSQNLAPSDITALGCHGQTVRHAPEHGYSIQLADLPLLAERTRIFTVGDFRSRDLAAGGQGAPLVPAFHEALFRDNRETRAVLNIGGIANISVLPPDAPAFGFDTGPGNMLMDAWTQAHWQLPYDKNGEKAAQGNILPQLLDRLLAHPYFARPHPKSTGRELFALNWLETYLDGGENRYDVLRTLSRFTAQTVFDAVSHAAADARQMYICGGGIRNPVLMADLADCFGTRVSLHSTADLNLDPQWVEAAAFAWLAACWINRIPGSPHKATGASKPCILGAGYYY

SEQ ID NO: 34716 - protein, 172 aa, Neisseria meningitidis; identical to SEQ ID NO: 14215

SEQ ID NO: 34717 - protein, 269 aa, Neisseria meningitidis
MIQDTRPLIRVVAGILLDSDGNYLLSSRPEGKPYAGYWEFAGGKVEAGETDFQALQREFEEELGIRILAATPWLTKIHSYEHARVCLKFLWVNPGQWTGEPQSREGQEWSWQKAGDFTVAPMLPANGALLRSLSVPRRLYGSLKTGLHGENSMGAYRVLPLGSAEGSGANVLMEAAQWQDRPEHADSVWMVVQTREQWRQAQEKGADAVVWRVCDDVQAQEAAEALRQGVSVPLVLAANGQTVARYGKLWLGLGAHVVVRDETIGKNHE

SEQ ID NO: 34718 - protein, 248 aa, Neisseria meningitidis; identical to SEQ ID NO: 4029

SEQ ID NO: 34719 - protein, 245 aa, Neisseria meningitidis
MKKLSRIVFSTVLLGFSAALPAQTYSVYFNQNGKLTATMSSAAYIRQYSVAEGIAHAQDFYYPSMKKYSEPYIVASTQIKSFVPTLQNGMLILWHFNGQKKMAGGFSKGKPDGEWVNWYPNGKKSAVMPYKNGLSEGTGYRYYRNGGKESEIQFKQNKANGVWKQWYADGSIKTEMVMVNDEPAKILTWDESGRLLSELSIRHHQRNGVVLEWYEDGSKKSEAVYQDDKLVRKTQWDKDGYLIEP

SEQ ID NO: 34720 - protein, 1071 aa, Neisseria meningitidis; identical to SEQ ID NO: 19134

SEQ ID NO: 34721 - protein, 89 aa, Neisseria meningitidis; identical to SEQ ID NO: 494

SEQ ID NO: 34722 - protein, 691 aa, Neisseria meningitidis
MLCVLAGAAYGVFRTEAALSSQWWAEAVSGVPLTVEVADMPRSDGRRVQFAAKAVDSGGRTFDLLLSDYKRREWAVGSRWRITARVHPVVGELNLRGLNREAWALSNGIGGAGTVGADRVLLHDGSGWGIAVWRSRISRNWQQADADGGLSDGIGLMRALSVGEQSALRPELWQAFRPLGLTHLVSISGLHVTMVAVMFAWLAKRLLACSPRLPARPRVWVLAAGCAGALFYALLAGFSVPTQRSVLMLAAFAWAWRRGRLSAWATWWQALAAVLLFDPSAVLGVGTWLSFGLVAALIWACSGRLHEGKRQTALRGQWAASVLSLVLLGYLFASLPLISPLVNAVAIPWFSWVLTPLALLGSVVPFAPLQQLGAFLAEYTLRFLVWLADVSPEFAVASAPLPLLVLAVCAALLLLLPRGLGLRPWAVLLLAGFVFYRSPGVPENEVAVTVWDAGQGLSVSVQTANHHLLFDTGTAAAAQMGIVPSLNAAGVRRLDKLVLSHHDSDHDGGFQAVGKIPNGGIYAGQPEFYEGARHCAEQRWQWDGVDFEFLMPSERKNIDDNGKSCVLRVVAGGAALLVTGDLDTKGEESLVGKYGGNLYSQVLVLGHHGSNTSSSGVFLNAVSPEYAVASSGYANAYKHPTEAVQNRVRAHGIKLLRTDLSGALQFGLGRGGVKAQRLRGYKFYWQKKPFE

SEQ ID NO: 34723 - protein, 451 aa, Neisseria meningitidis; identical to SEQ ID NO: 6268

SEQ ID NO: 34724 - protein, 465 aa, Neisseria meningitidis
MTVRIEHDLLGDREIPAEVYWGIHTLRAIENFKISTQKISDVPQFVRSMVMVKKATAQANGELGAVKPEIAAAIEKACDEVLLNNRCLDQFPSDVYQGGAGTSVNMNTNEVIANLALEALGYEKGRYDIVNPMDHVNASQSTNDAYPTGFRLAVYYSIGELLDKLVVLKNAFAAKAEEFKDVLKMGRTQLQDAVPMTTGQEFQSFQVLLEEEILNLDRTRQLLLEVNLGATAIGTGVNTPKGYAELVVKKLSEVSGLPCKLTENLIEATSDCGAYVMVHGALKRTAVKLSKICNDLRLLSSGPRAGLKEINLPELQAGSSIMPAKVNPVIPEVVNQVCFKVIGNDTTITFAAEAGQLQLNVMEPVIAQCMFETISLLGNAAINLSDKCVKGITVNREICERYVFNSIGLVTYLNPYIGHHNGDLVGKICAQTGKGVREVVLERGLLSEEELNRILSPENLMNPHL

SEQ ID NO: 34725 - protein, 140 aa, Neisseria meningitidis; identical to SEQ ID NO: 19484

SEQ ID NO: 34726 - protein, 121 aa, Neisseria meningitidis; identical to SEQ ID NO: 1865

SEQ ID NO: 34727 - protein, 316 aa, Neisseria meningitidis; identical to SEQ ID NO: 6611

SEQ ID NO: 34728 - protein, 360 aa, Neisseria meningitidis
MFLWLAHFSNWLTGLNIFQYTTFRAVMAALTALAFSLMFGPWTIRRLTALKCGQAVRTDGPQTHLVKNGTPTMGGSLILTAITVSTLLWGNWANPYIWILLGVLLATGALGFYDDWRKVVYKDPNGVSAKFKMVWQSSVAVIAGLALFYLAANSANNILIVPFFKQIVLPLGVVGFLVLSYLTIVGTSNAVNLTDGLDGLAAFPVVLVAAGLAIFAYVSGHYQFSQYLQLPYVAGANEVAIFCTAMCGACLGFLWFNAYPAQVFMGDVGALALGAALGTVAVIVRQEFVLVIMGGLFVVEAVSVMLQVGWYKKTKKRIFLMAPIHHHYEQKGWKETQVVVRFWIITIVLVLIGLSTLKIR

SEQ ID NO: 34729 - protein, 354 aa, Neisseria meningitidis; identical to SEQ ID NO: 3126

SEQ ID NO: 34730 - protein, 259 aa, Neisseria meningitidis; identical to SEQ ID NO: 31538

SEQ ID NO: 34731 - protein, 99 aa, Neisseria meningitidis; identical to SEQ ID NO: 1110

SEQ ID NO: 34732 - protein, 138 aa, Neisseria meningitidis; identical to SEQ ID NO: 671

SEQ ID NO: 34733 - protein, 187 aa, Neisseria meningitidis; identical to SEQ ID NO: 25357

SEQ ID NO: 34734 - protein, 459 aa, Neisseria meningitidis
MLLDLNRFSFSVFLKEVRLLTALALPMLLAQVAQVGIGFVDTVMAGGAGKEDLAAVALGSSAFATVYITFMGIMAALNPMIAQLYGAGKTDEVGETGRQGIWFGLFLGVFGMVLMWAAITPFRNWLTLSDYVEGTMAQYMLFTSLAMPAAMVHRALHAYASSLNRPRLIMLVSFAAFVLNVPLNYIFVYGKFGMPALGGAGCGLATMAVFWFSALALWIYIAKENFFRPFGLTAKFGKPDWAVFKQIWKIGAPIGLSYFLEASAFSFIVFLIAPFGEDYVAAQQVGISLSGILYMIPQSVGSAGTVRIGFSLGRREFSRARYISGVSLVLGWMLAVITVLSLVLFRSPLVSMYNNDPAVLSIAATVLLFAGLFQPADFTQCIASYALRGYKVTKVPMFIHAAAFWGCGLLPGYLLAYRFDMGIYGFWTALIASLTIAAIALVWCLELCSREMVRSHKVV

SEQ ID NO: 34735 - protein, 107 aa, Neisseria meningitidis
MFKDELNEFIRLISDPESELDEWYLSDFKDEHIWEMQSYEAFSCLREAVPYLFAYPRYGYELLEIISALKETSDTTELFYEPGIVPLLIALYKEDSYLVNMVKRIFK

SEQ ID NO: 34736 - protein, 341 aa, Neisseria meningitidis; identical to SEQ ID NO: 23056

SEQ ID NO: 34737 - protein, 324 aa, Neisseria meningitidis; identical to SEQ ID NO: 18844

SEQ ID NO: 34738 - protein, 94 aa, Neisseria meningitidis; identical to SEQ ID NO: 9607

SEQ ID NO: 34739 - protein, 378 aa, Neisseria meningitidis
  misc_feature 3, 4: 'Xaa' is any amino acid
VCXXTEAVILSTCNRTELYCVGDSEEIIRWLADYHSLPIEEISPYLYTLGMQETVRHAFRVACGLDSMVLGEPQILGQIKDAVRVAQEQESMGKKLNALFQKTFSVAKEVRTDTAVGENSVSMASASVKLAEQIFPDIGDLNVLFIGAGEMIELVATYFAAKSPRLMTVANRTLARAQELCDKLGVNAEPCLLSDLPAILHDYDVVVSSTASQLPIVGKGMVERALKQRQSMPLFMLDLAVPRDIEAEVGDLNDAYLYTVDDMVNIVQSGKEARQKAAAAAETLVSEKVAEFVRQQQGRQSVPLIKALRDEGEKARKQVLENAMKQLAKGATAEEVLERLSVQLTNKLLHSPTQTLNKAGEEDKDLVHAVAQIYHLDK

SEQ ID NO: 34740 - protein, 196 aa, Neisseria meningitidis
METQDDDTVKVWGYASSEEIDSDGEVIAAAAMKAAIPDYMKFGAGREMHGSNAAGTAIEINVEDDGITFFGAHIIDPVVVSKVKTGVYKGFSIGGSVTARDDLNKSQITGLKLTEISLVERPANPDAVSTCFKADKGAEAVNNDTEHNATYFSHFPSKQKSTDGGRCPFLYRFPYFLSAGSTGLAGPFGAGAPTEA

SEQ ID NO: 34741 - protein, 948 aa, Neisseria meningitidis
MCNHHPQHSHDNDTIRIRGARTHNLKNIDLDIPRHKLVVVTGLSGSGKSSLAFDTLYAEGQRRYVESLSAYARQFLQMMDKPDVDLIEGLSPAISIEQKSTSHNPRSTVGTVTEIHDYLRLLYARVGTPYCPEHNLPLSSQTVSQMVDAVLKLPEDTRVMILAPAVRERKGEFVDFFADLQAQGFARVRVDGEVYQLDEVPKLEKNIKHNIDVVIDRVKVKANIKQRLAESFETALRHGNERALAMEMDSGEEHWFSARFACPVCSYSLPELEPRLFSFNNPMGSCPTCDGLGNTNFFDSEKVVAHPELSLASGAIDGWDKRNQFYFQMIQSLARHYGFDVQAAWETLPAKIKKVVLHGSGKEVIDFTYLSERGTTFNRSHAFEGIIPNLERRYRETDSETVREKLREYQNHRACPSCGGARLRKEARYVYVGGEPLHEVSAWPLTKTHRFFETLDLDGNKKQIAEKILKEITERLGFLINVGLDYLNLSRSAETLSGGEAQRIRLASQIGSGLTGVMYVLDEPSIGLHQRDNDRLLATLKRLRDLGNSVIVVEHDEDAIREADFVVDMGPGAGEHGGNVLIADTPENVAKCENSVTGQYLSGKKSIAVPSERTPVNPDRMLVLKGARGNNLKNVTLELPLGLITCITGVSGSGKSTLINDTLAKITARELNRAQEEPAPYDDIRGLEHLDKVINVDQSPIGRTPRSNPATYTGLFTPIRELFAGVPLSRERGYNVGRFSFNVKGGRCEACQGDGVIKVEMHFLPDVYVPCEVCHGKRYNRETLEIQYKGKNISQVLDMTVEEAREFFDAVPTVSRKLQTLMDVGLGYIRLGQSATTLSGGEAQRVKLALELSKRDTGRTLYILDEPTTGLHFADIALLLEVIDRLKGKGNSIVIIEHNLDVIKTADWIVDLGPEGGDGGGRIIASGSPEEVAKVKGSYTGKYLKNIL

SEQ ID NO: 34742 - protein, 419 aa, Neisseria meningitidis; identical to SEQ ID NO: 6779

SEQ ID NO: 34743 - protein, 233 aa, Neisseria meningitidis
  misc_feature 227, 228: 'Xaa' is any amino acid
MSYTQLTQGERYHIQYLSRHCTVTEIAKQLNRHKSTISREIRRHRTQGQQYSAEKAQRQSRTIKQRKRQPYKLDSQLIQHIDPLIRRKLSPEQVCAYLCKHHQITLHHSTIYRYLRQDKSNGSTLWQHLRICSKPYRKRYGSTWTRGKVPNRVGIENRPAIVNQKSRIGDWEADTIVGKGQKSALLTLVERVTRYTIICKLDSLKAEDTARAAVRALKAHKDRVHTXXTHLIN

SEQ ID NO: 34744 - protein, 213 aa, Neisseria meningitidis; identical to SEQ ID NO: 6185

SEQ ID NO: 34745 - protein, 293 aa, Neisseria meningitidis; identical to SEQ ID NO: 7892

SEQ ID NO: 34746 - protein, 404 aa, Neisseria meningitidis; identical to SEQ ID NO: 19063

SEQ ID NO: 34747 - protein, 261 aa, Neisseria meningitidis
VKHISSANNEHIRHLHRLLSQGKFRRQYAQTVLEGVHLLQVFLQSGGMPVGVYIPEAKMPSEEVRKLTAVLPEDGVFSVSDGILKKISSLTCADDVLALIDIPDAGALPAGGDCVVLDGVQDPGNVGTVLRSAAAAGIGAVVLGKGCADAWSPKVLRAGMGAHFLSEIYPQADLEIWLARYEDRVFATALREEKQAVLYNEDLREPTAWVFGNEGAGVGKAVLDRADKCVRIPMHDATESLNVAMAATICLFEQMRQRSAY

SEQ ID NO: 34748 - protein, 522 aa, Neisseria meningitidis; identical to SEQ ID NO: 14570

SEQ ID NO: 34749 - protein, 42 aa, Neisseria meningitidis; identical to SEQ ID NO: 19340

SEQ ID NO: 34750 - protein, 120 aa, Neisseria meningitidis
MKLPRNRFSLLSALWFAGGIYSLLFKAADTAPPPFPHFDKAAHLALFFAQIWLLTKAFKTGKLPIPYRSLMVFALCFALFSECAQAWFTATRTGSLGDVLADMAGTVLALFAAHAADRPD

SEQ ID NO: 34751 - protein, 129 aa, Neisseria meningitidis; identical to SEQ ID NO: 322

SEQ ID NO: 34752 - protein, 716 aa, Neisseria meningitidis; identical to SEQ ID NO: 25817

SEQ ID NO: 34753 - protein, 98 aa, Neisseria meningitidis
MKKSLFAAALLSLVLAACGGEKAAEAPATEAPAAEAPATEAPAAEAPATEAPAAEAPATEAPAAEAPAAEAAATEAPAAEAAATEAPAAEAPAAEAAK

SEQ ID NO: 34754 - protein, 290 aa, Neisseria meningitidis
MPILNHIALIGVGLIGGSFVLDLKRQGLVRTVTGIDTDRDNLERALERGVIDRASVAIDTDSIGGADLVLIATPVATVPAILTALRPVLPEHTWISDVGSTKSSVIEAFRRCLPDRLHRCIAAHPIAGSDRSGAQAAQFGLFRHRKLIITPHGGEHSDGIALVEELWHAVGAEIYTMDAQRHDAVFAAVSHMPHLTAFAYVHQILDHPDGQEYLKFAATGFRDFTRIASGHPAVWADICLANKDSLLQLVQGLGKQLDVLANILTTDDREALYRYFEEAKTTRDRWLDGN

SEQ ID NO: 34755 - protein, 165 aa, Neisseria meningitidis
LAEGQKSAVTEYYLNHGIWPKNNTSAGVASSATDIKGKYVKSVEVKNGVVTAEMASSGVNKEIQGRKLSLWAKRQDGSVKWFCGQPVARTDKATDDVKAATANGTDDKINTKHLPSTCRDASSAVCIETPRADFKHFQKISRHRVLPESRHMARRQQFCRRGNLL

SEQ ID NO: 34756 - protein, 910 aa, Neisseria meningitidis
MANNKTLFEVIENRKAVYLEDGDDEKYRLPKFVSNNLKYPFFEWQKSALENFVIFDRTSKLKDFPDIKNRPTHLLFNMATGAGKTMMMAALILYYFEKGYRHFLFFVNQNNIVDKTENNFIDPTHAKFLFTEKILQGDTVIPIRKVEMFSPHSDGIEIKFTSIQKLYNDIHTERENQTTLADLHKLNLVMLGDEAHHLNAPTKSKKRDAEIEHKGWEHMVLELLLNKNGNPSENVLLEFTATPPEKADVQQKYADKIITKFGLKEFLQKGYTKEINLVSSTLSKKERVLHALLFAWYRHQIALKYGIANFKPVMLFRSKTVDESKADYLAFLNWVENVQVDDFSFLKTFSTSLNDSDNANEQGKTRTEQALKFMQDNKFGFAHLANWVKQNYQKHNIIITNSENNKTKTEKTDSETEKLLNNLEAADNPIRAIFTVGRLTEGWDVLNLFDIVRLYEGQNGGGSNKKSCKTANTTVSEKQLIGRGVRYFPFAFEGKQPNKRKFDNDMQHELRILEELFYYAHDEQSRYISELKNELRKDGYLPEKDDDKVLATFKLKSEFAANKDFRELLIWANKKIPNPNAKTNNANSLQANPQTLSFQVHGNQLLQETQFTADENDEKVKQLGTQNNFTQTIKMSEMERHIFNKALHIKGKNSQSLFHFDRLQSKLNIQNRNELQNKLLKDWQIEFLGLGQDKQVCPDDKLAGCLKILEMVEKHLNESDKPFIGTKEFTPKKLWEIFGTPKQKWVKKDDVKTTIATQNDWYVMNNFAGTGLEEALIQFISARLGDLKSQYDIHLIRNEEVFKLNNFANGEGFMPDFILLLKDKQKSSSNGVNDFLHYQIFIEPKGEHLVETDGWKEEFLEAITVEYGMDKILQKDTPHYRLIGLPFFTDHQKNGQFTESFPLGAASLEK

SEQ ID NO: 34757 - protein, 304 aa, Neisseria meningitidis; identical to SEQ ID NO: 3139

SEQ ID NO: 34758 - protein, 144 aa, Neisseria meningitidis; identical to SEQ ID NO: 3606

SEQ ID NO: 34759 - protein, 175 aa, Neisseria meningitidis
  misc_feature 171, 172, 173: 'Xaa' is any amino acid
LEDEDFIRAASMLAEEVFGFGIYKESKGSGGRFYERCWLMGSEDVLYGRVHFGGQNNTILFELTGTGCGVAKEGWESRLFAFLTNAIRPKITRVDIAKDFFNGEYSPNQAREDRNKGMFTCHHVKPKGECLGSDWEETMKPNDQSRPMVSAPVIVQYVRVYEKASSWAIKXXXHT

SEQ ID NO: 34760 - protein, 864 aa, Neisseria meningitidis; identical to SEQ ID NO: 24816

SEQ ID NO: 34761 - protein, 287 aa, Neisseria meningitidis; identical to SEQ ID NO: 8500

SEQ ID NO: 34762 - protein, 192 aa, Neisseria meningitidis; identical to SEQ ID NO: 2909

SEQ ID NO: 34763 - protein, 152 aa, Neisseria meningitidis; identical to SEQ ID NO: 1697

SEQ ID NO: 34764 - protein, 54 aa, Neisseria meningitidis; identical to SEQ ID NO: 18285

SEQ ID NO: 34765 - protein, 228 aa, Neisseria meningitidis; identical to SEQ ID NO: 18794

SEQ ID NO: 34766 - protein, 139 aa, Neisseria meningitidis; identical to SEQ ID NO: 19334

SEQ ID NO: 34767 - protein, 482 aa, Neisseria meningitidis
MKLPIQKFMMLFAAAISLLQIPISHANGLDARLRDDMQAKHYEPGGKYHLFGNARGSVKNRVYAVQTFDATAVGPILPITHERTGFEGIIGYETHFSGHGHEVHSPFDNHDSKSTSDFSGGVDGGFTVYQLHRTGSEIHPEDGYDGPQGSDYPPPGGARDIYSYYVKGTSTKTKTNIVPQAPFSDRWLKENAGAASGFFSRADEAGKLIWESDPNKNWWANRMDDIRGIVQGAVNPFLMGFQGLGVGAITDSAVNPVTYAAARKTLQGIHNLGNLSPEAQLAAATALQDSAFAVKDSINSARQWADAHPNITATAQTALSVAEAAGTVWRGKKVELNPTKWDWVKNNGYKKPAVRLMQTVDGEMAGGNRPPKSITSNSKADASTQPSLQAQLIGEQISSGHAYNKHVIRQQEFTDLNINSPADFARHIENIVSHPTNMKELPRGRTAYWDDKTGTIVIRDKNSDDGGTAFRPTSGKKYYDDL

SEQ ID NO: 34768 - protein, 427 aa, Neisseria meningitidis; identical to SEQ ID NO: 18296

SEQ ID NO: 34769 - protein, 425 aa, Neisseria meningitidis; identical to SEQ ID NO: 19625

SEQ ID NO: 34770 - protein, 489 aa, Neisseria meningitidis; identical to SEQ ID NO: 1073

SEQ ID NO: 34771 - protein, 64 aa, Neisseria meningitidis; identical to SEQ ID NO: 6143

SEQ ID NO: 34772 - protein, 117 aa, Neisseria meningitidis; identical to SEQ ID NO: 6607

SEQ ID NO: 34773 - protein, 465 aa, Neisseria meningitidis; identical to SEQ ID NO: 5967

SEQ ID NO: 34774 - protein, 94 aa, Neisseria meningitidis
MTDTKLNTKEILELKARAHHLHPVVMVGQQGLTDAVIKETDAALTAHELIKVRVFGDDRAERVEICNALCEAVDAQPVQHIGKLLVLWRKNIEG

SEQ ID NO: 34775 - protein, 183 aa, Neisseria meningitidis; identical to SEQ ID NO: 2421

SEQ ID NO: 34776 - protein, 148 aa, Neisseria meningitidis; identical to SEQ ID NO: 24668

SEQ ID NO: 34777 - protein, 369 aa, Neisseria meningitidis; identical to SEQ ID NO: 22083

SEQ ID NO: 34778 - protein, 95 aa, Neisseria meningitidis
MQLEIIGSKIYTEQDFHNQISKIFSIQDYYGNNLDALWDLLSTNVERPITLVWKDAMFSKNKLENIFIEIVNVLERVKKQDEDYGFEEKFNYILE

SEQ ID NO: 34779 - protein, 670 aa, Neisseria meningitidis
MKLNPQQLEAVRYLGGPLLVLAGAGSGKTGVITQKIKHLIVNVGYLPHTVAAITFTNKAAAEMQERVAEMLPKSQTRGLTICTFHSLGMKILREEANHIGYKKNFSILDSTDSAKIIGELLGGTGKEAVFKAQHQISLWKNDLKTPEDVVQTASNAWEQQTARVYASYQETLQSYQAVDFDDLIRLPAVLLQQNSEVRNKWQRRLRYLLVDECQDTNTCQFALMKLLTGAEGMFTAVGDDDQSIYAWRGANMENLRKMQENYPQMKVVKLEQNYRSTARILKIANKVIENNPKLFTKKLWSQLGEGEPVKVVACQNEQHEADWVVSQIIKQKLIGGDKTQYADFAVLYRGKHQARIFEEALRGVRIPYRLSGGQSFFDKAEIKDVLSYVRLLANPNDDPAFLRAVTTPKRGIGDVTLGKLNAYAHEHECSLYEAAQTEEALATLNNTNRQHLQAFMDMFGSYRAKAETGEAGEFINSLLEEIDYENHLLASEEGKAGEIKWRNVGDLVSWFARKGGEDGKNIIELAQTVALMTLLEGKDEEETDAVSLSTLHAAKGLEYPYVFLVGCEEGVLPHNDSIEEGNVEEERRLMYVGITRAKRQLTLTHCVKRKKQGIWQFPEPSRFIDEMPQEDLKILGRKGGEPIVSKEEGRRNLADIIGRLDSMKKGGPED

SEQ ID NO: 34780 - protein, 443 aa, Neisseria meningitidis; identical to SEQ ID NO: 18835

SEQ ID NO: 34781 - protein, 284 aa, Neisseria meningitidis; identical to SEQ ID NO: 506

SEQ ID NO: 34782 - protein, 294 aa, Neisseria meningitidis; identical to SEQ ID NO: 19197

SEQ ID NO: 34783 - protein, 284 aa, Neisseria meningitidis; identical to SEQ ID NO: 6145

SEQ ID NO: 34784 - protein, 208 aa, Neisseria meningitidis; identical to SEQ ID NO: 3160

SEQ ID NO: 34785 - protein, 140 aa, Neisseria meningitidis; identical to SEQ ID NO: 662

SEQ ID NO: 34786 - protein, 291 aa, Neisseria meningitidis; identical to SEQ ID NO: 18307

SEQ ID NO: 34787 - protein, 77 aa, Neisseria meningitidis; identical to SEQ ID NO: 14102

SEQ ID NO: 34788 - protein, 151 aa, Neisseria meningitidis; identical to SEQ ID NO: 6340

SEQ ID NO: 34789 - protein, 389 aa, Neisseria meningitidis; identical to SEQ ID NO: 19971

SEQ ID NO: 34790 - protein, 221 aa, Neisseria meningitidis; identical to SEQ ID NO: 33423

SEQ ID NO: 34791 - protein, 247 aa, Neisseria meningitidis; identical to SEQ ID NO: 19102

SEQ ID NO: 34792 - protein, 608 aa, Neisseria meningitidis
LGISRKISLILSILAVCLPMHAHASDLANDSFIRQVLDRQHFEPDGKYHLFGSRGELAERSGHIGLGKIQSHQLGNLMIQQAAIKGNIGYIVRFSDHGHEVHSPFDNHASHSDSDEAGSPVDGFSLYRIHWDGYEHHPADGYDGPQGGGYPAPKGARDIYSYDIKGVAQNIRLNLTDNRSTGQRLADRFHNAGSMLTQGVGDGFKRATRYSPELDRSGNAAEAFNGTADIVKNIIGAAGEIVGAGDAVQGISEGSNIAVMHGLGLLSTENKMARINDLADMAQLKDYAAAAIRDWAVQNPNAAQGIEAVSNIFMAAIPIKGIGAVRGKYGLGGITAHPVKRSQMGAIALPKGKSAVSNNFADAAYAKYPSPYHSRNIRSNLEQRYGKENITSSTVPPSNGKNVKLADQRHPKTGVPFDGKGFPNFEKHVKYDTKLDIQELSGGGIPKAKPVFDAKPRWEVDRKLNKLTTREQVEKNVQEIRNGNKNSNFSQHAQLEREINKLKSADEINFADGMGKFTDSMNDKAFSRLVKSVKENGFTNPVVEYVEINGKAYIVRGNNRVFAAEYLGRIHELKFKKVDFPVPNTSWKNPTDVLNESGNVKRPRYRSK

SEQ ID NO: 34793 - protein, 257 aa, Neisseria meningitidis; identical to SEQ ID NO: 25547

SEQ ID NO: 34794 - protein, 542 aa, Neisseria meningitidis; identical to SEQ ID NO: 30893

SEQ ID NO: 34795 - protein, 1200 aa, Neisseria meningitidis
  misc_feature 3, 4: 'Xaa' is any amino acid
VCXXFPAQTALRQAITDAYRRNEIEAVQDMLQRAQMSDEERNAASELARRLVTQVRAGRTKAGGVDALMHEFSLSSEEGIALMCLAEALLRIPDNATRDRLIADKISDGNWKSHLNNSPSLFVNAAAWGLLITGKLTATNDRQMSSALSRLISKGGAPLIRQGVNYAMRLLGKQFVTGQTIEEALQNGKEREKMGYRFSFDMLGEAAYTQADADRYYRDYVEAIHAIGKDAAGQGVYEGNGISVKLSAIHPRYSRAQHGRVMGELLPRLKELFLLGKKYDIGINIDAEEANRLELSLDLMEALVSDPDLAGYKGIGFVVQAYQKRCPFVIDYLIDLARRNNQKLMIRLVKGAYWDSEIKWAQVDGLNGYPTYTRKVHTDISYLACARKLLSAQDAVFPQFATHNAYTLGAIYQMGKGKDFEHQCLHGMGETLYDQVVGPQNLGRRVRVYAPVGTHETLLAYLVRRLLENGANSSFVNQIVDENISIDTLIRSPFDTIAEQGIHLHNALPLPRDLYGKCRLNSQGVDLSNENVLQQLQEQMNKAAAQDFHAASIVNGKARDVGEAQPIKNPADHDDIVGTVSFADAALAQEAVGAAVAAFPEWSATPAAERAACLRRFADLLEQHTPALMMLAVREAGKTLNNAIAEVREAVDFCRYYANEAEHTLPKDAEAVGAIVAISPWNFPLAIFTGEVVSALAAGNTVIAKPAEQTSLIAGYAVSLMHEAGIPTSALQLVLGAGDVGAALTNDARIGGVIFTGSTEVARLINKALAKRGDNPVLIAETGGQNAMIVDSTALAEQVCADVLNSAFDSAGQRCSALRILCVQEDVADRMLDMIKGAMDELVVGKPIQLTTDVGPVIDAEAQQNLLNHINKMKGVAKSYHEVKTAADVDSEKSTFVRPILFELNNLNELQREVFGPVLHVVRYRADELDNVIDQINSKGYALTHGVHSRIEGTVRHIRSRIEAGNVYVNRNIVGAVVGVQPFGGHGLSGTGPKAGGSFYLQKLTRAGEWVAPTLSQIGQADEAALKRLEALVHKLPFNAEEKKAAAAALGHARIRTLRRAETVLTGPTGERNSISWHAPKRVWIHGGSTVQAFAALTELAASGVQAVVEPDSPLASYTADLEGLLLVNGKPETVGISHVAALSPLDSARKQELAAHDGALIRVLPSENGLDILQVFEEISCSVNTTAAGGNASLMAVAD

SEQ ID NO: 34796 - protein, 93 aa, Neisseria meningitidis; identical to SEQ ID NO: 19520

SEQ ID NO: 34797 - protein, 83 aa, Neisseria meningitidis; identical to SEQ ID NO: 3011

SEQ ID NO: 34798 - protein, 978 aa, Neisseria meningitidis
LQERPYATAYWPFSVRESCTSNANPPPSENITDKTRKIHDDHIYDFAFDDGRLKNIYLLDKKNLARNHVQLINQFEQTGTHANRYDVTVLVNGLPLVQIELKKRGVAVREAFNQVHRYSKESFNSENSLFKFLQIFVISNGTDTRYFANTTKRDKNSFDFTMNWARSDNHPIKDLKDFTATFLQKSVLLGVLLHYSVFDANDTLLIMRPYQIAAAERILWKINSSAQAKNWSGPESGGYVWHTTGSGKTLTSFKAARLATESAFIDKVFFVVDRKDLDYQTMKEYQRFSTDSVNGSESTAGLKRNLEKDDNKIIVTTIQKLNNLMKSEDNLPVYHQQVVFIFDECHRSQFGEAQKNLKKKFKKFCQFGFTGTPIFHDHIVDGKLIMKGNALGSESTESVFGRQLHSYVITDAIRDEKVLKFKVDYNDVRPQFKAVEAEQDEKKLSAAENRQALLHPERIREITQYILNQFRQKTHRLNAGGKGFNAMFAVSSVDAAKCYYEAFKTQQAGSLHPLKVATIFSFAANEEQNAVGEIADETFEPEAMDSSAKEFLQAAINDYNACFKTNFGTDSKAFQNYYRDLAKRVKNQEVDLLIVVGMFLTGFDAPTLNTLFVDKNLRYHGLMQAFSRTNRIYDATKTFGNIVCFRDLEQATIDAITLFGDKNTKNVVLEKSYEEYMNGYTDSQTGEARRGYLDVAKELHERFPDPDKIETEKDKKDFAKLFGEYLRAENVLQNYDEFAALRELQSVDAADEDAMKAFQEKYYLSDEDVQEMRQVPMPSERAVQDYRSAYNDIRDWLRRQKAGEQKEQSKIDWDDVVFEVDLLKSQEINLDYILQLIFEHHKKIKGKAELVEEIRRIIRASIGHRAKESLIVDFINDTDLDKVPDVPAILETFYTYAQEVMRNEAAELIAAEGLNETAAKRYLISSLKRGYASENGTELTETMPKMSPLNPQYLTKKQSVFQKIAAFVEKFAGIGTDI

SEQ ID NO: 34799 - protein, 153 aa, Neisseria meningitidis; identical to SEQ ID NO: 2505

SEQ ID NO: 34800 - protein, 100 aa, Neisseria meningitidis; identical to SEQ ID NO: 10117

SEQ ID NO: 34801 - protein, 125 aa, Neisseria meningitidis; identical to SEQ ID NO: 17297

SEQ ID NO: 34802 - protein, 275 aa, Neisseria meningitidis; identical to SEQ ID NO: 18182

SEQ ID NO: 34803 - protein, 488 aa, Neisseria meningitidis; identical to SEQ ID NO: 7364

SEQ ID NO: 34804 - protein, 406 aa, Neisseria meningitidis; identical to SEQ ID NO: 19143

SEQ ID NO: 34805 - protein, 271 aa, Neisseria meningitidis; identical to SEQ ID NO: 3345

SEQ ID NO: 34806 - protein, 76 aa, Neisseria meningitidis; identical to SEQ ID NO: 19491

SEQ ID NO: 34807 - protein, 81 aa, Neisseria meningitidis; identical to SEQ ID NO: 7948

SEQ ID NO: 34808 - protein, 365 aa, Neisseria meningitidis; identical to SEQ ID NO: 1845

SEQ ID NO: 34809 - protein, 269 aa, Neisseria meningitidis; identical to SEQ ID NO: 17359

SEQ ID NO: 34810 - protein, 235 aa, Neisseria meningitidis; identical to SEQ ID NO: 18860

SEQ ID NO: 34811 - protein, 377 aa, Neisseria meningitidis
MKRIFCITGTRADFGKLKPLLAYIENHPDLELHLIVTGMHMMKTYGRTCKEVTRENYQHTYLFSNQIQGEPMGVVLGNTITFISRLSDEIEPDMVMIHGDRLEALAGATVGALSSRLVCHIEGGELSGTVDDSIRHSISKLSHIHLVANEQAVTRLVQMGEKRKHIHIIGSPDLDVMASSTLPSLEEVKEYYGLPYENYGISMFHPVTTEAHLMPQYAAQYFKALELSGQNIISIYPNNDTGTESILQELLKCQSEKFIAFPSIRFEYFLVLLKHAKFMVGNSSAGIREAPLYGVPSIDVGTRQSNRHMGKSIIHTDYETKNIFDAIQQACSLGKFEADDTFNGGDTRTSTERFAEVINNPETWNVSAQKRFIDLNL

SEQ ID NO: 34812 - protein, 106 aa, Neisseria meningitidis; identical to SEQ ID NO: 2449

SEQ ID NO: 34813 - protein, 256 aa, Neisseria meningitidis; identical to SEQ ID NO: 25572

SEQ ID NO: 34814 - protein, 96 aa, Neisseria meningitidis
VEYFMLLATDGENVYEARMAARPEHLKRLETLKSEGRLLTAGPNPLPEDSNRVSGSLIVAQFESLDAAEAWAEDDPYVHAGVYSEVLIKPFKVVFK

SEQ ID NO: 34815 - protein, 432 aa, Neisseria meningitidis; identical to SEQ ID NO: 25057

SEQ ID NO: 34816 - protein, 492 aa, Neisseria meningitidis; identical to SEQ ID NO: 14372

SEQ ID NO: 34817 - protein, 219 aa, Neisseria meningitidis; identical to SEQ ID NO: 474

SEQ ID NO: 34818 - protein, 445 aa, Neisseria meningitidis
MSNHTSWSSKIGFVLAAAGSAIGLGAIWKFPYTAGTNGGAVFFLLFLIFTVLVALPVQLAEFYIGRTGGKNAVDSFRALRPGTQWLWVGRMGVAACFILLSFYSVVGGWVLNYVVHSFTGAIHAGADFEALFGTTISNPAGSLSYQALFMLITVWVVKGGISDGIEKANRYLMPGLFILFIALAIRSLTLPGAMEGVSFLLKPNWSYFKADTMITALGQAFFALSIGVSAMITYASYLGKDQDMFRSGHTIMWMNLLVSLLAGLVIFPAVFAFGFEPSQGPGLIFIVLPAVFMKMPFGTVLFAVFMLLVVFATLTSAFSMLETVIASTIRQDERKRKKHTWLIGTAIFIVGIPSALSFGVWGEFKVFGKTIFDLWDYVISAVIMPIGALSVSIFTAWIQDKQSVLKDAGSGSTVPRAVLLLWLNTLRYLAPIAIIIVFINSLGIL

SEQ ID NO: 34819 - protein, 83 aa, Neisseria meningitidis; identical to SEQ ID NO: 15092

SEQ ID NO: 34820 - protein, 480 aa, Neisseria meningitidis; identical to SEQ ID NO: 25167

SEQ ID NO: 34821 - protein, 473 aa, Neisseria meningitidis; identical to SEQ ID NO: 19022

SEQ ID NO: 34822 - protein, 158 aa, Neisseria meningitidis; identical to SEQ ID NO: 6684

SEQ ID NO: 34823 - protein, 65 aa, Neisseria meningitidis; identical to SEQ ID NO: 1389

SEQ ID NO: 34824 - protein, 215 aa, Neisseria meningitidis; identical to SEQ ID NO: 13946

SEQ ID NO: 34825 - protein, 338 aa, Neisseria meningitidis; identical to SEQ ID NO: 19647

SEQ ID NO: 34826 - protein, 46 aa, Neisseria meningitidis; identical to SEQ ID NO: 34387

SEQ ID NO: 34827 - protein, 213 aa, Neisseria meningitidis; identical to SEQ ID NO: 25835

SEQ ID NO: 34828 - protein, 119 aa, Neisseria meningitidis; identical to SEQ ID NO: 16438

SEQ ID NO: 34829 - protein, 254 aa, Neisseria meningitidis; identical to SEQ ID NO: 25209

SEQ ID NO: 34830 - protein, 286 aa, Neisseria meningitidis; identical to SEQ ID NO: 24607

SEQ ID NO: 34831 - protein, 376 aa, Neisseria meningitidis; identical to SEQ ID NO: 23439

SEQ ID NO: 34832 - protein, 123 aa, Neisseria meningitidis; identical to SEQ ID NO: 25295

SEQ ID NO: 34833 - protein, 140 aa, Neisseria meningitidis; identical to SEQ ID NO: 18288

SEQ ID NO: 34834 - protein, 272 aa, Neisseria meningitidis
MKKTVFTYAMIALTGTAAAAQELQTANEFTVHTDLSSISSTRAFLKEKHKAAKHIGVRADIPFDASQGIRLEAGFGRSKKNIINLETDENKLGKTKNVKLPTGVPENRIDLYTGYTYTQTLSDSLNFRVGAGLGFESSKDSIKTTKHTLHSSRQSWSAKVHADLLSQLGNGWYINPWSEVKFDLKSRYKLNTGVTSLKKDINQKTNGWGFGLGANIGKKLGESASIEAGPFYKQRTYKESGEFSVTTTSGDVSLTIPKTSIREYGLRVGIKF

SEQ ID NO: 34835 - protein, 118 aa, Neisseria meningitidis; identical to SEQ ID NO: 2492

SEQ ID NO: 34836 - protein, 251 aa, Neisseria meningitidis; identical to SEQ ID NO: 15704

SEQ ID NO: 34837 - protein, 74 aa, Neisseria meningitidis; identical to SEQ ID NO: 15629

SEQ ID NO: 34838 - protein, 151 aa, Neisseria meningitidis; identical to SEQ ID NO: 4206

SEQ ID NO: 34839 - protein, 205 aa, Neisseria meningitidis; identical to SEQ ID NO: 19053

SEQ ID NO: 34840 - protein, 242 aa, Neisseria meningitidis; identical to SEQ ID NO: 14445

SEQ ID NO: 34841 - protein, 185 aa, Neisseria meningitidis; identical to SEQ ID NO: 1714

SEQ ID NO: 34842 - protein, 324 aa, Neisseria meningitidis; identical to SEQ ID NO: 18953

SEQ ID NO: 34843 - protein, 168 aa, Neisseria meningitidis; identical to SEQ ID NO: 22283

SEQ ID NO: 34844 - protein, 323 aa, Neisseria meningitidis
MSAKFQQETLKSRFAQAKVLVVGDVMLDRYWFGDVSRISPEAPVPVAKIGRIDQRAGGAANVARNIASLGGRAGLLSVTGNDEAADALDALMVQDGVASYLMRDKQIATTVKLRVVARNQQLIRLDFEEHPNREVLEQIKRKYREILPEYDAIIFSDYGKGGLSHISDMIDWAKHAGKTVLIDPKGDDYEKYAGATLITPNRAELKEVVGSWKNEGELTEKAQNLRRHLDLTAILLTRSEEGMTLFSEGEPIYQPTRAQEVYDVSGAGDTVIAGMGLGLAAGCTMPEAMYLANTAAGVVVAKLGTAVCSFAELIKALSGQSTM

SEQ ID NO: 34845 - protein, 467 aa, Neisseria meningitidis; identical to SEQ ID NO: 18280

SEQ ID NO: 34846 - protein, 196 aa, Neisseria meningitidis
  misc_feature 3, 4: 'Xaa' is any amino acid
VCXXFTEAMQAVYDGKEIKMTEEQAQEVMMKFLQEQQAKAVEKHKADAKANKEKGEAFLKENAAKDGVKTTASGLQYKITKQGEGKQPTKDDIVTVEYEGRLIDGTVFDSSKANGGPVTFPLSQVIPGWTEGVQLLKEGGEATFYIPSNLAYREQGAGDKIGPNATLVFDVKLVKIGAPENAPAKQPAQVDIKKVN

SEQ ID NO: 34847 - protein, 315 aa, Neisseria meningitidis; identical to SEQ ID NO: 15264

SEQ ID NO: 34848 - protein, 228 aa, Neisseria meningitidis; identical to SEQ ID NO: 19423

SEQ ID NO: 34849 - protein, 75 aa, Neisseria meningitidis; identical to SEQ ID NO: 821

SEQ ID NO: 34850 - protein, 473 aa, Neisseria meningitidis; identical to SEQ ID NO: 12608

SEQ ID NO: 34851 - protein, 253 aa, Neisseria meningitidis; identical to SEQ ID NO: 15245

SEQ ID NO: 34852 - protein, 303 aa, Neisseria meningitidis; identical to SEQ ID NO: 31474

SEQ ID NO: 34853 - protein, 1277 aa, Neisseria meningitidis
MTTTTAPQRIREIPYNYTSYTDREIVIRLLGDEAWQILQDLRGQRKTGRSARMLFEVLGDIWVVVRNPYLVDDLLEHPKRRAALVREMRHRLNEIRKRRDDNRQVDVLVAAAEKAVERFDSSFDETSQKRHQILERLSKITKPHNIMFDGLARVTHVTDATDWRVEYPFVVVNPDTEAEVAPLVRALIELDLVIIPRGGGTGYTGGAIPLDAMSAVINTEKLDKHRGVEFVELAGLDGRHPIIRCGAGVVTRRVEETAHQAGLVFAVDPTSADASCVGGNVAMNAGGKKAVLWGTALDNLAYWQMVNPQGEWLRIERVRHNFGKIHDEETAIFDVHTLDSDGLNVVKTERLEIPGHKFRKVGLGKDVTDKFLSGLPGVQKEGTDGIITSVAFVLHKMPKYTRTVCMEFFGTVATATPSIVEIRDFLLAHESVRLAGLEHLDWRYVRAVGYATKAAGKGRPKMVLLADVVSDDEAAVEAAAEHICELARARDGEGFIAISPEARKTFWLDRSRTAAIAKHTNAFKINEDVVIPLERLGEYSDGIERINIELSIQNKLKLCAALEQYLSGKLPIDKMGTDLPTAELLGERGKHALAHVSAVKARWDWLLANLDTPLADYKARYGAAVHAAPEAKDNESCFTAFRDFRLRVSVKADVMKPLSEIFSGKTDTKIIEGLGKIHAKTVRGRVFVALHMHAGDGNVHTNIPVNSDDAEMLQTAYRSVERIMKIARSLNGVISGEHGIGITKLEFLSDEEMQPFWDYKNQVDPKHTFNRHKLMKGSDLRNAYTPSFELLGAESLIMEKSDLGTIADSVKDCLRCGKCKPVCSTHVPRANLLYSPRNKILGVGLLTEAFLYEEQTRRGVSVKHFEELADIGDHCTVCHRCVKPCPVNIDFGDVTVAVRNYLADSGHKRFAPAASMGMAFLNATGPKTIKTLRAAMIQTGFPAQNFAYKIGKLLPVGTKKQKAEPKATVGKAPIKEQIIHFINRPLPKNVPAKTPRSLLGIEDDKSIPIIRNPASPEDAEAVFYFPGCGSERLFSQIGLAVQAMLWHVGVQTVLPPGYMCCGYPQDAGGNKAKAEEMSTNNRVAFHRMANTLNYLDIKTVVVSCGTCYDQLEKYRFEEIFPGCRIIDIHEYLLEKGVKLNGVKGQQYLYHDPCHTPIKTMNATQMASSLMGQKVVLSDRCCGESGMFAVKRPDIATQVKFRKQEEIEKNLKELPQGEPVKMLTSCPACLQGLSRYADDNNMPTDYIVIEMAKHILGENWLDEFVKKANNGGVEKVLL

SEQ ID NO: 34854 - protein, 149 aa, Neisseria meningitidis
MTGFNDAAGVASSPSDIKGKYVQKVEVAKGVITAQMASSNVNNEIKGKKLSLWAKRQNGSVKWFCGQPVQRAAATGAKADDVTAATDNNGINTKHLPSTCRDAASAICTRTPRADFKHFQKISRYRVLPESRHMAEKLRHSRKSGNLVR

SEQ ID NO: 34855 - protein, 114 aa, Neisseria meningitidis; identical to SEQ ID NO: 7673

SEQ ID NO: 34856 - protein, 711 aa, Neisseria meningitidis
LGASASISGKTLGQGAKNKPQNKHLTSVADKNGASSSVGYGSDQDSQSSITKSGINTRNIHITDEAGQLARTGRTAKETEARIYTGIDTETADQHSGRLKNSFNKDAVAKEINLQREVTKEFGRNAAQAVAAVADKLGNTQSYERYQEARTLLEAELQNTDSEAEKAAIRASLGQVNAYLAENQSRYDTWKEGGIGRSILHGAAGGLTTGSLGGILAGSGTSLAAPYLDKAAENLGTAGKAAVNALGGAAIGYAAGGNVGTAAVGANVDWNNRQLHNSEIRKIKNNAAKFAKLHPGISQRQAEERLVAQAMRQVDAAYYAKHADTDTAAEQFLRSIAGSFKADGETFLDFAPMKYYRDSGKFAEHTGYRDLRAKLGQNPVHTEAQRNRTIEEKTYGTIGRGVGKGIGNTLANNLQAGPPHYVLGITNYSNWGKELIPYENPVERAIGKQAEDMTEKAVAAVSLGRSLPSKVVNVPSKLAKSIKTAETHKPLVQKRTETYFRVEGGGSGNNQAAKAAKNTEKMKAAIDQTHSGVDLPYDSRQIRAKLEKRYGAENIVSTTIPKKPVQSINNQTKPDYSSIVYTNKSGKVVNVKYKDPISGESKAVNIAYDNRGLPIFDNVSNFTTKIDNSLSYTGQMRAATKDLWKAIESGQVPKNQFTNEQLTKIKAGNEKIPGYTWHHNAQSSPNNMQLIPNSIHTAVRHTGQKSLKKGQ

SEQ ID NO: 34857 - protein, 113 aa, Neisseria meningitidis
MVERKLTGAHYGLRDWAMQRATAVIMLIYTVALLVVLFSLPKEYSAWQAFFSQTWVKVFTQVSFIAVFLHAWVGIRDLWMDYIKPFGVRLFLQVATIVWLVGCLVYSVKVIWG

SEQ ID NO: 34858 - protein, 102 aa, Neisseria meningitidis
MVERYKTMIAEANGKIHRLEDWGRRQLAYPINKIHKAHYVLMNIETTPEVVEELETAFRFNDAVLRHLTIKTKHAVTEASPMLGGEKAKNLLSGASEEAAAQ

SEQ ID NO: 34859 - protein, 146 aa, Neisseria meningitidis; identical to SEQ ID NO: 19156

SEQ ID NO: 34860 - protein, 127 aa, Neisseria meningitidis; identical to SEQ ID NO: 2779

SEQ ID NO: 34861 - protein, 361 aa, Neisseria meningitidis
  misc_feature 355, 356: 'Xaa' is any amino acid
MSQQYVYSMLRVSKVVPPQKTIIKDISLSFFPGAKIGLLGLNGAGKSTVLRIMAGVDKEFEGEAVPMGGIKIGYLPQEPELDPEKTVREEVESGLGEVAAAQKRLEEVYAEYANPDADFDALAEEQGRLEAIIAAGSSTGGGAEHELEIAADALRLPEWDAKIDNLSGGEKRRVALCKLLLSKPDMLLLDEPTNHLDAESVEWLEQFLVRFPGTVVAVTHDRYFLDNAAEWILELDRGHGIPWKGNYSSWLEQKEKRLENEAKSEAARVKAMKQELEWVRQNTKGRQAKSKARLARFEEMSNYEYQKRNETQEIFIPVAERLGNEVIEFVNVSKSFGDKVLIDDLSFKVPAGAIXXTHLIN

SEQ ID NO: 34862 - protein, 160 aa, Neisseria meningitidis; identical to SEQ ID NO: 6404

SEQ ID NO: 34863 - protein, 384 aa, Neisseria meningitidis; identical to SEQ ID NO: 19375

SEQ ID NO: 34864 - protein, 257 aa, Neisseria meningitidis
MRPYATTIYQLFILFIGSVFTMTSCEPVNEQTSFNNPEPMTGFEHTVTFDFQGTKMVIPYGYLARYTQDNATKWLSDTPGQDAYSINLIEISVYYKKTDQGWVLEPYNQQNKAHFIQFLRDGLDSVDDIVIRKDACSLSTTMGERLLTYGVKKMPSAYPEYEAYEDKRHIPENPYFHEFYYIKKGENPAIITHWNNRVNQAEEDNYSTSVGSCINGFTVQYYPFIREKQQLTQQELVGYHQQVEQLVQSFVNNPSKK

SEQ ID NO: 34865 - protein, 142 aa, Neisseria meningitidis
  misc_feature 2, 3, 4: 'Xaa' is any amino acid
VXXXGYIKLQIPAGKANPSPPVGPALGQRGLNIMEFCKAFNAATQGMEPGLPIPVVITAFADKSFTFVMKTPPASILLKKAAGLQKGSSNPLTNKVGKLTRAQLEEIAKTKDPDLTAADLDAAVRTIAGSARSMGLDVEGVV

SEQ ID NO: 34866 - protein, 67 aa, Neisseria meningitidis; identical to SEQ ID NO: 19516

SEQ ID NO: 34867 - protein, 84 aa, Neisseria meningitidis; identical to SEQ ID NO: 3171

SEQ ID NO: 34868 - protein, 169 aa, Neisseria meningitidis; identical to SEQ ID NO: 219

SEQ ID NO: 34869 - protein, 173 aa, Neisseria meningitidis; identical to SEQ ID NO: 6851

SEQ ID NO: 34870 - protein, 152 aa, Neisseria meningitidis
MNIQTRLAATALALFLSACGNGGAPAQPKGEISENRTAAFKSMMPDFSRMGKMVKGEEPYDVEKFKQAAAAFAESSKKPFTLFESDPQGNGRALPAVWSDGAKFEAEKTKFAAAVEKLNAAAQTGKLDEIKAAYGETGASCKSCHDSFRAPE

SEQ ID NO: 34871 - protein, 280 aa, Neisseria meningitidis; identical to SEQ ID NO: 25294

SEQ ID NO: 34872 - protein, 916 aa, Neisseria meningitidis; identical to SEQ ID NO: 1114

SEQ ID NO: 34873 - protein, 153 aa, Neisseria meningitidis
MVERGGGYVMNLGSIAGNYAYAGSNVYGATKAFVRQFSLNLRAELADKNIRVTNIEPGLCGNTEFSNVRFKGDDERAAGVYEGVEFIRPEDIAETALWLYQRPAHMNVNTIEIMPVAQTFAGMKVIKKAVPEVREDFEKQSMSLFSRIRSWFK

SEQ ID NO: 34874 - protein, 497 aa, Neisseria meningitidis; identical to SEQ ID NO: 9967

SEQ ID NO: 34875 - protein, 149 aa, Neisseria meningitidis; identical to SEQ ID NO: 2323

SEQ ID NO: 34876 - protein, 1328 aa, Neisseria meningitidis; identical to SEQ ID NO: 1250

SEQ ID NO: 34877 - protein, 392 aa, Neisseria meningitidis
MAKMMKWAAVAAVAAAAVWGGWSYLKPEPQAAYITETVRRGDISRTVSATGEISPSNLVSVGAQASGQIKKLYVKLGQQVKKGDLIAEINSTSQTNTLNTEKSKLETYQAKLVSAQIALGSAEKKYKRQAALWKENATSKEDLESAQDAFAAAKANVAELKALIRQSKISINTAESELGYTRITATMDGTVVAILVEEGQTVNAAQSTPTIVQLANLDMMLNKMQIAEGDITKVKAGQDISFTILSEPDTPIKAKLDSVDPGLTTMSSGGYNSSTDTASNAVYYYARSFVPNSDGKLATGMTTQNTVEIDGVKNVLIIPSLTVKNRGGKAFVRVLGADGKAAEREIRTGMRDSMNTEVKSGLKEGDKVVISEITAAEQQESGERALGGPPRR

SEQ ID NO: 34878 - protein, 107 aa, Neisseria meningitidis; identical to SEQ ID NO: 2314

SEQ ID NO: 34879 - protein, 199 aa, Neisseria meningitidis; identical to SEQ ID NO: 1022

SEQ ID NO: 34880 - protein, 397 aa, Neisseria meningitidis; identical to SEQ ID NO: 5534

SEQ ID NO: 34881 - protein, 481 aa, Neisseria meningitidis; identical to SEQ ID NO: 18290

SEQ ID NO: 34882 - protein, 436 aa, Neisseria meningitidis; identical to SEQ ID NO: 19409

SEQ ID NO: 34883 - protein, 612 aa, Neisseria meningitidis
MLPARFTILSVLAAALLAGQAYAAGAADAKPPKEVGKVFRKQQRYSEEEIKNERARLAAVGERVNQIFTLLGGETALQKGQAGTALATYMLMLERTKSPEVAERALEMAVSLNAFEQAEMIYQKWRQIEPIPGKAQKRAGWLRNVLRERGNQHLDGLEEVLAQADEGQNRRVFLLLAQAAVQQDGLAQKASKAVRRAALKYEHLPEAAVADVVFSVQGREKEKAIGALQRLAKLDTEILPPTLMTLRLTARKYPEILDGFFEQTDTQNLSAVWQEMEIMNLVSLHRLDDAYARLNVLLERNPNADLYIQAAILAANRKEGASVIDGYAEKAYGRGTEEQRSRAALTAAMMYADRRDYAKVRQWLKKVSAPEYLFDKGVLAAAAAVELDGGRAALRQIGRVRKLPEQQGRYFTADNLSKIQMLALSKLPDKREALRGLDKIIEKPPAGSNTELQAEALVQRSVVYDRLGKRKKMISDLERAFRLAPDNAQIMNNLGYSLLSDSKRLDEGFALLQTAYQINPDDTAVNDSIGWAYYLKGDAESALPYLRYSFENDPEPEVAAHLGEVLWALGERDQAVDVWTQAAHLTGDKKIWRETLKRHGIALPQPSRKPRK

SEQ ID NO: 34884 - protein, 124 aa, Neisseria meningitidis
MIVLHGIPNCDTVKKAKNRLAEYGMEFEFRDFKKQVPSEAEICSWLEQVPLATLLNKRGTSWRKLDAETQQKVLSSTAEAVKLMSEMPSLIKRPVLECGGKVYAGFSEETYDGIFNRQALCRQG

SEQ ID NO: 34885 - protein, 126 aa, Neisseria meningitidis; identical to SEQ ID NO: 10049

SEQ ID NO: 34886 - protein, 544 aa, Neisseria meningitidis; identical to SEQ ID NO: 7248

SEQ ID NO: 34887 - protein, 75 aa, Neisseria meningitidis
MNVWYIWDRMVEIYHKYKKPCLVLAVDFVMGMVFIEPNEEPCIGRCYAPMSESPDFANVVAMAVAMICIVWIAVL

SEQ ID NO: 34888 - protein, 100 aa, Neisseria meningitidis; identical to SEQ ID NO: 5709

SEQ ID NO: 34889 - protein, 66 aa, Neisseria meningitidis; identical to SEQ ID NO: 3561

SEQ ID NO: 34890 - protein, 213 aa, Neisseria meningitidis; identical to SEQ ID NO: 27188

SEQ ID NO: 34891 - protein, 261 aa, Neisseria meningitidis
  misc_feature 256, 257: 'Xaa' is any amino acid
MGFPVRKFDAVIVGGGGAGLRAALQLSKSGLNCAVLSKVFPTRSHTVAAQGGISASLGNVQEDRWDWHMYDTVKGSDWLGDQDAIEFMCRAAPEAVIELEHMGMPFDRVESGKIYQRPFGGHTAEHGKRAVERACAVADRTGHAMLHTLYQQNVRANTQFFVEWTAQDLIRDENGDVVGVTAMEMETGEVYIFHAKAVMFATGGGGRIYASSTNAYMNTGDGLGICARAGIPLEDMEFWQFHPTGVAGAGVLITEXXHTLN

SEQ ID NO: 34892 - protein, 475 aa, Neisseria meningitidis; identical to SEQ ID NO: 3229

SEQ ID NO: 34893 - protein, 358 aa, Neisseria meningitidis; identical to SEQ ID NO: 18266

SEQ ID NO: 34894 - protein, 402 aa, Neisseria meningitidis
MNEGEVVLTPEQIQTLRGYAFRGDTYGGWRYLANLGDRYADDAAAIVGKDANLNGLNLWMKKGVENLWDDTVGKKTRLEKFDRVALQHFSQYVDLINENNGRLPNTSEIERSYYKAVTENGVSSSAAIDLVINRSLPDMADGYWALGLGIEAERIHNAQAVNNPNGSEWDNRKQLISALDKGFDGSFKEKHFTFLQSVIMDVTKLGVEYTIDGWQKIGGWGNGIINDLYKSVAKREWTGIFEIVNNNIKQFRDLFPNPEGWIDDGHQCFAPWVKETKKRNGKYHVYDPLALDLDGDGIETVATKGFAGSLFDHTNNGIRTATGWVSADDGLLVRDLNGNGIIDNGAELFGDNTKLADGSFAKHGYAALAELDSNGDNIINAADAAFQTLRVWQISIRRHFPS

SEQ ID NO: 34895 - protein, 265 aa, Neisseria meningitidis
  misc_feature 2, 3, 4: 'Xaa' is any amino acid
VXXXAFNAKRDALNEAKLQARLAAEALDITLPGRAQEGGSLHPVTLTLQRVVELFHGMGFEVADGPEIEDDFHNFQALNIPANHPARAMQDTFYVENGDVLRTHTSPIQIRYMLDKKEPPIRIIAPGRVYRVDSDATHSPMFHQAEGLWVEEGVTFADLKAVFTDFIRRFFERDDLQVRFRPSFFPFTEPSAEIDIMGENGKWLEVGGCGMVHPNVLKNVNIDSEKYTGFAFGIGLDRFAMLRYNVNDLRLFFDNDLNFLKQFVK

SEQ ID NO: 34896 - protein, 311 aa, Neisseria meningitidis
MGHNMMTTQKWYEHITNVIIGNTANFNSGCPEAIDYVDERKGVPLAAMRHILMYTEAAASHAYLFEHDLNKFKQYAYVAGKLGILRSVNSTDPEPFFFPCDMLNIQDPMFLMLMSDSPQLREFLVRNIDNIANDTEAFVNRYDLNRHMIYNTLLMVEGKQLDRLKQRSEKVLAHPTPSKWLQKRLYDYRFFLAFAEQDAEAMKAALEPLFDKKTARMAAKETLSYFDFYLQPQIVTYAKIASMHGFDLGIDQEIAPRDLIVYDPLPADEYQDIFDFMKQYDLSYPYEYLQDWIDYYTFKTDKLVFGNAKRE

SEQ ID NO: 34897 - protein, 678 aa, Neisseria meningitidis
MTDNALLHLGEEPRFDQIKTEDIKPALQTAIAEAREQIAAIKAQTHTGWANTVEPLTGITERVGRIWGVVSHLNSVADTPELRAVYNELMPEITVFFTEIGQDIELYNRFKTIKNSPEFDTLSPAQKTKLNHDLRDFVLSGAELPPEQQAELAKLQTEGAQLSAKFSQNVLDATDAFGIYFDDAAPLAGIPEDALAMFAAAAQSESKTGYKIGLQIPHYLAVIQYADNRELREQIYRAYVTRASELSDDGKFDNTANIDRTLANALQTAKLLGFKNYAELSLATKMADTPEQVLNFLHDLARRAKPYAEKDLAEVKAFARESLNLADLQPWDLGYASEKLREAKYAFSETEVKKYFPVGKVLNGLFAQIKKLYGIGFTEKTVPVWHKDVRYFELQQNGETIGGVYMDLYAREGKRGGAWMNDYKGRRRFSDGTLQLPTAYLVCNFAPPVGGREARLSHDEILILFHETGHGLHHLLTQVDELGVSGINGVEWDAVELPSQFMENFVWEYNVLAQMSTHEETGEPLPKELFDKMLAAKNFQRGMFLVRQMEFALFDMMIYSEDDEGRLKNWQQVLDSVRKKVAVIQPPEYNRFALSFGHIFAGGYSAGYYSYAWAEVLSADAYAAFEESDDVAATGKRFWQEILAVGGSRSAAESFKAFRGREPRIDALLRHSGFDNAA

SEQ ID NO: 34898 - protein, 254 aa, Neisseria meningitidis
  misc_feature 3, 4: 'Xaa' is any amino acid
VCXXGTGSDLSEDDVNSQEIQHVYGIFDNDTNTGVAKDGQGNGLLEQVLEKDKDGKTLFLSDYKRSNGSGDKGWVVKLEAGQRVTVKPTVVLRTAFVTIHKYTGNDKCGAETAILGINTADGGKLTKKSARPIVPDANQAVAQYSGHKKGINGKSIPIGCMQKGNEIVCPNGYVYDKPVNVRYLDEKKTDGFSTTADGDAGGSGIDPAGKRSGKNNRCFSQKGVRTLLMNDLDSLDITGPTCGMKRISWREIFY

SEQ ID NO: 34899 - protein, 468 aa, Neisseria meningitidis
VEFSTKTEILQEQQAGAQLFVCTEEAQLNHPTALALLSSLEEGQNFADTKIPTGNGLQAVAVCCLKSTGRAALNKAAAEAAKWAQNQETVNVDIHAFDEAQAAAVAEAFAIAFGNAAYRFDRYKKEAKPAKFETAVFHSAHEAVVKEALRVAEAQVYGQSLCRDLGNAAPNECTPEFLARTAKAEAEKLGAHAKIIEKDYIKENMGSFWSVAKGSAEAPYLVELSYFGAADKEAAPVVLVGKGITFDTGGISLKPGLNMDEMKFDMCGAATVISTFCAAVKLQLPINLIAIVATCENMPSGAANKPGDVVKSMKGLTIEVLNTDAEGRLILCDALTYAEQFKPKAVIDVATLTGACIVALGHDVSGVMGNNQDLVDSLLAASYNVDDKAWQLPLFETYKDQLKSNFADIPNIGTPGAGTITAATFLSYFTEDYPWAHLDIAGTAWKSGAEKGATGRPVPLLLNYLRNL

SEQ ID NO: 34900 - protein, 248 aa, Neisseria meningitidis; identical to SEQ ID NO: 3755

SEQ ID NO: 34901 - protein, 559 aa, Neisseria meningitidis; identical to SEQ ID NO: 19137

SEQ ID NO: 34902 - protein, 146 aa, Neisseria meningitidis; identical to SEQ ID NO: 18983

SEQ ID NO: 34903 - protein, 143 aa, Neisseria meningitidis; identical to SEQ ID NO: 7006

SEQ ID NO: 34904 - protein, 525 aa, Neisseria meningitidis
MSKFFKRLFDIAASASGLIFLSPVFLILIYLIRKNLGSPVFFFQERPGKDGKPFKMVKFRSMRDALDSDGIPLPDSERLTPFGKKLRAASLDELPELWNVLKGDMSLVGPRPLLMQYLPLYDNFQNRRHEMRPGITGWAQVNGRNALSWDEKFACDVWYIDNFSFWLDMKILFLTVKKVLIKEGISAEGEATMPYFTGNQTNEKNNILILSAGRRVELVQDFQTEAARFSDGISVFATDLNPRMSSACHVSDGSFEVPPISADSYIDSIFNLAVRENIGLIIPTIDTELQKLADERERFEAASVHIVVSDSDFIAQCRDKRKTATLFARYGIRSPEIYDRKKLVFPCFAKPYDGSRAIGAKRIDTPADLTPEVLADTKLMFCQFIDIENKFSEFTVDMYYDRQCRLKCAIPRKRLEVRSGEISKGVTCKNSLYQTLLEKMSVLQGARGCITAQFFYNEETGEFYGVEINPRFGGGFPLTYAAGGNYPSRLMREYLGDEEIPFSDDWENNLIMLRYDAKVLVHEND

SEQ ID NO: 34905 - protein, 282 aa, Neisseria meningitidis; identical to SEQ ID NO: 2460

SEQ ID NO: 34906 - protein, 412 aa, Neisseria meningitidis
MAFYAFKAMRAAALAAAVALVLSSCGKGGDAAQGGQPAGREAPAPVVGVVTVHPQTVALTVELPGRLESLRTADVRAQVGGIIQKRLFQEGSYVRAGQPLYQIDSSTYEAGLESARAQLATAQATLAKADADLARYKPLVAAEAVSRQEYDAAVTAKRSAEAGVKAAQAAIKSAGINLNRSRITAPISGFIGQSKVSEGTLLNAGDTTVLATIRQTNPMYVNVTQSASEVMKLRRQIAEGKLLAADGVIAVGIKFDDGTVYPEKGRLLFADPTVNESTGQITLRAAVPNDQNILMPGLYVRVLMDQVAVDNAFVVPQQAVTRGAKDTVMIVNAQGGMEPREVTVAQQQGTNWIVTSGLKDGDKVVVEGISIAGITGAKKVTPKEWAPSENQAAAPQSGVQTASEAKTASEAE

SEQ ID NO: 34907 - protein, 367 aa, Neisseria meningitidis
  misc_feature 3, 4: 'Xaa' is any amino acid
VCXXVQRACETAKSVLIIPENHTRNTFYLQNVYALGEILRSAGYEVRLGSLNPEVTEPTEFETALGDKILLEPLLRTRDRVHLADGFSPCVVLLNNDLSAGIPDILKGISQTVLPPLHGGWTTRRKTNHFGAYNQVTAEFAKLIGIDEWQINPYFEKIGGLDFQGREGEDALAEAVERVLAKIQAKYDESGITDKPFVIVKADAGTYGMGVMSVKSADEVRGLNRKNRNKMAKVKEGLEVSEVIVQEGIYTYETLNGAVCEPVVYMMDRFVIGGFFRVHEGRGADENLNAGGMVFVPLSNSIPTGNGDNSQEAPEACKRVFEQWDSLGMPRSEKDCDVDNEHNRLYVYGVMARLSLLAASIELEETA

SEQ ID NO: 34908 - protein, 461 aa, Neisseria meningitidis
MSSGLVTAAYIVAAILFIFSLAGLSKQETAKQGCYSGIAGMAVALFVTVFSDNTHGLGWIIIAMLIGAAIGIYKAKKVEMTEMPELIALLHSFVGLAAVLVGFNSYIAPGNVSHDMHTIHLVEVYLGIFIGAVTFTGSLVAFGKLNGKISSSPLQLPVKHKLNALALAVSFVLLLVFVGIDGSGFILLIMTLIALAFGWHLVASIGGADMPVVVSMLNSYSGWAAAAAGFMLSNDLLIVTGALVGSSGAILSYIMCKAMNRSFVSVIAGGFGSDSGTLSSGSQEIGEYREVKAADIAEMLKGANNVIITPGYGMAVAQAQYPVAEITELLRKNGTEVRFGIHPVAGRLPGHMNVLLAEAKVPYDIVLEMDEINDDFPETDVVLVIGANDTVNPAAQTDPNSPIAGMPVLEVWKAKEVVVFKRSMNTGYAGVQNPLFFNENSVMCFGDAKKTVDDILSELKK

SEQ ID NO: 34909 - protein, 140 aa, Neisseria meningitidis; identical to SEQ ID NO: 4408

SEQ ID NO: 34910 - protein, 244 aa, Neisseria meningitidis
MSANVSRLVVQNLQKSFKKRQVVKSFSLEIESGEVIGLLGPNGAGKTTSFYMIVGLIAADAGSVMLDGQELRHLPIHERARLGVGYLPQEASIFRKMTVEQNIRAILEIRTKDKNQIDREIEKLLADLNIERLRNNPAPSLSGGERRRVEIARVLAMKPHFILLDEPFAGVDPIAVIDIQKIIGFLKSRGIGVLITDHNVRETLSICDRAYIISDGTVLASGKPDDLVGNEQVRSVYLGENFKY

SEQ ID NO: 34911 - protein, 328 aa, Neisseria meningitidis
MQYRIRRENEAPEAKNAGETLWERDMMREVLLSAYRDRRRERMWKNIWRAVSTLILVALIAGIFRKDEAALQLAGNTPHTAVVNLYGEIGNGVEDQVKKLKDGMEAAYKNPQAKAIVIRANSPGGSPVVSNTAFEEIRRLKAQHPGIPVYLVAEDMCASGCYYIAAAADKIYADPSSIVGSIGVIGSSFDATGLMEKIGVKRRVKIAGSNKGMGDPFSPETPEQSKIWEEMLTGIHGEFIKAVKTGRGGRLKFRQYPDVFSGRVYTGADALKVGLVDGLGNIYSVARDVVKAPDVVDYTPKDDFGRILGRRFGAELKASVREALQAVR

SEQ ID NO: 34912 - protein, 874 aa, Neisseria meningitidis
MKTSELRQKFLKFFETKGHTVVRSSSLVPHDDPTLLFTNAGMNQFKDVFLGFDKRPYSRATTAQKCVRAGGKHNDLENVGYTARHHTFFEMMGNFSFGDYFKRDAIHFAWEFLTSPEWLNIPKDKLLATVYAEDDEAYNIWLNEIGMPSERIVRIGDNKGAKYASDNFWQMGDTGPCGPCSEIFYDHGEEIWGGIPGSPEEDGDRWIEIWNCVFMQFNRDEQGNMNPLPKPSVDTGMGLERMAAVMQHVHSNYEIDLFQDLLKAVARETGAAFSMDEPSLKVIADHIRSCSFLIADGVLPSNEGRGYVLRRIIRRAVRHGYKLGQSKPFFHKLVTDLVKEMGDAYPELKEKQAQIEEALKNEESRFAQTLETGMALLENALAKGGKTLDGEIIFKLYDTYGFPYDLTADICRERNIELDEAGFEREMEAQRARARAAQSFKANAQLPYDGQDTEFKGYSERQTESKVLALYKDGEQVNELNEGDSGAVVIDFTPFYAESGGQVGDVGYIFSGENRFEVRDTQKIKAAVFGQFGVQTSGRLKVGDSVTAKVDDEIRNANMRNHSATHLMHKALRDVLGEHVEQKGSLVTAESTRFDISHPQAVTAEEIAEVERRVNEAILANVAVNAAIMSMEDAQKTGAMMLFGEKYGDEVRVLQMGGFSTELCGGTHVSRTGDIGLFKIISEGGIAAGVRRIEAITGLNALKWAQEQERLVKDIIAETKAQTEKDVLAKIQAGAAHAKALEKELARAKAELAVHAGAKLLDDAKDLGAAKLVAAQIEADAAALREIVTDLTGKSDNAVILLAAVNDGKVSLCAGVSKALTGKVKAGDLVKFAAEQVGGKGGGRPDLAQAGGTDADKLPAVLDSVKDWVGAKLV

SEQ ID NO: 34913 - protein, 40 aa, Neisseria meningitidis; identical to SEQ ID NO: 14736

SEQ ID NO: 34914 - protein, 327 aa, Neisseria meningitidis; identical to SEQ ID NO: 2154

SEQ ID NO: 34915 - protein, 494 aa, Neisseria meningitidis; identical to SEQ ID NO: 19482

SEQ ID NO: 34916 - protein, 979 aa, Neisseria meningitidis; identical to SEQ ID NO: 26695

SEQ ID NO: 34917 - protein, 477 aa, Neisseria meningitidis; identical to SEQ ID NO: 19457

SEQ ID NO: 34918 - protein, 482 aa, Neisseria meningitidis
MNGDIGVIGLAVMGQNLILNMNDCGFKVVAYNRTIGKVDEFLNGAAKGTDIVGAYSLQDLVDKLAKPRKIMMMVRAGSVVDDFIEQLLPLLEEGDIIIDGGNANYPDTTRRTHYLAEKGILFVGAGVSGGEEGARHGPSIMPGGDKRAWEAVKPIFQAIAAKTPQGEPCCDWVGRDGAGHFVKMVHNGIEYGDMQLICEAYQFMKDGLGLSYDEMHRVFAEWNKTELDSYLIEITAAILGYKDEGGEPLVEKILDTAGQKGTGKWTGINALDLGIPLTLISEAVFARCVSSFKEQRVQTGKLFARTVTPVEGGKQEWVEALRQALLASKIISYAQGFMLIREAGESYGWDLDYGNTALLWREGCIIRSAFLSNIRDAYENNPDLVFLGADPYFKNILENCLPAWRKVVAKAVECGIPMPCMASAITFLDGYTTERLPANLLQAQRDYFGAHTYERTDKPRGEFFHTNWTGKGGDTASTTYDI

SEQ ID NO: 34919 - protein, 181 aa, Neisseria meningitidis; identical to SEQ ID NO: 18427

SEQ ID NO: 34920 - protein, 186 aa, Neisseria meningitidis; identical to SEQ ID NO: 1228

SEQ ID NO: 34921 - protein, 153 aa, Neisseria meningitidis; identical to SEQ ID NO: 750

SEQ ID NO: 34922 - protein, 129 aa, Neisseria meningitidis; identical to SEQ ID NO: 2209

SEQ ID NO: 34923 - protein, 222 aa, Neisseria meningitidis; identical to SEQ ID NO: 19273

SEQ ID NO: 34924 - protein, 210 aa, Neisseria meningitidis; identical to SEQ ID NO: 48

SEQ ID NO: 34925 - protein, 308 aa, Neisseria meningitidis
MSTFFQQTAQAMIAKHIDRFPLLKLDQVIDWQPIEQYLNRQKTRYLRDHRGRPAYPLLSMFKAVLLGQWHSLSDPELEHSLITRIDFNLFCRFDELSIPDYSTLCRYRNWLAQDDTLSELLKLINRQLTEKGLKIEKASAAVVDATIIQTAGSKQRQTIEVDEEGQVSGQTTPSKDSDARWIKKNGLYKLGYKQHTRTDAEGYIEKLHITPANAHECKHLSPLLEGLPKGTTVYADKGYDSAENRQHLEEHQLPDGIMRKACRNRPLSETQTKRNRYLSKTRYVVEQSFGTLHRKFRYARAAYFGLIK

SEQ ID NO: 34926 - protein, 395 aa, Neisseria meningitidis; identical to SEQ ID NO: 1105

SEQ ID NO: 34927 - protein, 111 aa, Neisseria meningitidis
MMADKEQVEKMIYSENKDCVIDGMLGMTFSSEEDEIPWISEKLTELSKHKDLDIARLSLTCFGHLARMHENIGDCDKVIALLRSKQGNPDFQGFAEDALDDISFFIFKKRP

SEQ ID NO: 34928 - protein, 307 aa, Neisseria meningitidis; identical to SEQ ID NO: 1349

SEQ ID NO: 34929 - protein, 192 aa, Neisseria meningitidis
MKTFALILADGQASRMGGEDKGLALLGGKALIDHVIDRVRPQVSHIAISTNRNLEEYARRSPHIFPDARQWQHFGPLSALCTAANDLQLATADWLLVVPCDMPYLPGDLVARFETVSKRTPLCNAYYVETPITMHYNIMYIRPQILQSAIPYLFSGMKTLRSWLQQQRARSVRFEFDGHFADLNTQIDLQEG

SEQ ID NO: 34930 - protein, 132 aa, Neisseria meningitidis
VPIHIIQFHGDEDDTFCRQFHRPYIKAIRVQTTSDIRNAADRFPDAQALLFDAYHPSEYGGTGHRFDWTLLAEYSGKPWVLAGGLTPENVGEAVRITGAEAVDVSGGVEASKGKKDPAKVAAFIATANRLSR

SEQ ID NO: 34931 - protein, 351 aa, Neisseria meningitidis; identical to SEQ ID NO: 27291

SEQ ID NO: 34932 - protein, 144 aa, Neisseria meningitidis; identical to SEQ ID NO: 25274

SEQ ID NO: 34933 - protein, 456 aa, Neisseria meningitidis
MPQNTLNIVILAAGKGTRMYSKMPKVLHEIGGETMLGRVIDTAAALNPQNICVVVGHGKEQVLDTVKRDVVWVEQTEQLGTGHAVKTALPHLAAEGRTLVLYGDVPLIDVETLETLLEAAGNEVGLLTDVPADPSGLGRIIRDGSGSVTAIVEEKDASAAQKAVKETNTGILVLPNAKLENWLNSLSSNNAQGEYYLTDLIAKAVADGIKVHPVQVRASHLAAGVNNKRQLAELERIFQTEQAQELLKAGVTLRDPARFDLRGCLKHGQDVVIDVNCIFEGEVEIGDNVEIGANCVIKNAKIGANSKISPFSHLEDCEVGENNRIGPYARLRPQARLSDDVHVGNFVEIKNAAIGKGTKANHLTYIGDAEVGSKTNFGAGTIIANYDGVHKHKTVIGDEVRIGSNCVLVSPVKIGNKVTTGAGSTITRNVEDGKLALARSRQTIIDGWVRPEKDKQ

SEQ ID NO: 34934 - protein, 212 aa, Neisseria meningitidis
MQIAIIDYGMGNLHSVLKSVRTAGQLAGKNTEIFLSGDPERVSRADKVIFPGQGAMPDCMAALTRGGLDEAVKDALKNKPFFGICVGAQLLFDHSEEGNTDGLGWFGGKVRRFERDLRDPQGYRLKVPHMGWNTVRQTQNHPLFKDIPQDTRFYFVHSYYFAPENPETILGESDYPSPFACIVGKDNVFATQFHTEKSHDAGLTMLKNFLNW

SEQ ID NO: 34935 - protein, 63 aa, Neisseria meningitidis
  misc_feature 59, 60, 61: 'Xaa' is any amino acid
VSDSKTKERATFGTRRAFMIAAIGSAVGLGNIWRFPYIAFENGGGAFILPYLVALLTAXXXHT

SEQ ID NO: 34936 - protein, 229 aa, Neisseria meningitidis; identical to SEQ ID NO: 18452

SEQ ID NO: 34937 - protein, 196 aa, Neisseria meningitidis; identical to SEQ ID NO: 1629

SEQ ID NO: 34938 - protein, 167 aa, Neisseria meningitidis
  misc_feature 2, 3, 4: 'Xaa' is any amino acid
VXXXTQARLEQQQKQIEALQQQLAQQADDTVYQLTPEAVKDTIPAEAQANGNNGQPVTGKDGQQYIYDQSTGSWLLQSLVGAAAGAFIGNALANKFTRAGNQDSPVARRARAAYHQSARPNARTSRDLNTRSLRAKQQAAQAQRYRPTTRPPANYRRPAMRGFGRRR

SEQ ID NO: 34939 - protein, 334 aa, Neisseria meningitidis; identical to SEQ ID NO: 309

SEQ ID NO: 34940 - protein, 110 aa, Neisseria meningitidis; identical to SEQ ID NO: 8460

SEQ ID NO: 34941 - protein, 338 aa, Neisseria meningitidis
MYRKLIALPFALLLAACGREEPPKALECANPAVLQGIRGSIQETLTQEARSFAREDGRQFVDADKIIAAAYGLAFSLEHASETQEGGRTFCIADLNITVPSETLADAKANSPLLYGETALSDIVRQKTGGNVEFKDGVLTAAVRFLPVKDGQTAFVDNTVGMAAQTLSVALLPYGVKSIVMIDGKAVKKEDAVRILSGKAREEEPSKPTPEDILEHNAAGGDAGVPQAAEGAPEPEILHPDDGERADTVTVSRGEVEEARVQNQRAESEITKLWGGLDTDVQKELVGEQRKWAQEKISNCRQAAAQADRQEYAEYLKLQCDTRMTRERIQYLRGYSID

SEQ ID NO: 34942 - protein, 332 aa, Neisseria meningitidis
LQPLVSVLICAYNVEKYFAQSLAAVVNQTWCNLDILIVDDGSTDGTLAIAKDFQKRDSRIKILAQAQNSGLIPSLNIGLDELAKSGGGEYIARTDADDIAAPDWIEKIVGEMEKDRSIIAMGAWLEVLSEEKDGNRLARHHRHGKIWKKPTRHEDIADFFPFGNPIHNNTMIMRRSVIDGGLRYNTERDWAEDYQFWYDVSKLGRLAYYPEALVKYRLHANQVSSKYSVRQHEIAQGIQKTARNDFLQSMGFKTRFDSLEYRQIKAVAYELLEKHLPEEDFERARRFLYQCFKRTDTLPAGAWLDFAADGRMRRLFTLRQYFGILHRLLKNR

SEQ ID NO: 34943 - protein, 105 aa, Neisseria meningitidis
LAAHIETVLQRKPVVIGKPEREIRRVAWCSGGAQGFFQTAIDEGVDLYLTGEISEAQYHLANETGTAFISAGHHATERYGVRALAESAAEVFGLEVCHFDENNPA

SEQ ID NO: 34944 - protein, 96 aa, Neisseria meningitidis; identical to SEQ ID NO: 11797

SEQ ID NO: 34945 - protein, 77 aa, Neisseria meningitidis; identical to SEQ ID NO: 3246

SEQ ID NO: 34946 - protein, 192 aa, Neisseria meningitidis; identical to SEQ ID NO: 746

SEQ ID NO: 34947 - protein, 86 aa, Neisseria meningitidis
MRKACRNRPLTETQTKRNRYLSKTRYSGLNLNQDKATKPQTVQIVRQGEATPYWFKFNPLYVVEQSFGTLHRKFRYARAAYFGLIK

SEQ ID NO: 34948 - protein, 141 aa, Neisseria meningitidis; identical to SEQ ID NO: 24497

SEQ ID NO: 34949 - protein, 331 aa, Neisseria meningitidis; identical to SEQ ID NO: 6836

SEQ ID NO: 34950 - protein, 640 aa, Neisseria meningitidis
MIEIKNLTLQRGLKVLLDKANATVNPGQRVGLIGKNGTGKSSLFALIKGEITQDGGDVSIPKNWRLASVSQETPDLDISALDYVLQGDAELQTLQTALRQAEAQNDGMKQAEYHAKLEEIDAYTAPARVAKLLNGLGFSQEEHSRPVKSFSGGWRMRLNLAQALICRADLLLLDEPTNHLDLETVLWLENHLASLPCTQIIISHDRDFLNAATTQTIELSQQKLTQYGGNYDFYQNERAQRLAQQQAAYVKQQAQIKHLQSFIDRFKAKATKAVQAQSRMKALAKLERIAPAHLDSEFSFEFYNPEHLPNPLLKLEHADLGYEGKTVLHDITLSLESGARYGLLGVNGSGKSTFIKALAGKIDLLSGSIVRSEKLNIGYFAQHQLDTIRADQNPVWHIQQLSPEVREQEIRNFLGGFNFVGDMALQKTEPFSGGEKARLALAMIIWQKPNLLLLDEPTNHLDLDMRHALTLALQSFQGALIAVSHDRSLLEATTDSFLLIDKGRLKNFDGDLNDYRQWRLAQENAAAAPAASAQSQSRKDTKRIEAQIRQEKARRGKPIQQKIDRAEKEIARLTDIQTACEAFLAQEDAYLEANKEKLQNTLSQLAKVKTQLAQIEEVWLACQEELERIETEIEKQFAER

SEQ ID NO: 34951 - protein, 125 aa, Neisseria meningitidis; identical to SEQ ID NO: 4559

SEQ ID NO: 34952 - protein, 69 aa, Neisseria meningitidis; identical to SEQ ID NO: 9123

SEQ ID NO: 34953 - protein, 81 aa, Neisseria meningitidis
VAGATIRIIDRQTDEVIAKKTIYVFEKGLDGTGGARMPWKFAILCNKERLTSSEPLSDFVLSVLKPYILRPLYIVSLRRDD

SEQ ID NO: 34954 - protein, 149 aa, Neisseria meningitidis; identical to SEQ ID NO: 4552

SEQ ID NO: 34955 - protein, 287 aa, Neisseria meningitidis
MKTLLPFFGVVRVSGEDRQTFLHGQLSNDINHLQTGQACYATYNTPKGRVIANMIVVNRGGDLLLIMAQDLLEATVKRLRMFVLRAKAVFEILEDYAVGAELEASAEPLAAQEPSLAFTAECGSDGICSVVLPHRGILHIAPKNALPPYDAAAENAWRLHEIRSGYPWICAATKETAVAQMLNQHIIGGVHFKKGCYPGQEIIARAQYRGQVKRGLAVLSGNSAAEAGILLAADGEEAGIVLDSVKDSESFTALAVIKFSAAQKELTAPNGSIFKAVHPFFKTENAE

SEQ ID NO: 34956 - protein, 321 aa, Neisseria meningitidis
MSYTQLTQGERYHIQYLSRHCTVTEIAKQLNRHKSTISREIRRHRTQGQQYSAEKAQRQSQTIKQRKRQPYKLDSQLIQHIDTLIRRKLSPEQVCAYLCKHHQITLHHSTIYRYLRQDKSNGSTLWQHLRICSKPYRKRYGSTWTRGKVPNRVGIENRPAIVNQKSRIGDWEADTIVGKGQKSALLTLVERVTRYTIICKLDSLKAEDTARAAVRALKAHKDRVHTITMDNGKEFYQHTKITKALKAETYFCRPYHSWEKGLNENTNGLIRQYFPKQTDFRNISDREIRRVQDELNHRPRKTLGYETPSVLFLNLFQPLIH

SEQ ID NO: 34957 - protein, 350 aa, Neisseria meningitidis; identical to SEQ ID NO: 8682

SEQ ID NO: 34958 - protein, 205 aa, Neisseria meningitidis; identical to SEQ ID NO: 721

SEQ ID NO: 34959 - protein, 261 aa, Neisseria meningitidis; identical to SEQ ID NO: 335

SEQ ID NO: 34960 - protein, 447 aa, Neisseria meningitidis; identical to SEQ ID NO: 19387

SEQ ID NO: 34961 - protein, 286 aa, Neisseria meningitidis
MAKVKGGLGRGLDSLLANGADNSSGDRLTTVAVKDIRPGRYQARVQIDDEALQELADSIKAQGVIQPVIVREHGLSRYELIAGERRWRAAQIAGLTEIPAVIKTISDETALAMGLIENLQRENLNPIEEAQGLKRLADEFGLTHETIAQAVGKSRSAISNSLRLLSLPEPVQEMLYQRRLEMGHARALLTLPVVEQLELAQKAVKNGWSVREVERRSQVALQNKHPEPKKTAAADIGRLNDLLTEKLGVNAEIKTANHKKGRIILHFDTPETFDHILKQLGIDYRP

SEQ ID NO: 34962 - protein, 375 aa, Neisseria meningitidis; identical to SEQ ID NO: 777

SEQ ID NO: 34963 - protein, 77 aa, Neisseria meningitidis; identical to SEQ ID NO: 19615

SEQ ID NO: 34964 - protein, 469 aa, Neisseria meningitidis
MKYISTRGETAHKPFSEVLLMGLAPDGGLMLPEHYPQIGREALDKWRGLAYPELAFEIMRLFVTDIPEDDLRDILNRTYTEAAFGTKEITPVRTLSDGIKIQALSNGPTLAFKDMAMQFLGNAFEYVLNKEGKKLNILGATSGDTGSAAEYALRGKKGVNVFMLSPDGKMSAFQRAQMYSLQDGNIHNIAVKGMFDDCQDIVKAVQNDAAFKEKYHIGTVNSINWGRIVAQVVYYFAGYFKATQSNDEQVSFCVPSGNFGNVCAGHIAKQMGLPIRRLIVATNENDVLDEFFKTGAYRPRNSAHTYVTSSPSMDISKASNFERFVFDLMDRDPQEINTLWAEVAAGKGFDLRFALEKVGGKYGFTSGKSTHPDRLATIRQVYEQDQELIDPHTADGVKVAREVREEGETVVCLETALAAKFDATIREAVGDAAIPRPAALEGLETLPQRVQTVPNSADAVKGIIEQTLA

SEQ ID NO: 34965 - protein, 254 aa, Neisseria meningitidis
  misc_feature 3, 4: 'Xaa' is any amino acid
VCXXSGASSAPAQSAVSGSLIERINNKGTVTVGTEGTYAPFTYHDKDGKLTGYDVEVTRAVAEKLGVKVEFKETQWDSMMAGLKAGRFDVVANQVGLTSPERQATFDKSDPYSWSGAVLVARNDSNIKSIDDIKGVKTAQSLTSNYGEKAKAAGADLVAVDGLAQSLTLIEQKRADATLNDELAVLDYLKKNPNAGVKIVWSAPADEKVGSGLIVNKGNDEAVAKFSTAINELKADGTLKKLGEQFFGKDISVQ

SEQ ID NO: 34966 - protein, 100 aa, Neisseria meningitidis; identical to SEQ ID NO: 7884

SEQ ID NO: 34967 - protein, 119 aa, Neisseria meningitidis; identical to SEQ ID NO: 6320

SEQ ID NO: 34968 - protein, 444 aa, Neisseria meningitidis
  misc_feature 3, 4, 438, 439: 'Xaa' is any amino acid
VCXXIVDIPKGNLKTEIEKLAKQPEYAYLKQLQTAKNVDWKQVQLAYDKWDYKQEGLTGAGAAIVVIIVTALTYGYGAAAAGSVTAAGSSTAAAATTTAAATTTVSTAAAMQTAALASLYSQAAVAIINNKGDVGKALKDLGTSDTVKQIVTSALTAGALNQMGADIAQLNSKVRTELFSSTGNQTIANLGGRLATNLSNAGISAGINTAVNGGSLKDNLGNAALGALVNSFQGEAASKIKTTFSDDYVAKQFAHALAGCVSGLVQGKCKDGAIGAAVGEIVAESILGGRNPATLSDAEKHKVISYSKIIAGSVAALNGGDVNTAANAAEVAVVNNALNFDSTPTNAKKHQPQKPDKTALEKIIQSIMPAHAAGAMTNPQDKDAAIWISNIRNGITGPIVITSYGVYAAGWTAPLIGTAGKLAISTCMANPSGCTVMXXTHLIN

SEQ ID NO: 34969 - protein, 222 aa, Neisseria meningitidis
MKNLAIFDLDNTLINTDSDHAWPQYLIKKGLVDAAETEAQNEKFYRDYQNGCLDIDAFLKFHLAPLARYSKEELAEFHREFMAEYIIPHISPMQRMLVQSHQMAGDETLVISSTNEFIITPVCRLFGITNIIGTQLETGSDGRYTGNYIGTPSLKEGKITRLNQWLAERGETLQSYGKTYFYSDSKNDLPLLRLVSEPVAVNPDAELEKEAKEKGWPVLNFK

SEQ ID NO: 34970 - protein, 99 aa, Neisseria meningitidis
VVPVFEALIRDADFQYIFLSYNNEGLMSVGQVREIFECFGKYNLVQTEYRRFKADKTENRNHKANSIFEYLHILEKTFYSGLTKTSTALPRLSSKRTIL

SEQ ID NO: 34971 - protein, 221 aa, Neisseria meningitidis; identical to SEQ ID NO: 11037

SEQ ID NO: 34972 - protein, 111 aa, Neisseria meningitidis
MPSEALSGLQTAFCFPTVYKLSLFLDRNNDLIYLKRLEDMIMGFWNGVAKAAKAVGEGMIEAGNEHKALKMEYAEKSSEELHEIVKSDGFFKNSTREKSAAYAILKERGEV

SEQ ID NO: 34973 - protein, 298 aa, Neisseria meningitidis; identical to SEQ ID NO: 18812

SEQ ID NO: 34974 - protein, 181 aa, Neisseria meningitidis; identical to SEQ ID NO: 19013

SEQ ID NO: 34975 - protein, 275 aa, Neisseria meningitidis
  misc_feature 2, 3, 4: 'Xaa' is any amino acid
VXXXIALAVTVVTSGAGTGAVLGLNGAVSAEPMLASFLHQTVLRHESLGSVLAYHLSSKLGSPIMDVRALFEIYQQALGSDTQIGKCVEADLKAIYERDPACDEYSLPLLYFKGFHAIQAHRINHRLYLDGRKTLAYFLQNRMSEVFGVDIHPAARFGYGLMLDHATGFVAGETAVLGNNISILHGVTLGGSGKEGGDRHPKIGDGVMIGANASILGNIRIGSNAKIGAGSVVVSDVPPSITVVGVPAKPVARSLKTPSADMDQNIQFTEIDFMI

SEQ ID NO: 34976 - protein, 628 aa, Neisseria meningitidis
MIYPKTYDVIVVGGGHAGTEAALAAARMGAQTLLLTHNIETLGQMSCNPSIGGIGKGHLVRELDALGGAMALATDKSGIQFRRLNASKGAAVRATRAQADRILYKAAIREMLENQENLDLFQQAVEDVTLDGERISGVITAMGVEFKARAVVLTAGTFLSGKIHIGLEHYEGGRAGDPAAKSLGGRLRELKLPQGRLKTGTPPRIDGRTIDFSQLTEQPGDTPVPVMSVRGNAEMHPRQVSCWITHTNTQTHDIIRSGFDRSPMFTGKIEGVGPRYCPSIEDKINRFADKDSHQIFLEPEGLTTHEYYPNGISTSLPFDIQIALVRSMKGLENAHILRPGYAIEYDYFDPRNLKASLETKTIAGLFFAGQINGTTGYEEAAAQGLLAGANAVQYVREQDPLLLRREQAYLGVLVDDLITKGVNEPYRMFTSRAEYRLQLREDNADMRLTEDGYKIGLVGEAQWRMFNEKREAIEREIQRLKTTWYTPQKLAEDEQIRVFGQKLSREANLHDLLRRPNLDYAALMTLEGAMPSERLSAEVVEQVEIQVKYQGYIDRQNEEIDSRRDIETLKLPEDIDYSKVKGLSAEVQQKLNQHKPETVGQASRISGVTPAAVALLMVHLKRGFKDAK

SEQ ID NO: 34977 - protein, 67 aa, Neisseria meningitidis; identical to SEQ ID NO: 20018

SEQ ID NO: 34978 - protein, 258 aa, Neisseria meningitidis; identical to SEQ ID NO: 19608

SEQ ID NO: 34979 - protein, 163 aa, Neisseria meningitidis; identical to SEQ ID NO: 684

SEQ ID NO: 34980 - protein, 251 aa, Neisseria meningitidis; identical to SEQ ID NO: 2547

SEQ ID NO: 34981 - protein, 269 aa, Neisseria meningitidis; identical to SEQ ID NO: 17359

SEQ ID NO: 34982 - protein, 301 aa, Neisseria meningitidis; identical to SEQ ID NO: 1112

SEQ ID NO: 34983 - protein, 498 aa, Neisseria meningitidis; identical to SEQ ID NO: 18329

SEQ ID NO: 34984 - protein, 384 aa, Neisseria meningitidis; identical to SEQ ID NO: 19277

SEQ ID NO: 34985 - protein, 328 aa, Neisseria meningitidis
MKRYVCLRHQVGDFPVKWQKRFFATKIYTLYFSDRGAEMEIWNMLDTWLGAVPIRAEAVESVAAVAALLLARALLLNIHFKRHPDFGIESKRRFLVASRNITLLLVLFSLAFIWSAQIQTLALSMFAVAAAVVVATKELIMCLSGSILRSATQQYSVGDYIEINGLRGRVVDINLLNTLMMQVGPNPLVGQLAGTTVSFPNSLLLSHPVRRDNILGDYVIHTVEIPVPIHLDSDEAVCRLKAVLEPLCAPYIPAIQRHLENVQAEKLFITPAARPRVTRVPYDDKAYRIIVRFASPVSKRLEIQQAVMDEFLRVQYRLLNYPAGSETL

SEQ ID NO: 34986 - protein, 72 aa, Neisseria meningitidis; identical to SEQ ID NO: 18381

SEQ ID NO: 34987 - protein, 223 aa, Neisseria meningitidis; identical to SEQ ID NO: 8619

SEQ ID NO: 34988 - protein, 346 aa, Neisseria meningitidis; identical to SEQ ID NO: 19638

SEQ ID NO: 34989 - protein, 260 aa, Neisseria meningitidis; identical to SEQ ID NO: 16467

SEQ ID NO: 34990 - protein, 753 aa, Neisseria meningitidis
MLQIEIDGKQVSVEQGATVIEAAHKLGTYIPHFCYHKKLSIAANCRMCLVNVEKAPKPLPACATPVTDGMIVRTHSAKAREAQEGVMEFLLINHPLDCPTCDQGGECQLQDLAMGYGKTTSRYTEEKRSVVGKDMGPLVSAEEMSRCIHCTRCVRFTEEIAGVQEIAMANRGEHSEIMPFIGKAVETELSGNVIDLCPVGALTSKPFRFNARTWELNRRKSVSAHDALGSNLIVQTKDHTVRRVLPLENEAINECWLSDRDRFAYEGLYHESRLKNPKIKQGGEWMDVDWKTALEYVRSAIECIAKDGNQNQVGVWANPMNTVEELYLAKKLADGLGVKNFATRLRQQDKRLSDGIKGAQWLGQSIESLADNDAVLVVGANLRKEQPLLTARLRRAAKDRMALSVLAGSKEELFMPLLSQEAAHPDEWAGRLKNLSVNAEHAVTASLKNAEKAAVILGAEVQNHPDYAAIYAAVQELADATGAVLGILPQAANSVGADVLGVNSGESVAEMANAPKQAVLLLNVEPEIDMVDGAKAVAALKQAKSVMAFTPFVSETLLDVCDVLLPIAPFTETSGSFINMEGRLQSFHGVVQGFGDSRPMWKVLRVLGNLFDLQGFEYHDTAAILKDALDAESLPSKLDNRSTWTGEGVQTASDRLVRVGGVGIYHTDSIVRRSAPLQATVHAAVPAARVNPNTLGRLGLQDGQTAVAKQNGASVSVAVKADAGLPENVVHLPLHTENAALGALMDTIELAGA

SEQ ID NO: 34991 - protein, 520 aa, Neisseria meningitidis; identical to SEQ ID NO: 25157

SEQ ID NO: 34992 - protein, 155 aa, Neisseria meningitidis
LNPQYLVIGPGPCSPKEAGISVAAMRHFAGRLPIMGVCLGHQTIGEAFGGRIVRAKTLMHGKVSPVSHSGKGMFMGLPNPVTCTRYHSLVIERGTLPECLEITAWTEDGEIMGVRHKEYAVEGVQFHPEALLTEHGHDMLNNFLIEFQNFKPQKI

SEQ ID NO: 34993 - protein, 81 aa, Neisseria meningitidis; identical to SEQ ID NO: 1361

SEQ ID NO: 34994 - protein, 154 aa, Neisseria meningitidis
MIEMSKDYRNDLYDVYVSYPPQVDRGLIRECLRENLGEEKAEGLIESLDSKPQVLVEEKCTWAKREELHDYFSYLGLDIITRRYMELETVVPPEEGEGEGEGADGEMPEYLELHGGREDDISAPSQPEPPPRNIKPLVFGLLIAFLSYLLGKIF

SEQ ID NO: 34995 - protein, 655 aa, Neisseria meningitidis; identical to SEQ ID NO: 4008

SEQ ID NO: 34996 - protein, 214 aa, Neisseria meningitidis; identical to SEQ ID NO: 6886

SEQ ID NO: 34997 - protein, 114 aa, Neisseria meningitidis; identical to SEQ ID NO: 5923

SEQ ID NO: 34998 - protein, 92 aa, Neisseria meningitidis
MPAVDLIRERLQTLDPLVLEIGDESHLHKGHAGNTGGGHYAVLVVSGRFEGVSRLNRQKTVKSLLKDLFSDGIIHALGIRAAAPDEYFHTAD

SEQ ID NO: 34999 - protein, 321 aa, Neisseria meningitidis; identical to SEQ ID NO: 2913

SEQ ID NO: 35000 - protein, 110 aa, Neisseria meningitidis; identical to SEQ ID NO: 19308

SEQ ID NO: 35001 - protein, 513 aa, Neisseria meningitidis
MKIGIPRESLSGETRVACTPATVALLGKLGFETVVESGAGLAASLDDAAYQTAGATVADKAAVWACPLIYKVNAPSEGELPLLNEGQTIVSFLWPRQNEALVEALRAKKVNALAMDMVPRISRAQALDALSSMANISGYRAVIEAANAFGRFFTGQITAAGKVPPAQVLVIGAGVAGLAAIGTANSLGAVVRAFDTRLEVAEQIESMGGKFLKLGFPQESGGSGDGYAKVMSDEFIAAEMKLFAEQAKEVDIIITTAAIPGKPAPKLITKEMVESMKSGSVIVDLAAATGGNCELTRPGELSVTGNGVKIIGYTDMANRLAGQSSQLYATNLVNLTKLLSPNKDGEITLDFEDVIIRNMTVTRDGEITFPPPPIQVSAQPQQTSSEKAAPAAKPEPKPVPLWKKLAPAVIAAVLVLWVGAVAPAAFLNHFIVFVLACVIGYYVVWNVSHSLHTPLMSVTNAISGIIVVGALLQISQGNGFVTLLAFIAILIASINIFGGFAVTRRMLNMFKKG

SEQ ID NO: 35002 - protein, 269 aa, Neisseria meningitidis; identical to SEQ ID NO: 18121

SEQ ID NO: 35003 - protein, 123 aa, Neisseria meningitidis; identical to SEQ ID NO: 1024

SEQ ID NO: 35004 - protein, 115 aa, Neisseria meningitidis; identical to SEQ ID NO: 2034

SEQ ID NO: 35005 - protein, 581 aa, Neisseria meningitidis
MERQTDEFAQAAARAAIWFLARYAGSGSEVLANCTERLFQALQNGHSFIRLSGGEADALSALAPVVGTSAAPLILEGRRLFLGRMWQLEYDLAAEIKRLAAAGTSAPDAAGARQNLAKWFQGTGSEGQRDAAALALLQSFMVITGGPGTGKTTTVAKLLALICGEDENLPNIALAAPTGKAAAHMARALHRAINGFDAPEAIRRHLLKLEGQTVHRLLKLRPPKMQAAFNPVYPLPFDVLVIDEASMLDTALMLQLLKAVKTGARVILLGDENQLPSVGIGAVLSVLSQKTVLDGETHQRLAGFLPEHGFSVSANPPVLAQNTAHLSFSHRFGDNSGIGCLARAAVSGDEGAWALFDRFPDELEHSECSPNARVERLYRAHKAYWQAVKDGNIEAAYAGISDIVVLAAWRQDAEDFNEAYCRHVRRKMNIPEHQAYFAGEPIMIRQNDYALELFNGDIGLIMEDVGRQGGLAAYFADADGFKKVAVSCLPDFEPAFAMTVHKSQGSEYREVWLLPPSAAPSDEGDDALSGLSRGLLYTAITRAREKFVFFGGEEAFRQAAVTVKTRQTALGSMLERVFSQE

SEQ ID NO: 35006 - protein, 765 aa, Neisseria meningitidis; identical to SEQ ID NO: 19654

SEQ ID NO: 35007 - protein, 636 aa, Neisseria meningitidis
MTLETLIALPRNIKKICFLIHDFLMIFIAFWFTQSLKADYSDEWFDPANWQSFLLTAFLTACLFFRMGLYRAVTRFISFRILSTALAGSLASAVLFFLNTLIFEERLRLALPIVYFLLLFVSVTGSRMVLRGLLSEHPKKQMAPVIIYGAGRSGRQLLKAVKQMREYSAAAFVDDDPKLWHTVIYDLAVYQPDAIAFLIERYGVEKILLAIPGATQEQRLRIINKLEAYPCEVLTIPGMKDLMDGKISIGTLKKISVSDLLGRDSVAPDDRLMNADIEGKTVMVTGAGGSIGSELCRQIIRRRPEKLLLFELSEFALYAIEKELRETCIQKRLDTEILPFLGSVQNRTLLEHVMTAFSVATVYHAAAYKHVPMVEFNTVEGIRNNIFGTLECALAATASGVRTFVLISTDKAVRPTNTMGAGKRMAELCLQALAAEPGQKTRFSMVRFGNVLGSSGSVVPLFEKQIAEGGPLTLTHPEITRYFMTIPEAAQLVIQAGAMGTGGDVFVLDMGESVKIIDLARQMITLSGLKPKTPEQPDGDIEILITGLRPGEKLYEELLIGDNVRKTGHPRIMTADEAMLPWHELSVLLDRIRAACDRYDQQAIRTLLINAPTGFTPSDGICDLLWVRETHRKNAV

SEQ ID NO: 35008 - protein, 95 aa, Neisseria meningitidis; identical to SEQ ID NO: 6196

SEQ ID NO: 35009 - protein, 161 aa, Neisseria meningitidis
MRFFGIGFLVLLFLEIMSIVWVADWLGGGWTLFLMAAGFAAGVLMLRHTGLSGLLLAGAAMRNGGRVSVYQMLWPIRYTVAAVCLMSPGFVSSVLAVLLLLPFKGGAVLQAGGAENFFNMNQSGRKEGFSRDDDIIEGEYTVEEPYGGNRSRNAIEHKKDE

SEQ ID NO: 35010 - protein, 306 aa, Neisseria meningitidis; identical to SEQ ID NO: 12560

SEQ ID NO: 35011 - protein, 403 aa, Neisseria meningitidis; identical to SEQ ID NO: 25566

SEQ ID NO: 35012 - protein, 252 aa, Neisseria meningitidis
MKKVSVLIVAKNEANHIQECIESCRFDKEVIVIDDYSTDNTAEIAEGLGAKVFRRHLNGDFGAQKTFAIEQAGGEWVFLIDADERCTPELSDEISKIVQTGDYAAYFVERRNLFPNHPATHGAMRPDSVCRLMPKKDSSVQGKVHETVQTPYPKRRLKHFMYHYTYDNWEQYFNKFNKYTSISAKKYREQGKPVRFVRDIILRPIWGFFKIYILNKGFLDGKMGWIMSVNHSYYTMIKYVKLYYLYKSGGKF

SEQ ID NO: 35013 - protein, 321 aa, Neisseria meningitidis
MSYTQLTQGERYHIQYLSRHCTVTEIAKQLNRHKSTISREIRRHRTQGQQYSAEKAQRQSRTIKQRKRQPYKLDSQLIQHIDTLIRRKLSPEQVCAYLRKHHRITLHHSTIYRYLRQDKSNGSTLWQHLRICSKPYRKRYGSTWTRGKVPNRVVIENRPAIVDQKSRIGDWEADTIVGKGQKSALLTLVERVTRYTIICKLDSLKAEDTARAAVRALKAHKDRVHTITMDNGKEFYQHTKITKALKAETYFCRPYHSWEKGLNENTNGLIRQYFPKQTDFRNISDREIRRVQDELNHRPRKTLGYETPSVLFLNLFQPLIH

SEQ ID NO: 35014 - protein, 421 aa, Neisseria meningitidis; identical to SEQ ID NO: 19068

SEQ ID NO: 35015 - protein, 96 aa, Neisseria meningitidis; identical to SEQ ID NO: 4744

SEQ ID NO: 35016 - protein, 226 aa, Neisseria meningitidis; identical to SEQ ID NO: 19445

SEQ ID NO: 35017 - protein, 195 aa, Neisseria meningitidis; identical to SEQ ID NO: 4477

SEQ ID NO: 35018 - protein, 289 aa, Neisseria meningitidis
MKRIFLPALPAILPLSAYADLPLTIEDIMTDKGKWKLETSLTYLNSENNRAELATPVYIQTGATSFIPIPTEIQENGSNTDMLVGTLGLRYGLTGNTDIYGSGSYLWHEERKLDGNSKTRNKRMSDVSLGISHTFLKDDKNPALISFLESTVYEKSRNKASSGKSWLIGATTYKAIDPIVLSLTAAYRINGSKTLSDGIRYKSGNYLLLNPNISFAANDRISLTGGIQWLGRQPDRTDGKRESSRNTSTYAHFGAGFGFTKTTALNASARFNVSGQSSSELKFGVQHTF

SEQ ID NO: 35019 - protein, 123 aa, Neisseria meningitidis; identical to SEQ ID NO: 26483

SEQ ID NO: 35020 - protein, 241 aa, Neisseria meningitidis; identical to SEQ ID NO: 19206

SEQ ID NO: 35021 - protein, 335 aa, Neisseria meningitidis
MSTFFQQTAQAMIAKHIDRFPLLKLDQVIDWQPIEQYLNRQKTRYLRDHRGRPACPLLSMFKAVLLGQWHSLSDPELEHSLITRIDFNLFCRFDELSIPDYSTLCRYRNWLAQDNTLSELLKLINRQLTEKGLKVEKASAAVVDATIIQTADSKQRQAIEVDEEGQINGQTTPSKDSDARWIKKNGLYKLGYKQHTRTDAEGYIEKLHITPANAHECKHLSPLLEGLPKGTTVYADKGYDSAENRQHLEEHQLLDGIMRKACRNRPLSEVQTKRNRYLSKTRYVVEQSFGTLHRKFRYARAAYFGLLKVSAQSHLKAMCLNLLKAANRLSAPAAA

SEQ ID NO: 35022 - protein, 1077 aa, Neisseria meningitidis
MKNQVRGSGMDARSNPANVSDGLQNSSSHIGTNTRYRLTKLGEQMARLPIDPKIARILLAAKKHDCMAEILVIASALSIQDPRERPLEARDAASKAHERFTDKQSDFLAYLNIWDSFQRERDKGLSNKQLVQWCRQYFLSHLRMREWRELHHQLAQTAIEMGLTTKEAAFRRSPEVRQLTSSENAGDQDLSAKLKQKQLDKKQHRAQIRAAKEAGYEQIHRALLTGLIANVGMKSPDGNDYTSTRGSRFHLFPASALFKAKPKWVMAAELVETTKLYARDVAAIQPEWIEQEAPHLVRYHYFEPHWEQKRGEVIASERVTLYGLTVLPRRPVSYGRIAPEEAREIFIRGALVAQECDLKADFFVHNKKLIKEITELEHKSRKQDVLVDDEALFAFYNERLPEMAWKDAQGSVWGSEDSVRIIESDKAERSSENERNEFRKNKRNGSRQNENHGNTVGWVENPTSAATAKTVGFDNPTYATQQPTPSPEREGRGEGKTVAAQTNFSATAANPLPQEREQSASASTFSDDLRPANLQQTAPSPVGEGWGESKTVATQTNFSATSTLSDDPKPKKQPAPQKGRLKPLPLADIRTFQAWLKTAECDNPRLLFLSRDDLMQHAAAHITEEQFPKFWQTADGKFKLSYRFEPHHPLDGVTMTVPLTVLNRLHAPSLEWLVPGMLREKIQLLIKALPKQIRRICVPVPDFITKFLESNPDRQATIIPQLAHFIAKSASDMRILEQIDQDAWAAQELPEHCYLNLRIIDDGGQELAGGRKLHELQQQLGQAAAVTFRDNTQEFERDNVTTWDIGTLPESIKFARGKQQLTGYLGLQKEKDGRIALRLFDTTEAAEQAHRQGVIELMKLQLKEQVKDLNKGIQGFTQAAMLLKHINADTLRDDLTQAVCDRAFIGEDELPRNEKAFKEQIKRARSRLPAVKEALSRYLQETAAAYAELNGKLGKHPLTHLLRLRLQTLLAAGFATRTPWAQWPRLPIYLKAMTLRLEKYSSNPARDAAREADIQELEQMWQEKTDGLVKQGLPVSDDLTAFRWMIEELRVSLFAQELKTPYPVSVKRLLKEWEKIF

SEQ ID NO: 35023 - protein, 313 aa, Neisseria meningitidis; identical to SEQ ID NO: 14013

SEQ ID NO: 35024 - protein, 322 aa, Neisseria meningitidis; identical to SEQ ID NO: 11074

SEQ ID NO: 35025 - protein, 214 aa, Neisseria meningitidis; identical to SEQ ID NO: 1408

SEQ ID NO: 35026 - protein, 135 aa, Neisseria meningitidis; identical to SEQ ID NO: 803

SEQ ID NO: 35027 - protein, 156 aa, Neisseria meningitidis; identical to SEQ ID NO: 19682

SEQ ID NO: 35028 - protein, 242 aa, Neisseria meningitidis; identical to SEQ ID NO: 24854

SEQ ID NO: 35029 - protein, 313 aa, Neisseria meningitidis; identical to SEQ ID NO: 24599

SEQ ID NO: 35030 - protein, 167 aa, Neisseria meningitidis; identical to SEQ ID NO: 24412

SEQ ID NO: 35031 - protein, 525 aa, Neisseria meningitidis
MRANPKTQAMPSETISLMKTRSLISLLCLLLCSCSSWLPPLEERTESRHFNTSKPVRLDNILQIRHTPHTNGLSDIYLLNDPHEAFAARAALIESAEHSLDLQYYIWRNDISGRLLFNLVYLAAERGVRVRLLLDDNNTRGLDDLLLALDSHPNIEVRLFNPFVLRKWRALGYLTDFPRLNRRMHNKSFTADNRATILGGRNIGDEYFKVGEDTVFADLDILATGSVVGEVSHDFDRYWASHSAHNATRIIRSGNIGKGLQALGYNDETSRHALLRYRETVEQSPLYQKIQTGRIDWQSVQTRLISDDPAKGLDRDRRKPPIAGRLQDALKQPEKSVYLVSPYFVPTKSGTDALAKLVQDGIDVTVLTNSLQATDVAAVHSGYVKYRKPLLKAGIKLYELQPNHAVPATKDKGLTGSSVTSLHAKTFIVDGKRIFIGSFNLDPRSARLNTEMGVVIESPKIAEQMERTLADTTPEYAYRVTLDRHNRLQWHDPATRKTYPNEPEAKLWKRIAAKILSLLPIESLL

SEQ ID NO: 35032 - protein, 139 aa, Neisseria meningitidis; identical to SEQ ID NO: 921

SEQ ID NO: 35033 - protein, 191 aa, Neisseria meningitidis
MKEKSTERTAPFFVLEVTARSAADILGIHPNSAALFYRKIRTVINHHLALAADEVFEGPVEPDESDFGGRRKGRRGRGAAGKVVVFGILKRNGRVYTVVVDNAKSETLLPVIKKKIMPDSIVYTDSLSSCDKLDVSGFIHYRINHSKEFADRQNHINGIENFWNQAKRVLRKYSGLARTFPRIGSATGCAD

SEQ ID NO: 35034 - protein, 284 aa, Neisseria meningitidis; identical to SEQ ID NO: 24731

SEQ ID NO: 35035 - protein, 220 aa, Neisseria meningitidis; identical to SEQ ID NO: 2583

SEQ ID NO: 35036 - protein, 165 aa, Neisseria meningitidis; identical to SEQ ID NO: 19855

SEQ ID NO: 35037 - protein, 100 aa, Neisseria meningitidis; identical to SEQ ID NO: 1476

SEQ ID NO: 35038 - protein, 121 aa, Neisseria meningitidis; identical to SEQ ID NO: 1070

SEQ ID NO: 35039 - protein, 68 aa, Neisseria meningitidis; identical to SEQ ID NO: 3910

SEQ ID NO: 35040 - protein, 335 aa, Neisseria meningitidis; identical to SEQ ID NO: 19241

SEQ ID NO: 35041 - protein, 97 aa, Neisseria meningitidis; identical to SEQ ID NO: 177

SEQ ID NO: 35042 - protein, 431 aa, Neisseria meningitidis
MSVIQDLQSRGLIAQTTDIEALDALLNEQKISLYCGFDPTADSLHIGHLLPVLALRRFQQAGHTPIALVGGATGMIGDPSFKAAERSLNSAETVAGWVESIRSQLTPFLSFEGGNAAIMANNADWFGKMNCLDFLRDIGKHFSVNAMLNKESVKQRIDRDGAGISFTEFAYSLLQGYDFAELNKRHGAVLEIGGSDQWGNITAGIDLTRRLNQKQVFGLTLPLVTKSDGTKFGKTEGGAVWLNAKKTSPYQFYQFWLKVADADVYKFLKYFTFLSIEEIDAVEAKDQASGSKPEAQRILAEEMTRLIHGEEALAAAQRISESLFAEDQSSLTESDFEQLALDGLPAFEVSDGINVVEALVKTGLASSNKEARGFVNSKAVLLNGKPAEANNPNHAAERPDDACLLTDEHKRFGKYTILRRGKRNHALLVWK

SEQ ID NO: 35043 - protein, 259 aa, Neisseria meningitidis
  misc_feature 2, 3: 'Xaa' is any amino acid
VXXLALSACATQGTVDKDAQITQDWSVEKLYAEAQDELNSSNYTRAVKLYEILESRFPTSRHARQSQLDTAYAYYKDDEKDKALAAIERFRRLHPQHPNMDYALYLRGLVLFNEDQSFLNKLASQDWSDRDPKANREAYQAFAELVQRFPNSKYAADATARMVKLVDALGGNEMSVARYYMKRGAYIAAANRAQKIIGSYQNTRYVEESLAILELAYQKLGKPQLAADTRRVLETNFPKSPFLTHAWQPDDMPWWRYWH

SEQ ID NO: 35044 - protein, 66 aa, Neisseria meningitidis; identical to SEQ ID NO: 1185

SEQ ID NO: 35045 - protein, 281 aa, Neisseria meningitidis; identical to SEQ ID NO: 19438

SEQ ID NO: 35046 - protein, 383 aa, Neisseria meningitidis; identical to SEQ ID NO: 8491

SEQ ID NO: 35047 - protein, 644 aa, Neisseria meningitidis
MSLIECKNINRYFGSGENRVHILKDISLSIEKGDFVAIIGQSGSGKSTLMNILGCLDTAGSGSYRIDGIETAKMQPDELAALRRERFGFIFQRYNLLSSLTARDNVALPAVYMGAGGKERSARAEKLLQDLGLASKEGNKPGELSGGQQQRVSIARALMNGGEIIFADEPTGALDTASGKNVMEIIRRLHEAGHTVIMVTHDPGIAANANRVIEIRDGEIISDTSKNPEIPASNVGRIQEKASWSFYYDQFVEAFRMSVQAVLAHKMRSLLTMLGIIIGIASVVSVVALGNGSQKKILEDISSIGTNTISIFPGRGFGDRRSGRIKTLTIDDAKIIAKQSYVASATPMTSSGGTLTYRNTDLTASLYGVGEQYFDVRGLKLETGRLFDENDVKEDAQVVVIDQNVKDKLFADSDPLGKTILFRKRPLTVIGVMKKDENAFGNSDVLMLWSPYTTVMHQITGESHTNSITVKIKDNANTQVAEKGLTDLLKARHGTEDFFMNNSDSIRQIVESTTGTMKLLISSIALISLVVGGIGVMNIMLVSVTERTKEIGIRMAIGARRGNILQQFLIEAVLICVIGGLVGVGLSAAVSLVFNHFVTDFPMDISAASVIGAVACSTGIGIAFGFMPANKAAKLNPIDALAQD

SEQ ID NO: 35048 - protein, 475 aa, Neisseria meningitidis
MIHTEPSAQPSTMDTAAFLKHIESAFRRIFSDGIDLMRYLPEDKWLALKQAGLLLPFLDKKYGGRKGSQFEIQEVLRIAGHYGVPVTLRTGIEGALVLQPLQEFGGEAQVAQGLEMIFKGEGGGLGVTEPETSGAAIAREMQSYYEYTDGQTIYVNAAKYWQGNSQSDFLLVAAKERKNGKLAKVIDLLLVPKTYIRCETLASEGLRAVRYAVNRIDAEMPATAVMKLSQSDAAGLRAFQNIFIRSRLQLIGMTHGIMEYILENLERYVRNDIRFVDYERREIRRRHQVSEILYRYVCHSVSPVAPVAHQLMEANIVKTLATEYTYAAAQMLQKLLGAKGFERGHTAGNIAIDIRPFTIFEGPNDMLYAEIYDQFVRATAEEKEAGIKLDKNQTLLDRLQTDARFAAVARDYTLPEDIRSFLQEHTLTDACALQKVFIGKIIARLFVFVQAEHEDTAAFLLNDIRKDILDCRYCG

SEQ ID NO: 35049 - protein, 189 aa, Neisseria meningitidis; identical to SEQ ID NO: 14521

SEQ ID NO: 35050 - protein, 177 aa, Neisseria meningitidis; identical to SEQ ID NO: 7904

SEQ ID NO: 35051 - protein, 434 aa, Neisseria meningitidis; identical to SEQ ID NO: 2219

SEQ ID NO: 35052 - protein, 343 aa, Neisseria meningitidis; identical to SEQ ID NO: 19192

SEQ ID NO: 35053 - protein, 107 aa, Neisseria meningitidis; identical to SEQ ID NO: 2524

SEQ ID NO: 35054 - protein, 92 aa, Neisseria meningitidis; identical to SEQ ID NO: 18803

SEQ ID NO: 35055 - protein, 135 aa, Neisseria meningitidis; identical to SEQ ID NO: 18606

SEQ ID NO: 35056 - protein, 548 aa, Neisseria meningitidis
MKHLHDLPAWSKLWNHFDDSKTLHMREMFEQDPQRAERYWLQVGGLTLDYSKNRINDETMSLLFELAREAGVPERMRQMFHGEKINTTENRAVLHVALRNRTNSPIVVDGEDVMPKVNRVLQRMGEFAHEVRSGSWLGYTNQVITDVVNIGIGGSDLGPLMMCTALKPFGHPRLNMHFVSNVDGSQLRDVLSKVHPETTLFIIASKTFTTQETLTNALTAREWFLNHAGDEEAVAKHFAAVSTNQKAVAEFGIDTANMFEFWDWVGGRYSLWSAIGLPIMLYLGEENFIEMLNGAHLMDQHFINTPLERNLPVILALIGIWYINYYGGGSHVIAPYDQHLHRLPKFIQQLDMESNGKQVTLDGKAVGHETSPIIWGETGINGQHAFFQLLHQGTHITPIDLIASLEKRSNLPGHHEILLANVFAQAEAFMRGKTPDEVRAELKAQGMDEARIEELVPHKTFSGNRPTNLILMDKVNPRNMGSLIAMYEHKTFVQGIIWGINSFDQWGVELGKQLAKTILGELTGETGPQKHDSSTERLINLYLQTNRK

SEQ ID NO: 35057 - protein, 252 aa, Neisseria meningitidis; identical to SEQ ID NO: 1597

SEQ ID NO: 35058 - protein, 572 aa, Neisseria meningitidis
LLVILAVIPLKTLAADENDAELIRSMQRQQHIDAELLTDANVRFEQPLEKNNYVLSEDETPCTRVNYISLDDKTVRKFSFLPSVLMKETAFKTGMCLGSNNLSRLQKAAQQILIVRGYLTSQAIIQPQNMDSGILKLRVSAGEIGDIRYEEKRDGKSAEGSISAFNNKFPLYRNKILNLRDVEQGLENLRRLSSVKTDIQIIPSEEEGKSDLQIKWQQNKPIRFSIGIDDAGGKTTGKYQGNVALSFDNPLGLSDLFYVSYGRGLAHKTDLTDATGTETASGSRSYSVHYSVPVKKWLFSFNHNGHRYHEATEGYSVNYDYNGKQYQSSLAAERMLWRNRLHKTSVGMKLWTRQTYKYIDDAEIEVQRRRSAGWEAELRHRAYLNRWQLDGKLSYKRGTGMRQSMPAPEENGGGTIPGTSRMKIITAGLDAAAPFMLGKQQFFYATAIQAQWNKTPLVAQDKLSIGSRYTVRGFDGEQSLFGERGFYWQNTLTWYFHPNHQFYLGADYGRVSGESAQYVSGKQLMGAVVGFRGGHKVGGMFAYDLFAGKPLHKPKGFQTTNTVYGFNLNYSF

SEQ ID NO: 35059 - protein, 706 aa, Neisseria meningitidis
MRRFLPIAAICAVVLLYGLTAATGSTSSLADYFWWIVAFSAMLLLVLSAVLARYVILLLKDRRDGVFGSQIAKRLSGMFTLVAVLPGVFLFGVSAQFINGTINSWFGNDTHEALERSLNLSKSALNLAADNALGNAVPVQIDLIGAASLPGDMGRVLEHYAGSGFAQLALYNAASGKIEKSINPHKLDQPFPGKARWEKIQRAGSVRDLESIGGVLYAQGWLSAGTHNGRDYALFFRQPVPKGVAEDAVLIEKARAKYAELSYSKKGLQTFFLATLLIASLLSIFLALVMALYFARRFVEPVLSLAEGAKAVAQGDFSQTRPVLRNDEFGRLTKLFNHMTEQLSIAKEADERNRRREEAARHYLECVLEGLTTGVVVFDEQGCLKTFNKAAEQILGMPLTPLWGSSRHGWHGVSAQQSLLAEVFAAIGAAAGTDKPVHVKYAAPDDAKILLGKATVLPEDNGNGVVMVIDDITVLIHAQKEAAWGEVAKRLAHEIRNPLTPIQLSAERLAWKLGGKLDEQDAQILTRSTDTIVKQVAALKEMVEAFRNYARSPSLKLENQDLNALIGDVLALYEAGPCRFAAELAGEPLMVAADTTAMRQVLHNIFKNAAEAAEEADVPEVRVKSEVGRDGRIVLTVCDNGKGFGREMLHNAFEPYVTDKPAGTGLGLPVVKKIIEEHGGRISLSNQDAGGACVRIILPKTVKTYA

SEQ ID NO: 35060 - protein, 431 aa, Neisseria meningitidis
LSGVGKLARLGAKLSTRAVPYVGTALLAHDVYETFKEDIQAQGYQYDPETDKFVKGYEYSNCLWYEDERRINRTYGCYGVDSSIMRLMSDYSRFPEVKELMESQMYRLARPFWNWHKEELNKLSSLDWNNFVLNRCTFDWNGGDCVVNKGDDYRNGANFSLSRNPKYKEEMDAKKLEEILSLKVDANPDKYIKATGYPGYSEKVEVAPGTKVNMGPVTDRNGNPVQVVATFGRDSQGNTTVDVQVIPRPDLTPGSAEAPNAQPLPEVSPAENPANNPNPNENPGTSPNPEPDPDLNPDANPDTDGQPGTRPDSPAVPGRTNGRDGEDGGLLCKFFPDILACDRLPEPNPAEDLNLPSETVNVEFQKSGIFQNSAQCPAPVTFTVTVLDSSRQFAFSFENACTIAERLRYMLLALAWAVAAFFCIRTVSREV

SEQ ID NO: 35061 - protein, 328 aa, Neisseria meningitidis; identical to SEQ ID NO: 991

SEQ ID NO: 35062 - protein, 64 aa, Neisseria meningitidis; identical to SEQ ID NO: 6312

SEQ ID NO: 35063 - protein, 87 aa, Neisseria meningitidis; identical to SEQ ID NO: 1364

SEQ ID NO: 35064 - protein, 75 aa, Neisseria meningitidis; identical to SEQ ID NO: 8304

SEQ ID NO: 35065 - protein, 405 aa, Neisseria meningitidis; identical to SEQ ID NO: 13355

SEQ ID NO: 35066 - protein, 291 aa, Neisseria meningitidis
MFQKHLQKASDSVVGGTLYVVATPIGNLADITLRALAVLQKADIICAEDTRVTAQLLSAYGIQGQLVSVREHNERQMADKIVGYLSDGMVVAQVSDAGTPAVCDPGAKLARRVREVGFKVVPVVGASAVMAALSVAGVAGSDFYFNGFVPPKSGERRKLFAKWVRAAFPIVMFETPHRIGATLADMVELFPERRLMLAREITKTFETFLSGTVGEIQTALSADGNQSRGEMVLVLYPAQDEKHEGLSESAQNIMKILTAELPTKQAAELAAKITGEGKKALYDLALSWKNK

SEQ ID NO: 35067 - protein, 115 aa, Neisseria meningitidis; identical to SEQ ID NO: 19291

SEQ ID NO: 35068 - protein, 136 aa, Neisseria meningitidis; identical to SEQ ID NO: 8545

SEQ ID NO: 35069 - protein, 419 aa, Neisseria meningitidis; identical to SEQ ID NO: 18862

SEQ ID NO: 35070 - protein, 71 aa, Neisseria meningitidis
MKKGRGGKPMTNHSMFPKDWDEARIRAEVTSAWEKRKELEGQKWRGTSKSGVEIEGFTEPNRTAYPLYNSK

SEQ ID NO: 35071 - protein, 2479 aa, Neisseria meningitidis
VKSVPFGTTHAPVCRSNIFSFSLLGFSLCLAVGTANIAFADGIIADKAAPKTQQATILQTGNGIPQVNIQTPTSAGVSVNQYAQFDVGNRGAILNNSRSNTQTQLGGWIQGNPWLARGEARVVVNQINSSHSSQMNGYIEVGGRRAEVVIANPAGIAVNGGGFINASRATLTTSQPQYQAGALTGFQVRSGHVAITGQGLDARDTDFTRILSYHSKIDAPVWGQDVRVVAGQNDVVATGNAHSPILNNAAANTSNNTANNGTHIPLFAIDTGKLGGMYANKITLISTAEQAGIRNQGQLFASSGNVAIDANGRLVNSGTMAAANAKDTDNTAEHKVNIRSQGVENSGTAVSQQGTQIHSQSIQNTGTLLSSGEILIHNSGSLKNETSGTIEAARLAIDTDTLNNQGKLSQTGSQKLHIDAQGKMDNRGRMGLQDTAPTASNGSSNQTGNSYNASSHSSTTTPTTATGTGTATVSISNITAPTFADGTIRTHGALDNSGSIIANGQTDVSAQQGLNNAGQIDIHQLNAKGSAFDNHNGTIISDAVHIQAGSLNNQNGNITTRQQLEIETGQLDNAHGKLLSAEIADLAVSGSLNNQNGEIATNQQLIIHDGQQSTAAIDNTNGTIQSGRDVAIQAKSLSNNGTLAADNKLDIALQDDFYVGRKIVAGNELSLSTRGSLKNSHTLQAGKRIRIKANNLDNAAQGNIQSGGTTDIGTQHNLTNRGLIDGQQTKIQAGQVNNIGTGRIYGDNIAIAATRLDNQDENGTGAAIAARENLNLGIGQLNNRENSLIYSGNDMAVGGALDTNGQATGKAQSIRNASATIEAAGKMRLGVEKLHNTNEHLKTQLVETGREHIVDYEAFGRHELLREGTQHELGWSVYNDESDHLRTPDRAAHENWHKYDYEQVTQKTQVTQTAPAKIISGNDLTIDGKEVFNTDSQIIAGGNLLVQTEKDGLHNEQTFGEKKVFSENGKLHSYWREKHKGRDSTGHSEQNYTLPEEITRNISLGSFAYESHRKALSHHAPSQGTELLQSNGISLPYTSNSFTPLPSSSLYIINPVNKGYLVETDPRFANYRQWLGSDYMLDSLKLDPNNLHKRLGDGYYEQRLINEQIAELTGHRRLDGYQNDEEQFKALMDNGATAARSMNLSVGIALSAEQVAQLTSDIVWLVQKEVKLPDGGTQTVLVPQVYVRVKNGDIDGKGALLSGSNTQINVSGSLKNSGTIAGRNALIINTDTLDNIGGRIHAQKSAVTATQDINNIGGILSAEQTLLLNAGNNINSQSTAASSQNTQGSSTYLDRIAGIYITGTEKGVLAAQAGKDINIIASQISNQSEQGQTQLQAGRNINLDTVQTGKHQATHFDADNHVIRGSTNEVGSSIQTKGDVALLSGNNLNAKAAEVGSANGTLAVSAKNDINISAGINTTHVDDASKHKGRSGGGNKLVITDKAQSHNETAQSSTFDGKQVVLQAGNDANIKGSNVISDNGTHIQAGNHVHIGTTLTHNQSETYHQTKKSGLMSAGIGFTIGSKTNTQENQSQSNEHTGSTVGSLKGDTTIVAGKHYEQIGSTVSSPEGNNTIHAQSIDIQAAHNQLNSNTSQTYEQKGLTVAFSSPVTDLAQQAIAVAQSGKQVGQSKNGRVNAMAAANAGWQAYQTGKSAQNLANGTTNAKQVSISITYGEQQNRQTTQVQANQAQASQIQAGGKTTLIATGAAEQSNINIAGSDIAGKAGTILIADNDITLQSAEQSNTERSQNKSSGWNAGAAVSFGQGGWSLGVTAGGNVGKGHGNGDSVTHRHSHIGDKGSQTVLQSGGDTALKGAQVIGKGVQVNAQNLHIQSVQDSETYQSKQQNASAQVTVGYGFSAGGDYSQSKIRADHVSVTEQSGIYAGEDGYQIKVGNHTDLKGGIITSTQSAEDKGKNRFQTATLTHSDIKNHSQYKGESFGLGASASISGKTLGQGAQNKPQNKHLTSVADKNGASSSVGYGSDSDSQSSITKSGINTQNIQITDEAAQIRLTGKTAAQTKADIGTNVTTDTAERHSGSLKNTFNREAVQNELDLQREVTQEFDKTRQGVKQELYAVVDSKRAQATQERLKNGGYDNDKSRALNKEANELDEKIRWLDAGLGLVWGAGSSDMAWSMFATTQADRAVRSATAPKEMWFHKKIIDEKTGKVSFDTRQIWSLNDLSKEELASIQDTNGKVITVSNPGIFNNREDSLSNAAKQNRNSTNGSGVIAVMNPPTGKYKSDSNNKIKDFLWLGSSLVSELMYVGYDQLNNKVFQGYLPKTNSEKLNQDIYREVQKMGNGWSVDTSNHSRGGITASVSLKDWVNNQKQNGIAPIRKARFYGTATNVQNDYADVLQKNGYTYTGADGKTYNSGSYSIVHDKDFVGNKWIPFLLGTNDTTQGTCKGFCYSHSSYFAEVPEQYKRDKNGNFVTDNEGNKIETKDWDSYTKIWGIPKKGTDGKDINHAIPKLVNPNKPNGEKYEENPF

SEQ ID NO: 35072 - protein, 65 aa, Neisseria meningitidis; identical to SEQ ID NO: 25330

SEQ ID NO: 35073 - protein, 103 aa, Neisseria meningitidis; identical to SEQ ID NO: 1278

SEQ ID NO: 35074 - protein, 78 aa, Neisseria meningitidis
  misc_feature 72, 73: 'Xaa' is any amino acid
MTDITPFANRLGKNIKHFMKWVKRNGIEAWRIYDRDIPQFPFAADVYGDRIHLQEYDTGWLMRPEEYEAWLXXTHLIN

SEQ ID NO: 35075 - protein, 158 aa, Neisseria meningitidis; identical to SEQ ID NO: 19791

SEQ ID NO: 35076 - protein, 214 aa, Neisseria meningitidis; identical to SEQ ID NO: 19612

SEQ ID NO: 35077 - protein, 65 aa, Neisseria meningitidis; identical to SEQ ID NO: 27078

SEQ ID NO: 35078 - protein, 1491 aa, Neisseria meningitidis; identical to SEQ ID NO: 19610

SEQ ID NO: 35079 - protein, 43 aa, Neisseria meningitidis
MYIYDFYLPEGEYLFEISDNSEYIPLYDEINNSIRIVVNARIQ

SEQ ID NO: 35080 - protein, 147 aa, Neisseria meningitidis; identical to SEQ ID NO: 2466

SEQ ID NO: 35081 - protein, 335 aa, Neisseria meningitidis
MSTFFQQTAQAMIAKHIDRFPLLKLDQVIDWQPIEQYLNRQKTRYLRDHRGRPACPLLSMFKAVLLGQWHSLSDPELEHSLITRIDFNLFCRFDELSIPDYSTLCRYRNWLAQDNTLSELLKLINRQLTEKGLKVEKASAAVVDATIIQTADSKQRQAIEVDEEGQINGQTTPSKDSDARWIKKNGLYKLGYKQHTRTDAEGYIEKLHITPANAHECKHLSPLLEGLPKGTTVYADKGYDSAENRQHLEEHQLLDGIMRKACRNRPLSEVQTKRNRYLSKTRYVVEQSFGTLHRKFRYARAAYFGLIKVSAQSHLKAMCLNLLKAANRLSAPAAA

SEQ ID NO: 35082 - protein, 296 aa, Neisseria meningitidis
VSEIHQIYWEESGNPDGVPVIFLHGGPGAGASPECRGFFNPDVFRIVIIDQRGCGRSRPYACAEDNTTWDLVADIEKVREMLGIRKWLVFGGSWGSTLSLAYAQTHPERVKGLVLRGIFLCRPSETAWLNEAGGVSRIYPEQWQKFVAPIAENRRNRLIEAYHGLLFHQDEEVCLSAAKAWADWESYLIRFEPEEVDEDAYASLAIARLENHYFVNGGWLQGDRAILNNIGKIRHIPTIIVQGRYDLCTPMQSAWALSKAFPEAELRVVQAGHRAFDPPLADALVQAVEDILPRLL

SEQ ID NO: 35083 - protein, 323 aa, Neisseria meningitidis
MTEYPGIGSPLFYGVFFAAVLVMIALDMFSLKKNGSHKVGVKEALAWSGLWVAVSCLFAGWLYFELAGNPGYGAAVAKEKVLEFFTGYILEKSLAVDNIFVFLMIFGYFKVAPQFQHRVLLYGVLGALVLRTVMIFVGAALVRQFEWILYLFGAFLLYTGIHMMKPEGDEKEDLANSRLLNAVKKVVPVGTEFHGEKFFTVENGKKIATPLFLVLVMIELSDVVFAVDSIPAVFAVTTDPFIVLTSNIFAILGLRAMYFLLADVAERFVFLKYGLAFVLGFIGVKMLIMHWVHIPISVSLSVVFGALGASVLTSLVYTKKTGR

SEQ ID NO: 35084 - protein, 1161 aa, Neisseria meningitidis
MRLTHIKLSGFKSFTDPTTIHVPGQLVAVIGPNGCGKSNVIDAVRWVLGEASAKQLRGESMQDVIFNGAATRRPAPRASVELVFDNSDHSLQGAWGQYAEVSIKRQLTRQGESTYFINNQTVRRRDITDLFLGTGVGARGYAVIEQGMISRIIEARPEELRAYIEEAAGVSKYKERRKETEGRLKDTREHLQRLGDLQNELARQVEKLEKQAETAERYKSLTAQLNRQQDLLDYAQWQQSLAAADKATEQHQSLQAQQDETAAQVQALNDEVHALQTAEQSQQQAVHELSNKRGVLREQIARLEEQIRHQQNLHQRIERDKQAAQAQMQRIHQEQQQIRVQLEENELYVEEKQTELAEWAMQVAEHEERLPELEETQTALNAAFQTQQDEANRIRRELALKQQQLAHAEQTVAKHEERKGRLKQENQALNLPDEAETAAAQEAAALLQSRQEHYEEQIIAAEEALHAAREAFQTASNRFQSLKQQHITLQAQQQALSQILSQQQEAADFWQATGHAAAPQLWQHITAPAEWQHALSVILAERLHARDVPQGFVPPEPLPQGQAAWLSDGLSGGIKKSLPVQALLNQIQAQPPFQTALHHWLDGVLCAPDLSYALAHQSDLGAHQIWLTPEGHQVDKVSVLLYAKPAQESLIAQKARLDGIASELESLAPELSAAEAAFKQAEAAVRSSEVQHKNLMQQQQQHTRQYSQAQQRAAELLARTNQGQIRREHIERELAQLAEEQTVLQHASDGLSDDIATLQEAAAELEHQQQTAAHSRQEQQGRLKQAQLALLEANRQYGLAEVAVHKLNQQKQNYQQQIARLEQQTLDWQERQQELVLAYETEFQNDEQHIKLDELTESVHTLDEEYIAVQEKLTQIQEQGREQYARVQTLQTQLPQLQAATQTALLQQQEALINAKRYHQNLTERAADLDALEALAKESPKVLNSSIGSLSQQIEALGAVNLAALQELEEARERDGYYRSQSEDVQAAITILEEAIAQIDDKTKARFKETFDAVNGKVQTFFPTLFGGGEATLKMIGDDLLTAGVSIMARPPGKKNSTIHLLSGGEKALTAMSLVFALFSLNPAPFCLLDEVDAPLDDANTSRFCNLVKEMSAQTQFLYISHNRLTMEMAEQLVGVTMQEKGVSRVVAVDIKQALEMAEAV

SEQ ID NO: 35085 - protein, 156 aa, Neisseria meningitidis; identical to SEQ ID NO: 33882

SEQ ID NO: 35086 - protein, 444 aa, Neisseria meningitidis; identical to SEQ ID NO: 19657

SEQ ID NO: 35087 - protein, 101 aa, Neisseria meningitidis
MITLTHYLVLGALLFGISAMGIFMNRKNVLVLLMSIELMLLAVNFNFIAFSQHLGDTAGQIFVFFVLTVAAAESAIGLAIMVLVYRNRQTINVADLDGLKG

SEQ ID NO: 35088 - protein, 214 aa, Neisseria meningitidis; identical to SEQ ID NO: 3176

SEQ ID NO: 35089 - protein, 590 aa, Neisseria meningitidis
MIPSDFIDELLAKTDIVDIIDEQVPLKKGGANYMACCPFHKEKTPSFSVSPTKQFYHCFSCGAHGSAIGFVMEHQGLSFPEAVQFLADRVGMVVPKVRGQNDNPEVRAERKKKQQTLEETTAAAADFYAQQLKFNPAAKAYLDKRGLSAEVIAHYGLGYAPDGWQPLAQVFQPYPNTALVDTGMVIDNEGRYYDRFRHRIMFPIRNPRGQVIGFGGRVLDDSKPKYLNSPDTPLFDKGKNLYGLYEGRAAVKEVGRILVVEGYMDVVALAQFGVGYGVAALGTATTAEHVKILMRQADSIYFCFDGDSAGRKAAWRALENALPQLKDDKSLHFLFLPEEHDPDSYIRAYGKAQFEDALLNQSKPLSEYFWEHLSDGIHLNTQEGKAELVKTSSPLLAQITAPALAYLLKQRLSELVGIDPDNLAQLLGQEAPKRHVKQKNYKLPPISVKQPVMLTLVQRQIRSLLINPDWAAYIDLPDYLALDGDFACLANLAESIKNHAAVPETAQVLEYMRGSPYEETITRIFHSTHQSEEMNSSSEEDCENFQIGMKKLLNELKYSQIETLKQKSLQSGLNESEKKLLLSLLTAKQN

SEQ ID NO: 35090 - protein, 259 aa, Neisseria meningitidis; identical to SEQ ID NO: 18496

SEQ ID NO: 35091 - protein, 381 aa, Neisseria meningitidis; identical to SEQ ID NO: 18979

SEQ ID NO: 35092 - protein, 325 aa, Neisseria meningitidis
MIYPWHNEQWRQIAEHWERRPNAWLFAGKKDTGKTTFARFAAKALLCETPSPGCKPCGECMSCHLFGQGSHPDFYEITPLSDEPENGRKLLQIKIDAVREIIDNVYLTSVRGGLRVILIHPAESMNVQAANSLLKVLEEPPPQVVFLLVSHAADKVLPTIKSRCRKMVLPAPSHGEALAYLRDRGVAEPEEFLAFHSGAPLFDEADGVRALRIKLLDILAEPRLLKILDYAALFDKEKLPLDVFVGWMQKWLVDLGLCLQHMKPVYYPAYEDRLLQTASGFRPRNVFAAEDMLKQLAPYGFHTLNVKMQIEHLLINYLELKKENG

SEQ ID NO: 35093 - protein, 162 aa, Neisseria meningitidis
  misc_feature 157, 158: 'Xaa' is any amino acid
MRIPLLAPDNYAFPDPAYALARCDGLVGVSRDLDAGRLLEAYQNGVFPWFLRDGWFFWYAVGPRAVIVPERLHVPCSLAKTLRNGSYRVAVNGCFAEVVAHCAAAARPNQDGTWIAPEFQTAYLKLHEMGYAHSFECHYPDENGKTRLAGGFYGVQXXHTLN

SEQ ID NO: 35094 - protein, 90 aa, Neisseria meningitidis; identical to SEQ ID NO: 1142

SEQ ID NO: 35095 - protein, 352 aa, Neisseria meningitidis
MITPQQAIERLISNNELFYDEMTDLMRQIMSGKVPPEQIAAILTGLRIKVETVSEITAAAAVMREFATKVPLENAEGLVDIVGTGGDGAKTFNISTTSMFVAAAAGAKVAKHGGRSVSSSSGAADVVEQMGANLNLTPEQVAQSIRQTGIGFMFAPNHHSAMRHVAPVRRSLGFRSIFNILGPLTNPAGAPNQLLGVFHTDLCGILSRVLQQLGSKHVLVVCGEGGLDEITLTGKTRVAELKDGKISEYDIRPEDFGIETRRNLDEIKVANTQESLLKMNEVLEGREGAARDIVLLNTAAALYAGNVAASLSDGISAAREAIDSGRAKSKKEEFVGFQPQQRCHFLGKMELG

SEQ ID NO: 35096 - protein, 321 aa, Neisseria meningitidis; identical to SEQ ID NO: 34956

SEQ ID NO: 35097 - protein, 310 aa, Neisseria meningitidis; identical to SEQ ID NO: 25531

SEQ ID NO: 35098 - protein, 280 aa, Neisseria meningitidis; identical to SEQ ID NO: 986

SEQ ID NO: 35099 - protein, 268 aa, Neisseria meningitidis; identical to SEQ ID NO: 3556

SEQ ID NO: 35100 - protein, 796 aa, Neisseria meningitidis; identical to SEQ ID NO: 19010

SEQ ID NO: 35101 - protein, 275 aa, Neisseria meningitidis; identical to SEQ ID NO: 67

SEQ ID NO: 35102 - protein, 91 aa, Neisseria meningitidis; identical to SEQ ID NO: 1012

SEQ ID NO: 35103 - protein, 107 aa, Neisseria meningitidis; identical to SEQ ID NO: 178

SEQ ID NO: 35104 - protein, 219 aa, Neisseria meningitidis; identical to SEQ ID NO: 18178

SEQ ID NO: 35105 - protein, 311 aa, Neisseria meningitidis; identical to SEQ ID NO: 5677

SEQ ID NO: 35106 - protein, 146 aa, Neisseria meningitidis; identical to SEQ ID NO: 1069

SEQ ID NO: 35107 - protein, 142 aa, Neisseria meningitidis
  misc_feature 2, 3, 4: 'Xaa' is any amino acid
VXXXLTNVELSERVALSPSPCLRRLKQLEDAGIVRQYAALLSPESVNLGLQAFIRVSIRKAKDAREDFAASVRKWPEVLSCFALTGETDYLLQAFFTDMNAFSHFVLDTLLSHHGVQDAQSSFVLKEIKHTTSLPLNHLLKE

SEQ ID NO: 35108 - protein, 859 aa, Neisseria meningitidis
MRYDKLTAKFQQALAEAQSLALAADGSYLEAGFVLKALLDDQNSGAAALLAHAGVNVPQVKQRLQQHLNSLPKVSGQGGDIMPSRELQAVLNLMDKAATKRGDAYIASELFLLALVQQNDATGKILKEAGATEQNINAAIDAVRGGQNVNDANAEDQRDALKKYTLDLTQRARDGKLDPVIGRDDEIRRAIQVLQRRTKNNPVLIGEPGVGKTAIVEGLAQRIVNGEVPESLRNKRLLVLDLAALIAGAKYRGEFEERLKGVLNDLAKDDGNTLIFIDEIHTLVGAGKTDGAMDAGNMLKPALARGELHCIGATTLDEYRQYIEKDAALERRFQKVLVGEPSVEDTIAILRGLQERYEIHHGIDITDPAIVAAAELSDRYITDRFLPDKAIDLIDEAASRVKMEKETKPEAMDKIDRRLIQLRMEKAHVEKEKDDASKKRLELIDEEINGLQKEYADLDEIWKAEKAISDGAANIKKQIDEVKIKIEQAKRQGDLALASKLMYEDLEHLEKQRAAAERADTDSTKPANKLLRNNVGAEEIAEVVSRMTGIPVSKMMEGERDKLLKMEEVLHRRVVGQDEAVRAVSDAIRRSRSGLADPNKPYGSFLFLGPTGVGKTELCKALAGFLFDSEDHLIRIDMSEYMEKHAVARLIGAPPGYVGYEEGGYLTEQVRRKPYSVILLDEVEKAHPDVFNILLQVLDDGRLTDGQGRTVDFKNTVIVMTSNIGSQHIQQMGTQDYEAVKEVVMEDVKEHFRPEMINRIDEVVVFHGLDQANIRSIAKIQLKGLEKRLEKQNLRLTVSDAALDIIAKAGFDPIYGARPLKRAIQSEIENPLAKALLAGNYAPESEIRVEADGDRLKFA

SEQ ID NO: 35109 - protein, 240 aa, Neisseria meningitidis; identical to SEQ ID NO: 18055

SEQ ID NO: 35110 - protein, 445 aa, Neisseria meningitidis
MTFQNKKILVAGLGGTGISMIAYLRKNGAEVAAYDAELKPERVSQIGKMFDGLVFYTGRLKDALDNGFDILALSPGISERQPDIEAFKQNGGRVLGDIELLADIVNRRGDKVIAITGSNGKTTVTSLVGYLCIKCGLDTVIAGNIGTPVLEAEWQREGKKADVWVLELSSFQLENTESLRPTAATVLNISEDHLDRYDDLLDYAHTKAKIFRGDGVQVLNVDDAFCRAMKRAGREVKWFSLEHEADFWLERETGRLKQGNEDLIATKDIPLQGLHNAANVMAAVALCEAVGLPREALLEHVKTFQGLPHRVEKIGEKNGVVFIDDSKGTNVGATAAAIAGLQNPLFVILGGMGKGQDFTPLRDALAGKAKGVFLIGVDAPQIRRDLDGCGLNMTDCATLEEAVQTAYAQAEACDIVLLSPACASFDMFKGYAHRSEVFIEAFKAL

SEQ ID NO: 35111 - protein, 60 aa, Neisseria meningitidis; identical to SEQ ID NO: 6474

SEQ ID NO: 35112 - protein, 377 aa, Neisseria meningitidis
MSTPALLVLADGSVFHGTSIGYEGSTSGEVVFNTSMTGYQEILTDPSYCKQIVTLTYPHIGNTGTNAEDEESRSVYAAGLIIRDLPLLHSNFRASESLHDYLVRNKTVAIADIDTRRLTTLLREKGAQGGAILTGADATVEKAQELIAAFGSMVGKDLAKEVSCTETYEWTEGEWALGKGFVTPDEQPYHVVAYDFGVKTNILRMLASRGCRLTVVPAQTSAEDVLALNPDGVFLSNGPGDPEPCTYAIEAVQKLMESGKPIFGICLGHQLISLAIGAKTLKMRFSHHGANHPVQDLDSGKVVITSQNHGFAVDADTLPANARITHKSLFDNTLQGIELTDKPVFCFQGHPEASPGPQDVGYLFDKFIGNMKAAKRA

SEQ ID NO: 35113 - protein, 468 aa, Neisseria meningitidis
MTAAPDILYRQAAALLEQSNTAQALPLLQQAAEQGYAEAAFVLGNHLLQNGQPEQALSWLEAAAAQRHPKALFSLLQQREHNGTPTGQLLNDYAWLGEQGHSEAQLILMRYHAQRNDPQSLYWAELAAARYAAPAYYHLARHHQRQGDVETAIEQYEKAAALGVTAACWQLGQIYFYGTGVSPNHAQAEHYLEPAAQAGHIAAQTLLADLLAAQRKPEALEWYRRAANKEQAEAQSKLAQYALTGELSERDPFQAARYAKAAAEKNHPEALKIMGDLYRYGLGIKADNHIAQDYYHRAAALGSAAAAQKLISDAALYHPQQYEQIKTAALQQQQTETIYRLAEAQACAIGRPADYNAARKNYMEAAGFHHKNAAAALGRIYHYGLGTAQDPRAAAHWYAIAAEQNHPSAQYHLACFYYHGQGVGCHVPTACYWLQAAIGNGHTSAESLISLLEQWRREAHHAIGQKAV

SEQ ID NO: 35114 - protein, 467 aa, Neisseria meningitidis
MDTTLKTTLTSVAAAFALSACTMIPQYEQPKVEVAETFKNDTADSGIRAVDLGWHDYFADPRLQKLIDIALERNTSLRTAVLNSEIYRKQYMIERNNLLPTLAANANDSRQGSLSGGNVSSSYKVGLGAASYELDLFGRVRSSSEAALQGYFASTANRDAAHLSLIATVAKAYFNERYAEEAMSLAQRVLKTREETYKLSELRYKAGVISAVALRQQEALIESAKADYAHAARSREQARNALATLINQPIPDDLPAGLPLDKQFFVEKLPAGLSSEVLLDRPDIRAAEHALKQANANIGAARAAFFPSIRLTGSVDTHSAELGGLFKSGTGVWSFAPSITLPIFTWGTNKANLDVAKLRQQAQIVAYEAAVQSAFQDVANALAAREQLDKAYDALSKQSRASKEALRLVGLRYKHGVSGALDLLDAERSSYSAEGAALSAQLTRAENLADLYKALGGGLKRDTQTDK

SEQ ID NO: 35115 - protein, 90 aa, Neisseria meningitidis; identical to SEQ ID NO: 311

SEQ ID NO: 35116 - protein, 43 aa, Neisseria meningitidis; identical to SEQ ID NO: 9163

SEQ ID NO: 35117 - protein, 356 aa, Neisseria meningitidis; identical to SEQ ID NO: 5919

SEQ ID NO: 35118 - protein, 351 aa, Neisseria meningitidis; identical to SEQ ID NO: 19311

SEQ ID NO: 35119 - protein, 89 aa, Neisseria meningitidis; identical to SEQ ID NO: 19801

SEQ ID NO: 35120 - protein, 145 aa, Neisseria meningitidis; identical to SEQ ID NO: 1767

SEQ ID NO: 35121 - protein, 704 aa, Neisseria meningitidis
MDLLSVFHKYRLKYVVAVLTILLLAAIGLHASVYRIFTPENIRSRLQQSIAHTHRKISFDADIQRRLLPRPTVILKNLTITEPGGDRTAVSVQETKIGLSWKNLWSDQIQIEKWVVSSAELALTRDGKGVWNIQDLIDSQKRQASVNRIIVENSTVRLNFLQEQLILKEINLNLQSPDSSGQPFESSGILVWGKLSVPWKSRGLFLSDGIGTPKISPFHFEASTSLDGHGITISTTGSPSVRFNAGGADAAGLGLRADTSFRNLHLTAQIPTLALRNNSIKIETVNGAFTAGGEYAQWDGSFKLDKANLHSGIANIGNAEISGSFKTPRHQTNFSLNSPLVWTENKGLDAPRLYVSTLQDTVNRLPQPRFISRLDGSLSVPNLQNWNAELNGTFDRQTVAAKFRYTHEDAPHLEAAVALQKLNLTPYLDDVRQQNGKIFPDTLAKLSGDIEAHLKIGKVQLPGLQLDDMETYLHADKGHIALSRFKSGLYGGHTEGGISIANTRPATYRLQQNASNIQIQPLLQDLFGFHSFSGNGDAVIDLTASGETRKELIRSLQGSLSLNISNGAWHGIDMDNILKNGISGKTADNAAPSTPFHRFTLNSEISDGISRHIDTELFSDSLYVTSNGYTNLDTQELSEDVLIRNAVHPKNKPIPLKITGTVDKPSITVDYGRLTGGINSRKEKQKILEDTLLEQWQWLKPKEP

SEQ ID NO: 35122 - protein, 213 aa, Neisseria meningitidis; identical to SEQ ID NO: 2136

SEQ ID NO: 35123 - protein, 485 aa, Neisseria meningitidis
MKPTIALVGRPNVGKSTLFNRLTRTKDALVHDLPGLTRDRHYGHGKVGSKPYLVIDTGGFEPVVDSGILHEMAKQTLQAVDEADAVVFLVDGRTGLTPQDKIIADRLRQSPRPVYLAVNKGEGGNRAVLAAEFYELALGDPYVISGAHGDGVYYLIEEILENFPEPEAEEADAKHPVFAVIGRPNVGKSTLVNAILGEERVIAFDMAGTTRDSIHIDFEREGKPFTIIDTAGVRRRGKVDEAVEKFSVIKAMQAVEAANVAVLVLDAQQDIADQDATIAGFALEAGRALVVAVNKWDGISEERREQVKRDINRKLYFLDFAKFHFISALKERGIDGLFESIQAAYNAAMIKMPTPKITRVLQSAIERQQPPRAGLVRPKMRYAHQGGMNPPVIVVHGNSLHAISDSYTRYLTQTFRKAFNLQGTPLRIQYNVSENPYENAEDKPKKKPLRRVSLSNRIEKREGRKEEKNRFKKKTKVSVKKQFSK

SEQ ID NO: 35124 - protein, 241 aa, Neisseria meningitidis; identical to SEQ ID NO: 18462

SEQ ID NO: 35125 - protein, 142 aa, Neisseria meningitidis; identical to SEQ ID NO: 19559

SEQ ID NO: 35126 - protein, 430 aa, Neisseria meningitidis; identical to SEQ ID NO: 18495

SEQ ID NO: 35127 - protein, 415 aa, Neisseria meningitidis; identical to SEQ ID NO: 8108

SEQ ID NO: 35128 - protein, 125 aa, Neisseria meningitidis
MCELKNFRRNITCFEGYDENSFIGKWYDDGVWDDEEYWKLENDLIEVRKKYPYPMDIPRDIVIGIGTIIDFLMVPNWELFEIKASPWLPDSVGIHERYERFTTMLRYIFTEKDIVNVRFDYYNKK

SEQ ID NO: 35129 - protein, 307 aa, Neisseria meningitidis; identical to SEQ ID NO: 19660

SEQ ID NO: 35130 - protein, 283 aa, Neisseria meningitidis; identical to SEQ ID NO: 18857

SEQ ID NO: 35131 - protein, 337 aa, Neisseria meningitidis
MKNKIQNQLDNIVTLNNEKFTFIDLFAGIGGFRIAMENVGGRCVFSSEWDDKARQTYQVNFNDIPYGDITLKETKAAIPSKFDVLTAGFPCQPFSIAGVSKKKSLGRETGFLDKAQGTLFFDVAEIIGKHRPKIFLLENVKNLVSHDKGNTFKVIKGTLEELDYQIFYQVMNAKYYVPQNRERIFIVGFDRQYFNKEINFNFPSPPESQPKLKQILEDDVDNSFTLSDNLWLYLQNYAKKHKAKGNGFGFGLVDLDGISRTLSARYYKDGSEILIPQKGKNPRKLTPRECSRLMGFPKDFVIDAVSKTAAYKQFGNSIAVPLVQAISKQIINELKNE

SEQ ID NO: 35132 - protein, 207 aa, Neisseria meningitidis; identical to SEQ ID NO: 2101

SEQ ID NO: 35133 - protein, 404 aa, Neisseria meningitidis
MEWEFNSYYTLIAATLVLLVGKFLVQKIKFLRDFNIPEPVAGGLIAAIILFALHEAYGVSFKFEKPLQNAFMLIFFTSIGLSADFSRLKAGGLPLVVFTAIVGGFILVQNFVGVGLATALGLDPLIGLITGSVSLTGGHGTSGAWGPNFETQYGLVGATGLGIASATFGLVFGGLIGGPVARRLINKMGRKPVENKKQDQDDNADDVFEQAKRTRLITAESAVETLAMFAACLAFAEIMDGFDKEYLFDLPKFVWCLFGGVVIRNILTAAFKVNMFDRAIDVFGNASLSLFLAMALLNLKLWELTGLAGPVTVILAVQTVVMVLYATFVTYVFMGRDYDAAVLAAGHCGFGLGATPTAVANMQSVTHTFGASHKAFLIVPMVGAFFVDLINAAILTGFVNFFKG

SEQ ID NO: 35134 - protein, 394 aa, Neisseria meningitidis
MTPQVLTILGSTGSIGESTLDVVSRHPEKFRVFALAGHKQVEKLAAQCQTFQPEYAVVADAEYAARLEALLKRDGTATQVLHGAQALVDVASADEVSGVMCAIVGAVGLPSALAAAQKGKTIYLANKETLVVSGALFMETARANGAAVLPVDSEHNAVFQVLPRDYAGRLNEHGIASIILTASGGPFLTADLNTFDSITPDQAVKHPNWRMGRKISVDSATMMNKGLELIEAHWLFNCPPDKLEVVIHPQSVIHSMVRYRDGSVLAQLGNPDMRTPIAYCLGLPERIDSGVGDLDFDALSALTFQKPDFDRFPCLKLAYEAMNAGGAAPCVLNAANEAAVAAFLDGQIKFTDIAKTVAHCLSQDFSDGIGDIGGLLAQDARTRAQARAFIGTLR

SEQ ID NO: 35135 - protein, 632 aa, Neisseria meningitidis
LRRNTAFHREDGTAIPDSKQAEEKLSFKEGDVLFLYGSKENKLQQLKSEIHKRDPNVKIRTSENENEKYSYKFVDAGYVFAKDGKDEIEKTSDEKQFSNRLGYDGFVYYLGEHPSQSLPSAGTVKYSGNWQYMTDAIRHRRGKGVSSVDLGYTTYYGNEIGAASYEARDADGREKHPAEYTVNFDKKNLEGKLIKNQYVQKRDDPKNPLTIYNITATLDGNRFTGSAEVNPDLAKNHAGKEHLFFHTNADRRLEGGFFGDNGEELAGRFISNDNSVFGVFAGKQKTEAANAADTKPALTSGKHTKILDSLKISVDEASDENPRPFEVSTMPDFGHPDKLLVEGREISLLKDTQTIVLADGRTMTVSACCDFLTYVKLGRIKTERPAVKPKAQDEEDSDIDNGEESEDEISEDDNGEDEVTEEEEAEETEEETDEDEEEEPEETEETEETEETEEKSPTEEGNGGSGSILPTPEASKGRDIDLFLKGIRTAEADIPQIGKARYTGTWEARIGEPIQWDNKADKAAKAEFNVDFGEKSISGTLTEENGVEPAFHIENGKIEGNGFYATARTRDNGINLSGTGSTDPKTFKANDLRVEGGFYGPKAAELGGNIIDSDRKFGAVFGAKKDDKEATR

SEQ ID NO: 35136 - protein, 41 aa, Neisseria meningitidis; identical to SEQ ID NO: 2201

SEQ ID NO: 35137 - protein, 318 aa, Neisseria meningitidis
MILTPPDTPFFLRNGNADTIAAKFLQRPAPAYRRELLPDSTGKTKVAYDFSDGISPDAPLVVLFHGLEGSSRSHYAVELMLAVRSRGWHGAVVHFRSCGGIANTAPVFYHLGDTAEIAFTLDTLAARYREIYAVGVSLGGNALAKYLGEQGENALPQAAAVISAPVDAEAAGNRFDSGITRLLYTRYFLRTLIPKARSLQGFQTAFAAGCKTLGEFDDRFTAPLHGFADRHDYYRQTSCKPLLKHVAKPLLLLNAANDPFLPPEALPTPDEVSEAVTLFQPAHGGHVGFVSSTGGRLHLQWLPQTVLSYFDSFRTNRR

SEQ ID NO: 35138 - protein, 270 aa, Neisseria meningitidis
MENIGRQRPIGVFDSGIGGLTNVRALMERLPMENIIYFGDTARVPYGTKSKATIEHFSMQIVDFLLEHDVKAMVIACNTIAAVAGQKIRQKTGNMPVLDVISAGAKAALATTRNNKIGIIATNTTVNSNAYARAIHRNNPDTLVRTQAAPLLVPLVEEGWLEHEVTRLTVCEYLKPLLADGIDTLVLGCTHFPLLKPLIGREAHNVALVDSAITTAEETARVLAQEGLLNTDNNNPDYRFYVSDIPLKFRTIGERFLGRTMEQIEMVSLG

SEQ ID NO: 35139 - protein, 99 aa, Neisseria meningitidis; identical to SEQ ID NO: 19651

SEQ ID NO: 35140 - protein, 38 aa, Neisseria meningitidis; identical to SEQ ID NO: 6664

SEQ ID NO: 35141 - protein, 633 aa, Neisseria meningitidis; identical to SEQ ID NO: 2852

SEQ ID NO: 35142 - protein, 367 aa, Neisseria meningitidis; identical to SEQ ID NO: 6599

SEQ ID NO: 35143 - protein, 505 aa, Neisseria meningitidis; identical to SEQ ID NO: 2655

SEQ ID NO: 35144 - protein, 359 aa, Neisseria meningitidis; identical to SEQ ID NO: 18893

SEQ ID NO: 35145 - protein, 135 aa, Neisseria meningitidis
  misc_feature 131, 132, 133: 'Xaa' is any amino acid
MPESIFKQISLDILKLHRDSVYSLLATSGCNCQVHEAAYVNIDGKYYIALSCEPEVGEVKTGILLIEDESRNLRLSWVGSARELDCKDNAYKRALSALSRKLGRCKDKLHTAVQPFLLELVPEKGRFSVGXXXHT

SEQ ID NO: 35146 - protein, 230 aa, Neisseria meningitidis
MKLIKYLQYQGIGSRKQCQWLIAGGYVFINGTCMDDTDADIDSSSVETLDIDGEAVTVVPEPYFYIMLNKPEDYETSHKPKHYRSVFSLFPDNMRNIDMQAVGRLDADTTGVLLITNDGKLNHNLTSPSRKIPKLYEVTLKHPTGETLCETLKNGVLLHDENETVCAADAVLKNPTTLLLTITEGKYHQVKRMIAAAGNRVLHLHRRRFAHLETENLKPGEWKFIDCPKF

SEQ ID NO: 35147 - protein, 464 aa, Neisseria meningitidis; identical to SEQ ID NO: 19915

SEQ ID NO: 35148 - protein, 321 aa, Neisseria meningitidis; identical to SEQ ID NO: 34489

SEQ ID NO: 35149 - protein, 61 aa, Neisseria meningitidis; identical to SEQ ID NO: 1836

SEQ ID NO: 35150 - protein, 1102 aa, Neisseria meningitidis; identical to SEQ ID NO: 34335

SEQ ID NO: 35151 - protein, 321 aa, Neisseria meningitidis; identical to SEQ ID NO: 6649

SEQ ID NO: 35152 - protein, 389 aa, Neisseria meningitidis; identical to SEQ ID NO: 19357

SEQ ID NO: 35153 - protein, 598 aa, Neisseria meningitidis
MNKIYRIIWNSALNAWVVVSELTRNHTKRASATVATAVLATLLFATVQANATDDDDLYLEPVQRTAVVLSFRSDKEGTGEKEGTEDSNWAVYFDEKRVLKAGAITLKAGDNLKIKQNTNENTNENTNDSSFTYSLKKDLTDLTSVETEKLSFGANGNKVNITSDTKGLNFAKETAGTNGDPTVHLNGVGSTLTDTLLNTGATTNVTNDNVTDDEKKRAASVKDVLNAGWNIKGVKPGTTASDNVDFVRTYDTVEFLSADTKTTTVNVESKDNGKKTEVKIGAKTSVIKEKDGKLVTGKGKDENGSSTDEGEGLVTAKEVIDAVNKAGWRMKTTTANGQTGQADKFETVTSGTNVTFASGKGTTATVSKDDQGNITVKYDVNVGDALNVNQLQNSGWNLDSKAVAGSSGKVISGNVSPSKGKMDETVNINAGNNIEITRNGKNIDIATSMAPQFSSVSLGAGADAPTLSVDDEGALNVGSKDTNKPVRITNVAPGVKEGDVTNVAQLKGVAQNLNNRIDNVDGNARAGIAQAIATAGLVQAYLPGKSMMAIGGGTYRGEAGYAIGYSSISDGGNWIIKGTASGNSRGHFGASASVGYQW

SEQ ID NO: 35154 - protein, 120 aa, Neisseria meningitidis
MDIRYFGTTPRYSEAIGANGLIFLSGMVPENGETAAEQTADVLAQIDRWLAECGSDKAHVLDAVIYLRDMGDYAEMNGVWDAWVAAGRTPARACVEARLARPEWRVEIKITAVKRDAATA

SEQ ID NO: 35155 - protein, 161 aa, Neisseria meningitidis; identical to SEQ ID NO: 25806

SEQ ID NO: 35156 - protein, 92 aa, Neisseria meningitidis; identical to SEQ ID NO: 419

SEQ ID NO: 35157 - protein, 191 aa, Neisseria meningitidis; identical to SEQ ID NO: 1730

SEQ ID NO: 35158 - protein, 280 aa, Neisseria meningitidis; identical to SEQ ID NO: 33725

SEQ ID NO: 35159 - protein, 321 aa, Neisseria meningitidis; identical to SEQ ID NO: 6981

SEQ ID NO: 35160 - protein, 371 aa, Neisseria meningitidis; identical to SEQ ID NO: 14361

SEQ ID NO: 35161 - protein, 103 aa, Neisseria meningitidis
MMSVKELFKVILDENKDFPIRTIHRTPMGILPKPVALSIVQYENDQGFYLFYLNEAGQEQTDTYHETLDSAFEQAEFEFGISKEEWMQSPYVASVENNNQKVI

SEQ ID NO: 35162 - protein, 114 aa, Neisseria meningitidis; identical to SEQ ID NO: 565

SEQ ID NO: 35163 - protein, 122 aa, Neisseria meningitidis; identical to SEQ ID NO: 2347

SEQ ID NO: 35164 - protein, 259 aa, Neisseria meningitidis; identical to SEQ ID NO: 18689

SEQ ID NO: 35165 - protein, 169 aa, Neisseria meningitidis; identical to SEQ ID NO: 19393

SEQ ID NO: 35166 - protein, 446 aa, Neisseria meningitidis
LHTLLAFIFAILILVSLHEFGHYIVARLCGVKVVRFSVGFGKPFFTRKRGDTEWCLAPIPLGGYVKMVDTREGEVSEADLPYAFDKQHPAKRIAIVAAGPLTNLALAVLLYGLSFSFGVTELRPYVGTVEPDTIAARAGFQSGDKIQSVNGTPVADWGSAQTEIVLNLEAGKVAVGVQTASGAPAVRTIDAAGTPEAGKIAKNQGYIGLMPFKITTVAGGVEKGSPAEKAGLKPGDRLTAADGKPIASWQEWANLTRQSPGKKITLNYERAGQTHTADIRPDTVEQSDHTLIGRVGLRPQPDRAWDAQIRRSYRPSVVRAFGMGWEKTVSHSWTTLKFFGKLISGNASVSHISGPLTIADIAGQSAELGLQSYLEFLALVSISLGVLNLLPVPVLDGGHLVFYTAEWIRGKPLGERVQNIGLRFGLALMMLMMAVAFFNDVTRLLG

SEQ ID NO: 35167 - protein, 217 aa, Neisseria meningitidis; identical to SEQ ID NO: 18925

SEQ ID NO: 35168 - protein, 1204 aa, Neisseria meningitidis; identical to SEQ ID NO: 18133

SEQ ID NO: 35169 - protein, 395 aa, Neisseria meningitidis; identical to SEQ ID NO: 18316

SEQ ID NO: 35170 - protein, 299 aa, Neisseria meningitidis; identical to SEQ ID NO: 19524

SEQ ID NO: 35171 - protein, 309 aa, Neisseria meningitidis; identical to SEQ ID NO: 176

SEQ ID NO: 35172 - protein, 78 aa, Neisseria meningitidis; identical to SEQ ID NO: 1622

SEQ ID NO: 35173 - protein, 185 aa, Neisseria meningitidis; identical to SEQ ID NO: 18260

SEQ ID NO: 35174 - protein, 81 aa, Neisseria meningitidis; identical to SEQ ID NO: 7714

SEQ ID NO: 35175 - protein, 57 aa, Neisseria meningitidis; identical to SEQ ID NO: 14761

SEQ ID NO: 35176 - protein, 488 aa, Neisseria meningitidis; identical to SEQ ID NO: 3695

SEQ ID NO: 35177 - protein, 301 aa, Neisseria meningitidis
  misc_feature 2, 3, 4: 'Xaa' is any amino acid
VXXXLSPFSDGLDFEWHVCNPLIDSSSVTLQHWRDWLDIIADKLPSCDGILILHGTDSMAYTANLLALALQGLGKPIVLTGSQWPYAAENSDAPRNLSTAVAAFSLKLKQTVIAFDGKLYPAVGSSKVSTETASGFDNPHFGVIAEWDETQGWYNLRIPSQDAAAVSDGLKIRYPDPQAKIAVRTLIPGFAVQELADGLGQFPAQALILQSYGHGNTPADEGFIRAVRDFARQGKLLLNISQVRQGKTAAVYAQGNAFRNSGIINGGKCNLETATALMTLAVSEGWGADEVKHELQRLGLV

SEQ ID NO: 35178 - protein, 127 aa, Neisseria meningitidis
LDDGTYRAVLERVTGKRSCADMDVSELESVVADMRSHGFKPKAKGNPHGKPHLRRTSSAAMLDKVEALLTVGGKHWNYAHAMARRMFGKDKVEYLDDTQLHKLVAALQIAENRKTEKAGGDDGVRKS

SEQ ID NO: 35179 - protein, 199 aa, Neisseria meningitidis; identical to SEQ ID NO: 18036

SEQ ID NO: 35180 - protein, 112 aa, Neisseria meningitidis; identical to SEQ ID NO: 3481

SEQ ID NO: 35181 - protein, 92 aa, Neisseria meningitidis; identical to SEQ ID NO: 600

SEQ ID NO: 35182 - protein, 103 aa, Neisseria meningitidis; identical to SEQ ID NO: 4598

SEQ ID NO: 35183 - protein, 457 aa, Neisseria meningitidis; identical to SEQ ID NO: 7200

SEQ ID NO: 35184 - protein, 43 aa, Neisseria meningitidis; identical to SEQ ID NO: 2340

SEQ ID NO: 35185 - protein, 208 aa, Neisseria meningitidis; identical to SEQ ID NO: 18822

SEQ ID NO: 35186 - protein, 225 aa, Neisseria meningitidis; identical to SEQ ID NO: 15412

SEQ ID NO: 35187 - protein, 620 aa, Neisseria meningitidis
MALLQISEPGMSAAPHRHRLAAGIDLGTTNSLVATVRSGSAACLPDAEGRVTLPSVVRYLENGGIEVGKTALSAQKTDPLNTVSSAKRLIGRTLADLHQNTHYLPYRFGDNQRVIELHTRQGVKTPVEVSAEILKTLKSRAEETLVGDLVGVVITVPAYFDDAQRQATKDAARLAGLNVLRLLNEPTAAAIAYGLDNASEGKFVVYDLGGGTFDVSVLQLTKGLFEVKATGGNSALGGDDFDHRLFCRLLEQNGLSQLNEQDSQLLLSLVRAAKEQLTTQTEARIQATLSDGMAIDTSISRAEFHNLTQHLVMKTLEPVKQALKDAGVGKNEVKGVIMVGGSTRMLHVQQAVATFFGQTPLNNLNPDEVVALGAAIQANVLAGNKADGEWLLLDVTPLSLGLETYGGLAEKIIPRNSTIPTARAQDFTTFKDGQTAMTIHVVQGERELVADCRSLAKFTLRGIPPMAAGAARIRVTFQIDADGLLSVSAQEQSTGVHAQIEVKPSYGLDDDTITQMLKDSMSNAAEDMAARARAEAVVEAESLTDAVNAALELDSDLLDAEELQQIRQGIADLQGRLKDGKAEDIRAAAAKLGSITDNFAAKRMNRNIQRALTGQSVDNI

SEQ ID NO: 35188 - protein, 59 aa, Neisseria meningitidis; identical to SEQ ID NO: 7121

SEQ ID NO: 35189 - protein, 274 aa, Neisseria meningitidis
  misc_feature 2, 3: 'Xaa' is any amino acid
VXXNVSFEFFPPKNEQMETMLWDSIHRLQTLHPKFVSVTYGANSGERDRTHGIVKRIKQETGLEAAPHLTGIDASPDELRQIAKDYWDSGIRRIVALRGDEPAGYEKKPFYAEDLVKLLRSVADFDISVAAYPEVHPEAKSAQADLINLKRKIDAGANHVITQFFFDVERYLRFRDRCVMLGIDVEIVPGILPVTNFKQLGKMAQVTNVKIPSWLSQMYEGLDDDQGTRNLVAASIAIDMVKVLSREGVKDFHFYTLNRSELTYAICHILGVRP

SEQ ID NO: 35190 - protein, 268 aa, Neisseria meningitidis; identical to SEQ ID NO: 18441

SEQ ID NO: 35191 - protein, 216 aa, Neisseria meningitidis; identical to SEQ ID NO: 2506

SEQ ID NO: 35192 - protein, 243 aa, Neisseria meningitidis
VSTITGYPVQPNKAIVGANAFSHESGIHQDGVLKHRETYEIMSAESVGWATNRLSLGKLSGRNAFKTKLADLGIELESEEALNAAFARFKELADKKREIFDEDLHALVSDEMGSMNAESYKFISQKISTETGEEPRADIVFSIKGEEKRASATGSGPVDAIFKAIESVAQSGATLQIYSVNAVTQGTESQGETSVRLARGNRVVNGQGADTDVLVATAKAYLSALSKLEFSAAKPKAQGSGTI

SEQ ID NO: 35193 - protein, 281 aa, Neisseria meningitidis; identical to SEQ ID NO: 18272

SEQ ID NO: 35194 - protein, 122 aa, Neisseria meningitidis
MKPLKRHPALIGLSRDHHHSLSLCVRLLRTPEERHRDELEPHFSELETHFREEETKFAPIWQNVALELKQRFEKDHARLRQMMASSEYGNAAWNTAFATTLRDHARFEERELFPAAEPFLPA

SEQ ID NO: 35195 - protein, 82 aa, Neisseria meningitidis
MLTSEQVKAMIAGVAKCEHIEVEGDGHHFFAVIVSSEFEGKARLARHRLIKDGLKAQLESNELHALSISVAATPAEWAAKAQ

SEQ ID NO: 35196 - protein, 504 aa, Neisseria meningitidis; identical to SEQ ID NO: 17548

SEQ ID NO: 35197 - protein, 340 aa, Neisseria meningitidis; identical to SEQ ID NO: 2046

SEQ ID NO: 35198 - protein, 200 aa, Neisseria meningitidis; identical to SEQ ID NO: 24966

SEQ ID NO: 35199 - protein, 302 aa, Neisseria meningitidis; identical to SEQ ID NO: 18508

SEQ ID NO: 35200 - protein, 168 aa, Neisseria meningitidis; identical to SEQ ID NO: 32562

SEQ ID NO: 35201 - protein, 91 aa, Neisseria meningitidis; identical to SEQ ID NO: 1961

SEQ ID NO: 35202 - protein, 85 aa, Neisseria meningitidis; identical to SEQ ID NO: 18915

SEQ ID NO: 35203 - protein, 123 aa, Neisseria meningitidis; identical to SEQ ID NO: 130

SEQ ID NO: 35204 - protein, 404 aa, Neisseria meningitidis; identical to SEQ ID NO: 34453

SEQ ID NO: 35205 - protein, 390 aa, Neisseria meningitidis; identical to SEQ ID NO: 19414

SEQ ID NO: 35206 - protein, 244 aa, Neisseria meningitidis; identical to SEQ ID NO: 7175

SEQ ID NO: 35207 - protein, 96 aa, Neisseria meningitidis; identical to SEQ ID NO: 18842

SEQ ID NO: 35208 - protein, 178 aa, Neisseria meningitidis
MSATVRILGIDPGSRVTGFGIIDVRGRDHFYVASGCIKTPPDAPLADRIAVIVRHIGEVVAVYKPQQAAVEQVFVNVNPASTLMLGQARGAALAALVSHGLPVSEYTALQVKQAVVGKGKAAKEQVQHMVVQMLGLSGTPQADAADGLAVALTHALRNHGLAAKLNPSGMQVKRGRFQ

SEQ ID NO: 35209 - protein, 186 aa, Neisseria meningitidis; identical to SEQ ID NO: 25613

SEQ ID NO: 35210 - protein, 706 aa, Neisseria meningitidis
MFDKHVKTFQYGNHTVTLETGEIARQAAAAVKVSMGDTVVLVAVTTNKEVKEGQDFFPLTVDYLERTYAAGKIPGGFFKREGKQSEKEILTSRLIDRPIRPLFPEGFYHDIQIVAMVVSVDPEIDSDIPAMLGASAALVLSGVPFAGPIGAARVGYVNGVYVLNPTKAELAKSQLDLVVAGTSKAVLMVESEAKILPEDVMLGAVVYGHDQMQVAINAINEFADEVNPEVWDWKAPETNEELVAKVRGIAGETIKEAFKIRQKQARSAKLDEAWSAVKEALITEETDTLAANEIKGIFKHLEADVVRSQILDGQPRIDGRDTRTVRPLNIQTGVLPRTHGSALFTRGETQALAVATLGTSRDEQIIDALSGEYTDRFMLHYNFPPYSTGEVGRMGAPKRREIGHGRLAKRALLAVLPKPEDFSYTMRVVSEITESNGSSSMASVCGGCLSLLSAGVPLKAHVAGIAMGLILEGNKFAVLTDILGDEDHLGDMDFKVAGTTEGVTALQMDIKIQGITKEIMQIALAQAKEARLHILDQMKAAVAGPQELSAHAPRLFTMKINQDKIREVIGKGGETIRSITAETGTEINIAEDGTITIAATTQEAGDAAKKRIEQITAEVEVGKVYEGTVVKILDNNVGAIVSVMPGKDGLVHISQIAHERVRNVGDYLQVGQVVNVKALEVDDRGRVRLSIKALLDAPAREENAAE

SEQ ID NO: 35211 - protein, 206 aa, Neisseria meningitidis; identical to SEQ ID NO: 320

SEQ ID NO: 35212 - protein, 348 aa, Neisseria meningitidis
MIPATYTLSQITARLGGEWRGEDISVTAVRPLADAQAEHISFLANPKYKAEVHDSSAGAVIVSAKAADEFEGRNLIVADDPYLYFAKVARLFSPVVKARGGIHPTAVVEESATVPASCEIGANAYIGANTVLGEGCRILANAVVQHDCRLGDEVVLHPNAVVYYGCTLGNRVEIHSGAVIGADGFGLAFAGDSWFKIPQTGAVTLGDDVEIGSNTNIDRGAMSDTTVGNGTKIDNQVQIGHNCKIGSHTVIAAKTGISGSVTIGSYCIIGGGVGTVGHIEIADKTTIGGGTSVTHSITESGKHLAGIFPMSTHKEWARNAVYIHRLSEMNKRLKTLEQQLSDAGQDSK

SEQ ID NO: 35213 - protein, 334 aa, Neisseria meningitidis
MQRQIKLKNWLQTVYPERDFDLTFAAADADFRRYFRATFSDGGSVVCMDAPPDKMSVAPYLKVQKLFDMVNVPQVLHADTDLGFVVLNDLGNTTFLTAMLQEQGETAHKALLLEAIGELVELQKASREGVLPEYDRETMLREINLFPEWFVAKELGRELTFKQRQLWQQTVDTLLPPLLAQPKVYVHRDFIVRNLMLTRGRPGVLDFQDALYGPISYDLVSLLRDAFIEWEEEFVLDLVIRYWEKARAAGLPVPEAFDEFYRWFEWMGVQRHLKVAGIFARLYYRDGKDKYRPEIPRFLNYLRRVSRRYAELAPLYALLVELVGDEELETGFTF

SEQ ID NO: 35214 - protein, 517 aa, Neisseria meningitidis; identical to SEQ ID NO: 8070

SEQ ID NO: 35215 - protein, 322 aa, Neisseria meningitidis
MTAKPFSLNLTNLLLLAVLFAVSLSVGVADFRWSDVFSLSDSQQVMFISRLPRTFAIVLTGASMAVAGMIMQILMRNRFVEPSMAGAGQSAALGLLLMSLLLPAAPLPVKMSVAAVAALIGMLVFMLLIRRLPPTAQLMVPLVGIIFGGVVEAVATFIAYENEMLQMLGVWQQGDFSSVLLGRYELLWITGGLAVFAYLIADRLTILGLGETVSVNLGLNRTAVLWSGLIIVALITSLVIVTVGNIPFVGLVVPNIISRLIGDRLRQSLPAVALLGASLVLLCDIIGRVIVFPFEIPVSTVFGVLGTALFLWLLLRKPAHAV

SEQ ID NO: 35216 - protein, 158 aa, Neisseria meningitidis
MEHLFGKWLPDLPAAISDGISLPMVRLLHTRSLTAALRALPHTFSVELLKLGELETECGGRLVREVLLKLDRIPVVEARSECRIGSAFWQNILDCGTRPLGERLFQADLEGARSVFEFAVAGEGCGRYFAARRSRFSHQGEEMLLTEYFLPELKRFIG

SEQ ID NO: 35217 - protein, 328 aa, Neisseria meningitidis; identical to SEQ ID NO: 372

SEQ ID NO: 35218 - protein, 504 aa, Neisseria meningitidis
MCCSLSFAEPARIDDRIIKFRPSKSKFFESTGYRKINNEFSKFTEAANVEHIPTGAKARINAKITASVSRAAVLSGVGKLARLGAKLSTRAVPYVGTALLAHDVYETFKEDIQAQGYQYDPETDKFVKGYEYSNCLWYEDERRINRTYGCYGVDSSIMRLMSDYSRFPEVKELMESQMYRLARPFWNWHKEELNKLSSLDWNNFVLNRCTFDWNGGDCVVNKGDDYRNGANFSLSRNPKYKEEMDAKKLEEILSLKVDANPDKYIKATGYPGYSEKVEVAPGTKVNMGPVTDRNGNPVQVVATFGRDSQGNTTVDVQVIPRPDLTPGSAEAPNAQPLPEVSPAENPANNPNPNENPGTSPNPEPDPDLNPDANPDTDGQPGTRPDSPAVPGRTNGRDGEDGGLLCKFFPDILACDRLPEPNPAEDLNLPSETVNVEFQKSGIFQNSAQCPAPVTFTVTVLDSSRQFAFSFENACTIAERLRYMLLALAWAVAAFFCIRTVSREV

SEQ ID NO: 35219 - protein, 419 aa, Neisseria meningitidis; identical to SEQ ID NO: 3085

SEQ ID NO: 35220 - protein, 357 aa, Neisseria meningitidis
MRPFCVGATVLAILGALVFFISPGVVVLHRQIFLELMLPAAYGGFLTAALLDWTGFSGNLKPATTLMAVLLLVAAVLLPFLPQLAAFFVAAYWLVLLLFCAWLIWLARNTDNFALLMLLAAFTVFQTAYAATGDLNLLRAQVHLNMAAVMFVSIRVSVLLGAEALKECRLKDPVFIPNIVYKNIAITFLLLHTAAELWLPAQTAGFTALAVGFILLAKLRELHHHELLRKHYVRTYYLLQLFAAAGYLWTGAAKLQNLPASAPLHLITLGDMMGGVMMVWLTAGLWHSGFTKLDYPKLCLIAVLLLFMAAVSRAFLMNVNPIFFITVPAILTAVVFTLYLFTFVPIFRANAFTGDPE

SEQ ID NO: 35221 - protein, 278 aa, Neisseria meningitidis; identical to SEQ ID NO: 18196

SEQ ID NO: 35222 - protein, 339 aa, Neisseria meningitidis; identical to SEQ ID NO: 18070

SEQ ID NO: 35223 - protein, 413 aa, Neisseria meningitidis; identical to SEQ ID NO: 963

SEQ ID NO: 35224 - protein, 192 aa, Neisseria meningitidis
MSNKIKMLVGLGNPGKEYEQTRHNAGFWFLDELAWKWKASFKEEKKFFGEVARATLPDGDVWLLKPTTFMNRSGQAVAALAQFYKIKPEEILVVHDELDIPCGRIKFKLGGGNGGHNGLKDIQAKLGTADYYRLRLGIGHPGDRNLVVGYVLNKPSTEHRRQIDDAVAKSLQAIPDILADKCEEATRFLHSK

SEQ ID NO: 35225 - protein, 103 aa, Neisseria meningitidis; identical to SEQ ID NO: 1278

SEQ ID NO: 35226 - protein, 416 aa, Neisseria meningitidis
MTKLTRRQIIRRTAGTLFALSPIASAVAKTVRAPQFTAARIWPSHTYTRLTLESTAALKYQHFALDNPGRLVVDIQNANINTVLHGLSQKVMADDPFIRNIRAGQNTPDTVRLVIDLKQPSYAQVFSLPPVGGFKNRLVVDLYPQGMDPDDPMMALLNGSLNKTRRGSPEADLAQNTPAQTERGKNGRRPVIMIDPGHGGEDPGAVSPGGLQEKHVVLSIARETKKQLEALGYNVFMTRNEDVFIPLGVRVAKGRARRADVFVSIHADAFTSPSARGTGVYMLNTKGATSSAAKFLEQTQNNADAVGGVPTSGNRNVDTALLDMTQTATLRDSRKLGKLVLEELGRLNHLHKGRVDEANFAVLRAPDMPSILVETAFLSNPAEEKLLGSESFRRQCAQSIASGVQRYINTSVLKRG

SEQ ID NO: 35227 - protein, 545 aa, Neisseria meningitidis; identical to SEQ ID NO: 775

SEQ ID NO: 35228 - protein, 945 aa, Neisseria meningitidis; identical to SEQ ID NO: 24236

SEQ ID NO: 35229 - protein, 523 aa, Neisseria meningitidis
MLFSDGVISPKSLAALIARVFSYSILDLRHYPRHRVLMGVLTEEQMVEFHCVPVFRRGDKVFFAVSDPTQMPQIQKTVSAAGIEVELVIVEDDQLAGLLDWVGSRSTSLLQELGEGQEEEESHTLYIDNEEAEDGPVPRFIHKTLSDALRSGASDIHFEFYEHNARIRFRVDGQLREVVQPPIAVRGQLASRIKVMSRLDISEKRIPQDGRMQLTFQKGGKPVDFRVSTLPTLFGEKVVMRILNSDAASLNIDQLGFEPFQKKLLLEAIHRPYGMVLVTGPTGSGKTVSLYTCLNILNTESVNIATAEDPAEINLPGINQVNVNDKQGLTFAAALKSFLRQDPDIIMVGEIRDLETADIAIKAAQTGHMVFSTLHTNNAPATLSRMLNMGVAPFNIASSVSLIMAQRLLRRLCSSCKQEVERPSASALKEVGFTDEDLAKDWKLYRAVGCDRCRGQGYKGRAGVYEVMPISEEMQRVIMNNGTEVDILDVAYKEGMVDLRRAGILKVMQGITSLEEVTANTND

SEQ ID NO: 35230 - protein, 85 aa, Neisseria meningitidis; identical to SEQ ID NO: 19168

SEQ ID NO: 35231 - protein, 177 aa, Neisseria meningitidis; identical to SEQ ID NO: 1513

SEQ ID NO: 35232 - protein, 459 aa, Neisseria meningitidis
MAKTLKTLYQCTECGGTSPKWQGKCPHCGEWNTLQESLAAPEPKNARFQSWAADTSTVQSLSSVTATEVPRNPTGMGELDRVLGGGLVDGAVILLGGDPGIGKSTLLLQTIAKMAQSRKVLYVSGEESAQQVALRAQRLELPTEGVNLLAEIRMEAIQAALKQHQPEVVVIDSIQTMYSDQITSAPGSVSQVRECAAQLTRMAKQMGIAMILVGHVTKDGAIAGPRVLEHMVDTVLYFEGDQHSNYRMIRAIKNRFGAANELGVFAMTENGLKGVSNPSAIFLASYRDDTPGSCVLVTQEGSRPLLVEIQALVDDAHGFTPKRLTVGLEQNRLAMLLAVLNRHGGIACFDQDVFLNAVGGVKIGEPAADLAVILAMLSSFRDRPLPEKMVAFGEIGLSGEVRPVARGQERLKEAEKLGFKRAIVPKANMPRNAKEFPNLKIYGVSSLQEAIDICREDRD

SEQ ID NO: 35233 - protein, 475 aa, Neisseria meningitidis; identical to SEQ ID NO: 18624

SEQ ID NO: 35234 - protein, 274 aa, Neisseria meningitidis
MDGAQPKTNFFERLIARLAREPDSAEDVLNLLRQAHEQEVFDADTLLRLEKVLDFSDLEVRDAMITRSRMNVLKENDSIERITAYVIDTAHSRFPVIGEDKDEVLGILHAKDLLKYMFNPEQFHLKSVLRPAVFVPEGKSLTALLKEFREQRNHMAIVIDEYGGTSGLVTFEDIIEQIVGEIEDEFDEDDSADNIHAVSSERWRIHAATEIEDINTFFGTEYSSEEADTIGGLVIQELGHLPVRGEKVLIGGLQFTVARADNRRLHTLMATRVK

SEQ ID NO: 35235 - protein, 206 aa, Neisseria meningitidis
MLKQAVTGMTKQERITTQAYNEMTKSVAGSNSIVLNDVQGDTTINNHHTHTHNHSDADGKALSMRLTSRPLLSDRQAAAFARTGKLTGSFDLFASVVAPSQYTFAVAMPDTSMSPVIEKGDLLVVEPRMCPADEDIALIELSDKRLVVAHLVIDIAGRMLIYQTGRPSEAFDLPEGSTILGVVLEVKKRFMSAAQARRRVDSDYHP

SEQ ID NO: 35236 - protein, 156 aa, Neisseria meningitidis; identical to SEQ ID NO: 681

SEQ ID NO: 35237 - protein, 55 aa, Neisseria meningitidis
MFAKHYQFIALGIILLLYMLILYTTDFSNLTYWMLFFICFITGKILARLLEKSFK

SEQ ID NO: 35238 - protein, 735 aa, Neisseria meningitidis
MFPDQSAPNLLQGLNPEQLSAVTWPPQSALVLAGAGSGKTRVLTTRIAWLLQTGQASVHSIMAVTFTNKAAKEMQTRLGAMIPVDVRAMWLGTFHGLCHRFLRLHHRDAGLPSSFQILDGGDQLSLIKRLLKSLNIAEEIIAPRSLQGFINAQKESGLRASVLSAPDPHTSRMIECYAEYDKICQREGVVDFAELMLRSYEMLQSNEILRQHYQNRFNHILVDEFQDTNKLQYAWLKLMAGGNAAVFAVGDDDQSIYRFRGANVGNMTALMEEFHIDAPVKLEQNYRSVGNILAAANAVIENNDERLGKNLRTDAEAGDKIRYYSAFTDLEEARFIVDETKALEREGWDLDEIAVLYRSNAQSRVIEQSLFRSGIPYKIYGGLRFYERQEIKHALAYLRLAVNPDDDNALLRVINFPPRGIGARTVENLQTASNEQGITLWQAACNAGAKAAKVVAFVRLIEALRNQVGQLSLSEIIVGILKDSGLTEHYRTQKGDNQDRLDNLDELVNAAIEFKPEDSNFEILPENISDDPAFPILAFLSNATLESGENQAGVGEKAVQLMTVHAAKGLEFNAVFLTGMEEGRFPSEMSLAERGGLEEERRLMYVAITRARKRLYITMAQQRMLHGQTQFGIVSRFVEEIPPEVLHYLSVKKPAYDSYGNTRQTAASKDKIIDDYKQPQTYAGFRIGQNVRHAKFGTGVIIDAADKGESARLTINFGKQGVKELDTKFAKLEAM

SEQ ID NO: 35239 - protein, 156 aa, Neisseria meningitidis; identical to SEQ ID NO: 25826

SEQ ID NO: 35240 - protein, 626 aa, Neisseria meningitidis; identical to SEQ ID NO: 11093

SEQ ID NO: 35241 - protein, 394 aa, Neisseria meningitidis; identical to SEQ ID NO: 24588

SEQ ID NO: 35242 - protein, 250 aa, Neisseria meningitidis
MSSNKASFFTRLRRLCRLTVWLFKTGKNLRGIDGGCPESRNRAVIELGRGALTALDIGLEVGRPAPEHPNGVLVAANHVSWLDIFAMSAVYPSSFIAKQEIKSWPVLGKMGQNAGTVFINRNSRRDIEPINRAVYETLQRGQNVSFFPEARTSSGLGLLPFKAALFQSAIDAGAKFWRSRCVIMTKREKDGSSLICRCRLPTCLWRIVSMKNYDKVDFVCVAMRESETVCFKDKSKKHPCRVADDADIAV

SEQ ID NO: 35243 - protein, 117 aa, Neisseria meningitidis
VDKICVTEQDVNILASDRNYELNIEIFIDNIIHFQITDESYKVKFSEYLFENKEKNDWDRNPAINYFFEIIDDSYMDWLKEESFDFFEKKYYKAYIFFFSDSVIEVISSTEPVFYSK

SEQ ID NO: 35244 - protein, 503 aa, Neisseria meningitidis
MSEQNHPQTEPQLDENQIIALRREKLHNIRQQRNAYPNDFKRDSFAADLHTQYGEIGKEELDPQGIPVKIAGRMMLKRQMGKASFATIQDVSGQIQLYLNNKGVSQEILDDFNHWDLGDIVGAEGTLFKTNHGELTVRVSGIRLLSKSLRPLPDKHKGLSDQETKYRQRYVDLIANGESRNTFIKRSQIIQSVRNFMVGEHYLEVETPMMHPIPGGATAKPFVTHHNALDIPLYLRIAPELYLKRLVVGGLERVFEINRSFRNEGMSVRHNPEFTMIEFYEAFSDYERMMQMAEDIIRNASRTVNGTAKISYNGKEVDLESPFERLTILEAIKKYNPHYTDEQLNDAEWLKKEIVKHGESLPPSPGIGSLQLALFEGCAEGKLWNPTFIVDYPVEVSPLARASDTKQGLTERFELFVVGRELANGYSELNDPEDQAERFKSQVAQKDAGDDEAMHYDADYIRAMEFGLPPTGGCGIGIDRLVMLLTDSQTIRDVILFPQMRPE

SEQ ID NO: 35245 - protein, 207 aa, Neisseria meningitidis; identical to SEQ ID NO: 243

SEQ ID NO: 35246 - protein, 99 aa, Neisseria meningitidis
MKKMFVLFCMLFSCAFSLAAVNINAASLQELEALPGIGPAKAKAIAEYRAQNGAFKSVDDLTKVKGIGPAVLAKLKDQASVGAPAPKGPAKPAIPAAKK

SEQ ID NO: 35247 - protein, 103 aa, Neisseria meningitidis; identical to SEQ ID NO: 1558

SEQ ID NO: 35248 - protein, 335 aa, Neisseria meningitidis
LHNAGIKIIAANELVPERANLYKALYPESKMIIGDILHEEVFQNLIQSVPNRLDFLIASPPCQGMSVAGKNRNIQEMANDKRNHLIFRVIEFILLKRPTFVLIENVPFFLKIKLPYKGTLQTVEVILQDLFGCEYYIQTHIFDSADYGVAQHRKRAIIRMNKHSTIWGMPEKVTKTISVRDAISFLPSIESGQKSNVKWHFARTHAPEHIIWLKNTPTGRSAFDNIEHYPKKKNGEKIKSYNTTYRRMEWDAPAPTITIRNDAISSQLNVHPGRSMPDGTYSDARVLTPLELMLLTSLPIDWNIPDDTSELLIRQCIGESIPPLLIKKIVERIGK

SEQ ID NO: 35249 - protein, 61 aa, Neisseria meningitidis; identical to SEQ ID NO: 1125

SEQ ID NO: 35250 - protein, 433 aa, Neisseria meningitidis
MTESLRLPAASLKPSTVALPGSKSISNRTLLLAALSDNACEIHSLLKSDDTDRMLEALDKLGVEIEYLAEDRLKVHGTGGRFPNRTADLFLGNAGTAFRPLTAALAVLGGDYRLHGVARMHERPIGDLADALRIAGADVEYLGKEHYPPLHIGERQDNGERVIPIKGNVSSQFLTALLMALPLTGQAFEIRMVGELISKPYIDITLKLMAQFGVQVINEGYRVFKIPADAHYHAPEHLHVEGDASSASYFLAAGLIAATPVCVIGIGANSIQGDVAFARELEKIGADVVWGENFVEVSRPKERAVQAFDLDANHIPDAAMTLAVVALATGQTCTLRNIGSWRVKETDRIAAMANELRKLGAKVAEEAEAIHITPPETPTPDAVIDTYDDHRMAMCFSLVSLLDVPVVINDPKCTHKTFPTYFDVFSSLTETAE

SEQ ID NO: 35251 - protein, 887 aa, Neisseria meningitidis
MSTQLHDVDPIETQEWLDALSSVLEYEGGERAQYLLENLVKYCRDKGVRMPHGTTTPYLNTVSVENEKGIPGDQNIEHRIRAFVRWNAAAIVLRAGKKDLELGGHIASFQSAATMYEVGFNHFWKAKGEGEEGDLVFFQGHVAPGIYARAFVEGRLTEDQLNNFRQEVDGHGLPSYPHPHLLPDFWQFPTVSMGLGPIMAIYQARFLKYLESRGLAKTKGRKVWCFCGDGEMDEPESQGAIALAAREGLDNLIFVINCNLQRLDGPVRGNGKIIQELEGNFAGAGWNVVKVIWGRRWDRLLAKDKDGILRQRMEECLDGDYQTYKSKDGAYVREHFFNTPELKALVADMTDEQLWALNRGGHDPQKVYNAYDRAANHADGKPTVILAKTIKGYGMGASGEGQNVAHQAKKMDKASLKQFRDRFDIPVTDEQIESGDLPYLTFAPDTEEYKYLHARRDALGGYLPQRKPTQEVLEVPELSAFDAQLKSSGEREFSTTMAFVRILSTLLKDKKIGKRVVPIVPDESRTFGMEGMFRQYGIWNPKGQQYTPQDKDQLMFYKESVDGQILQEGINEPGAMADWIAAATSYANSNFAMIPFYIYYSMFGFQRIGDLAWAAGDMHARGFLLGGTAGRTTLNGEGLQHEDGHSHIQADLIPNCVSYDPTFQYEVAVIVQDGLRRMYANNEDVFYYITLMNENYTHPDMPEGAEQDILKGMYLLKVGGKGDKKVQLMGSGTILQEVIAGAELLKADFGVEADIWSCPSFNLLHRDAVEVERFNRLHPLEAEKVPFVTSKLQGHDGPVIAATDYIRSYADRIRAYIPNDYHVLGTDGFGRSDSRANLRRFFEVDRYNVAVAALAALAEQGKVSKETVQQAIEKYGIKADSAPSWKR

SEQ ID NO: 35252 - protein, 154 aa, Neisseria meningitidis
MKCPFCAHPDTRVADSRLMDERNAVRRRRHCPNCGKRFGTLETAELKMPAVIGPDKKRSPFNAQRLRNDLTAAARKSALTPEQIDETVRLTEHRLYTSGLRDIPSAELADMVLKELLEHNTEAAVRFAALHKRFDNPADFASWLAQAVKTGGKA

SEQ ID NO: 35253 - protein, 162 aa, Neisseria meningitidis; identical to SEQ ID NO: 911

SEQ ID NO: 35254 - protein, 291 aa, Neisseria meningitidis
MLQGSLVALITPMNQDGSIHYEQLRDLIDWHIENGTDGIVAVGTTGESATLSVEEHTAVIEAVVKHVAKRVPVIAGTGANNTVEAIALSQAAEKAGADFTLSVVPYYNKPSQEGIYQHFKTIAEATSIPMIIYNVPGRTVVSMTNDTILRLAEIPNIVGVKEASGNIGSNIELINRAPEGFVVLSGDDHTALPFMLCGGHGVITVAANAAPKLFADMCRAALQGDIALARKLNDQLIPIYDTMFCEPSPAAPKWAVSALGRCEPHVRLPLVPLTEGGQAKVRAALKASGQL

SEQ ID NO: 35255 - protein, 273 aa, Neisseria meningitidis; identical to SEQ ID NO: 19705

SEQ ID NO: 35256 - protein, 174 aa, Neisseria meningitidis; identical to SEQ ID NO: 14426

SEQ ID NO: 35257 - protein, 159 aa, Neisseria meningitidis
MSTFFQQTAQAMIAKHINRFPLLKLDRVIDWQPIEQYLNRQKNRYLRDHRGRPAYPLLSMFKAVLLGQWHSLSDPELEHSLITRIDFNLFCRFDELSIPDYSTLCRYRNWLAQDDTLSELLKLINRQLTEKNLKVEKASAAVVDATIIQTAGSKQRQAR

SEQ ID NO: 35258 - protein, 259 aa, Neisseria meningitidis; identical to SEQ ID NO: 1423

SEQ ID NO: 35259 - protein, 330 aa, Neisseria meningitidis; identical to SEQ ID NO: 19399

SEQ ID NO: 35260 - protein, 441 aa, Neisseria meningitidis; identical to SEQ ID NO: 18295

SEQ ID NO: 35261 - protein, 174 aa, Neisseria meningitidis; identical to SEQ ID NO: 3281

SEQ ID NO: 35262 - protein, 410 aa, Neisseria meningitidis; identical to SEQ ID NO: 19060

SEQ ID NO: 35263 - protein, 366 aa, Neisseria meningitidis; identical to SEQ ID NO: 25346

SEQ ID NO: 35264 - protein, 171 aa, Neisseria meningitidis; identical to SEQ ID NO: 18950

SEQ ID NO: 35265 - protein, 195 aa, Neisseria meningitidis; identical to SEQ ID NO: 7027

SEQ ID NO: 35266 - protein, 218 aa, Neisseria meningitidis; identical to SEQ ID NO: 18436

SEQ ID NO: 35267 - protein, 718 aa, Neisseria meningitidis; identical to SEQ ID NO: 2124

SEQ ID NO: 35268 - protein, 621 aa, Neisseria meningitidis
VLKTPPTLAAELSGKTGVSISAPYANENSRISLSAANIEAENGKIKIQSYGDQYYYARQSELYTFERRSYKTGKWYNRKHITEVKEHKNAKPDAVNLSASQGIDIKSGGSIDAYATAFDAPKGSINIEAGRKLTLYAVEELNYDKLDSQKRRRFLGISYSKAHDTTTQVMKTALPSRVVAESANLQSGWDTKLQGTQFETTLGGATIRAGVGEQARADAKIILEGIKSSIHTETVSSSKSTLWQKQAGRGSNIETLQLPSFTGPVAPVLTAPGGYIVDIPKGNLKTEIEKLSKQPEYAYLKQLQVAKNVNWNQVQLAYDKWDYKQEGLTRAGAAIIALAVTVVTAGAGVGAALGLNGAAAAAADAAFASLASQASVSLINNKGDVGKTLKELGRSRTVKNLVVAAATAGVSNKLGASSLATWSETPWVNNLNVNLANAGSAALINTAVNGGSLKDNLEANILAALVNTAHGEAASKIKQLDQHYIAHKVAHAVAGCAAAAANKGKCQDGAIGAAVGEILGEALLDGRDPSSLNVKDRAKIIAKAKLAAGTVAALSKGDVNAAANAAAVAVESNALSKERMDKLTKCLSGKTCSTTMEKVNAIKKDEQFSKVIDTEIQKSLF

SEQ ID NO: 35269 - protein, 114 aa, Neisseria meningitidis; identical to SEQ ID NO: 18081

SEQ ID NO: 35270 - protein, 1066 aa, Neisseria meningitidis
MRTTPTFPTKTFKPAAMALAVATTLSACLGGGGTSAPDFNAGGTGIGSNSRATTAKSAAVSYAGIKNEMCKDRSMLCAGRDDVAVTDRDAKINAPPPNLHTGDFTNPNDAYKNLINLKPAIEAGYTGRGVEVGIVDTGESVGSISFPELYGRKEHGYNENYKNYTAYMRKEAPEDGDGKDIEASFDDEAVIETEAKPTDIRHVKEIGHIDVVSHIIGGRSVDGRPAGGIAPDATLHIMNTHDGTKNEIMSAAIRNAWVKLGERGVRIVNNSFGTTSRAGTADHFQIANSEEQYRQALLAYSGGDKTDEGIRLMQQSDYGNLSYHIRNKNMLFIFSASNDAQAQPNTLTLLPFYEKDAQKGIITVAGVDRSGEKFNGSNHCGITAMWCLSAPYEASVRFTRTNPIQIAGTSFSAPIVTGTAALLLQKYPWMSNDNLRTTLLTTAQDIGAVGVDSKFGWGLLDAGKAMNGPASFPFGDFTADTKGTSDIAYSFRNDISGTGGLIKKGGSQLQLHGNNTYTGKTIIEGGSLVLYGNNKSDMRVETKGALIYNGAASGGSLNSDGIVYLADTDRSGANETVHIKGDLQLGGEGTLYTRLGKLLKVDGTAMTGGKLYMSARGKGAGYLNRTGQRVPFLSAAKIGRDYSFFTNIETDGGLLASLDSVEKTAGSEGDTLSYYVRRGNAARTASAAAHSAPAGLKHAVEQGGSNLENLMVELDASESSATPETVETAAADRTDMPGIRPYGATFRAAAAVQHANAADGVRIFNSLAATVYADSTAAHADMQGRRLKAVSDGLDHNATGLRVIAQTQQDGGTWEQGGVEGKMRGSTQTVGIAAKTGENTTAAATLGMGHSTWSENSANAKTDSISLFAGIRHDAGDIGYLKGLFSYGRYKNSISRSTGADEHAEGSVNGTLMQLGALGGVNVPFSATGDLTVEGGLRYDLLKQDAFAEKGSALGWSGNSLTEGTLVGLAGLKLSQPLSDKAVLFATAGVERDLNGRDYTVTGGFTGATAATGKTGARNMPHTRLVAGLGADVEFGNGWNGLARYSYAGSKQYGNHSGRVGVGYRF

SEQ ID NO: 35271 - protein, 305 aa, Neisseria meningitidis; identical to SEQ ID NO: 14673

SEQ ID NO: 35272 - protein, 63 aa, Neisseria meningitidis; identical to SEQ ID NO: 980

SEQ ID NO: 35273 - protein, 45 aa, Neisseria meningitidis; identical to SEQ ID NO: 645

SEQ ID NO: 35274 - protein, 119 aa, Neisseria meningitidis; identical to SEQ ID NO: 2176

SEQ ID NO: 35275 - protein, 233 aa, Neisseria meningitidis
MSARENILAKLKKADALPMEEPAVFDYYREMGVSWGSEAERLKHWAAAMRAVKTEIYWVTKSNWMQVFREAAEGKGLKNILLPLATEHGQIARAALADSNIEPIAFEREIDTWKTEFFTNIDAGFSGAQCGIARTGTLMLFSSPEEPRTLSLVPPVHFCLFDTSKMYNEFHNAVEGEKLVENGMPTNVFLISGPSKTADIQLTLAYGAHGPRDLVILAILPDHISPTDLEENA

SEQ ID NO: 35276 - protein, 170 aa, Neisseria meningitidis; identical to SEQ ID NO: 24231

SEQ ID NO: 35277 - protein, 148 aa, Neisseria meningitidis; identical to SEQ ID NO: 14771

SEQ ID NO: 35278 - protein, 94 aa, Neisseria meningitidis; identical to SEQ ID NO: 11561

SEQ ID NO: 35279 - protein, 352 aa, Neisseria meningitidis; identical to SEQ ID NO: 327

SEQ ID NO: 35280 - protein, 339 aa, Neisseria meningitidis
MSDTPATPATRDFGLIDGRAVTSYVLSNRRGTRVCVLDLGGIVQEFSVLADGVRENLVVSFDDAASYADNPFQINKQIGRVAGRIRGAAFDINGRTYRVEANEGRNALHGGSHGLAVTRFNAVAADGRSVVLRSRLQQSADGYPNDLDLDISYRLDEDDRLTVSYRATALGDTVFDPTLHIYWRLDAGLHDAVLHIPQGGHIPADAEKLPVSTVSDDLEVFDFSRPKPLDAAVAALRRETGRAGFDDAYRVPSDIGRPAAVLQAGRRRRISIYSDRNGLVIFTAAPQDFARHDAGVYDALATEAQTLPDSLNWPEFGNIRLNKGDTREATIAYGIESLS

SEQ ID NO: 35281 - protein, 266 aa, Neisseria meningitidis
MNAFNLIIIGDEILHGSRQDKHFVFFKSLLESKGLKLNQVQYLPDEPDLLVKQLRRSFSDGMPTFVTGGIGATPDDHTRQAAAAALDLPVVRHAQAAGFIEGVTLKRGEPLDSPEHAQRLKMADFPQGAELVPNPFNNIAGFSIREHYFFPGFPVMAHPMAEWVLDTYYAGRFNQTKRGSRSVYVFEQPESRITPIMEHIEQTYLGVRSYSLPSVGWTHSDGTQVKPHIEFGIKAEGEAVNLLDAAWAEVLHSLEGLGAELKNRVN

SEQ ID NO: 35282 - protein, 852 aa, Neisseria meningitidis
MPANLSSALETFKQQRDAAEAHYLKANRVSVFFREYTAAVETLLAALWAEYFQNSALCLMAVGGFGRGELYPCSDVDLAVVSPAPLSDGIQEQIARFVQTLWDCKLMPSVKSGSVDELCESVRNDITGDTAFLEARFLFGNRQTVDKLAEKMNAQRNVAAFVEAKLVEMEHRHAKSQGSGAVLEPNIKSCPGGLRDIHTLLWIAKAQGLATDLPDLLKQRILTRAEAGMLSHGYRRLAHIRIHLHLNANRAEDRLLFDLQPQVAESMGYEGLNLRRQSEELMRVFYRAIKTVKQLGGILTPMLQSRVSSTPLRVTLRIDDDYIQVNNQIAARHTDIFFRRPEHIFKIVEIMQQRNDITALEPQTLRAWWGATRKINRSFYQNSENRHRFAGFFRNGNGLTQTLRFLNLYGVLGRYLPAWEKIVGLLQHDLFHIYPVDDHILTVVRNVRRLALDMHSHELPYASALMQSFEKQDILYLAAFFHDIAKGRGGDHAIQGIADARQFAADHFLTGEESDLLAWLVENHLLMSAVAQKEDIQDPDVLDAFCKRVQTHERLSALYLLTISDIRGTNPKLWNAWRASLLESLFHAAGRYLTGNGGNPHTLFGRRRQEAADLLTRAAVPEKQQKKLWNALGSAYFARHQSREILWHAANLVHDFETPIVRSRILPQSDSFQVMVFMPNGPRLFARLCRIFSRHGFDILAARAFITEHDYILDTFIVQIPSQHAPEDYPDIQSALEAELNSFIHGHTVAEISSHSRRISRRSRYMPIAPSITITPEEDYPDWYSVEITAVNRPFLLADMAEVFFAHNVSLRYAKISTLDERAEDSFTVFSLDLKNPKIQSSLKQTLLEQLS

SEQ ID NO: 35283 - protein, 158 aa, Neisseria meningitidis
  misc_feature 3, 4: 'Xaa' is any amino acid
VCXXLGSQAKTILVTHLQQTNRFNVLNRTNLNALKQESGISGKAHNLKGADYVVTGDVTEFGRRDVGDHQLFGIFGRGKSQIAYAKVALNIVNVNTSEIVYSAQGAGEYALSNREIIGFGGTSGYDATLNGKVLDLAIREAVNSLVQAVDNGAWQPNR

SEQ ID NO: 35284 - protein, 307 aa, Neisseria meningitidis; identical to SEQ ID NO: 6458

SEQ ID NO: 35285 - protein, 211 aa, Neisseria meningitidis
LNIKYSGIENRFETAILKKNGVRSGFVSFAPNLAAVKLNDYAKVRKRITKTKQKADIVIVMFHGGAEGKQAEHLPFDTEIFYGENRGNVVEFARLAVDSGADVVFGQGPHVTRAVELYRDRFISYSGGNFATYGAINTSGISGIAPIFKIITDKQGRFVSGNIIPITQVGDKIPKIDPEKTVIGRIIYLNRSDFPNENGLDVSPDGNITRR

SEQ ID NO: 35286 - protein, 478 aa, Neisseria meningitidis; identical to SEQ ID NO: 19831

SEQ ID NO: 35287 - protein, 361 aa, Neisseria meningitidis; identical to SEQ ID NO: 2308

SEQ ID NO: 35288 - protein, 601 aa, Neisseria meningitidis; identical to SEQ ID NO: 18531

SEQ ID NO: 35289 - protein, 384 aa, Neisseria meningitidis; identical to SEQ ID NO: 19784

SEQ ID NO: 35290 - protein, 339 aa, Neisseria meningitidis; identical to SEQ ID NO: 18416

SEQ ID NO: 35291 - protein, 725 aa, Neisseria meningitidis
MTRFKYSLLFAALLPVYAQADVSVSDDPKPQESTELPTITVTADRTASSNDGYTVSGTHTPLGLPMTLREIPQSVSVITSQQMRDQNIKTLDRALLQATGTSRQIYGSDRAGYNYLFARGSRIANYQINGIPVADALADTGNANTAAYERVEVVRGVAGLLDGTGEPSATVNLVRKRPTRKPLFEVRAEAGNRKHFGLDADVSGSLNTEGTLRGRLVSTFGRGDSWRRRERSRDAELYGILEYDIAPQTRVHAGMDYQQAKETADAPLSYAVYDSQGYATAFGPKDNPATNWANSRHRALNLFAGIEHRFNQDWKLKAEYDYTRSRFRQPYGVAGVLSIDHNTAATDLIPGYWHADPRTHSASVSLTGKYRLFGREHDLIAGINGYKYASNKYGERSIIPNAIPNAYEFSRTGAYPQPSSFAQTIPQYGTRRQIGGYLATRFRAADNLSLILGGRYSRYRTGSYDSRTQGMTYVSANRFTPYTGIVFDLTGNLSLYGSYSSLFVPQSQKDEHGSYLKPVTGNNLEAGIKGEWLEGRLNASAAVYRARKNNLATAAGRDPSGNTYYRAANQAKTHGWEIEVGGRITPEWQIQAGYSQSKTRDQDGSRLNPDSVPERSFKLFTAYHFAPEAPSGWTIGAGVRWQSETHTDPATLRIPNPAAKARAADNSRQKAYAVADIMARYRFNPRAELSLNVDNLFNKHYRTQPDRHSYGALRTVNAAFTYRFK

SEQ ID NO: 35292 - protein, 241 aa, Neisseria meningitidis; identical to SEQ ID NO: 400

SEQ ID NO: 35293 - protein, 761 aa, Neisseria meningitidis; identical to SEQ ID NO: 19322

SEQ ID NO: 35294 - protein, 49 aa, Neisseria meningitidis
MNIFYGEYEKDFYSYVPFMESQGITSECIWEGDLFDHPYYEDENSNDMD

SEQ ID NO: 35295 - protein, 369 aa, Neisseria meningitidis
LEAQLGAPIEDYAPPKHWTRKQLRSMGRVSYLCVDAAEQALTDAGLLGDESITDGRMGVACGSSSGSTKDIGDVGELLLTGTSRNFSANTYVRMMPHTTAANIGIFFGLKGRIIPTSSACSSGSQGIGYAYEAIKYGLTDMMLAGGGEEFFPSEVYVFDSLYAASRRNGEPEKTPRPYDANRDGLVIGEGAGIFVLEELEHAKRRGAKIYAELVGYGANSDAYHISTPRPDAQGAILAFQTALQHAGLAPEDIGWINLHGTGTHHNDSMESRAVAAVFGNNTPCTSTKPQTGHTLGAAGAIEAAFAWGIADRQSNPEGKLPPQLWDGQNDPNLPAINLTGSGSRWETEKRITASSSFAFGGSNCVLIIG

SEQ ID NO: 35296 - protein, 464 aa, Neisseria meningitidis
MNKQPLSLAVVGHTNTGKTSLLRTLLRDSGFGEVRNAPSTTRHVEEAAISDGADTLVFLYDTPGLEDAGGVLEWLENHTDNRSDGIERLQQFLGSHGAHHDFNQEAKVLRQVLQSDMAMYVIDAREPVLDKYRDELIILSWCAKPVMPVFNFTGGQPPESWTTMLARRNLHVFAGFDTVAFDFEGELRLWENLATMLPERSTLDRLTAMRRREWQRLDGEARREIADFLLDAAAFRQEVDENEDTATVLQTMQAEIRQLERQMQQRLFALYRFYHSEIDGGDWMPQAFRQDPFDSELLKQYGIRTGTGAATGALIGLGLDIATLGGSLGLGTAIGGFLGGILPNTRTISDKLAGRQTLHTDPETLTLLAARALDLLHVLQTRGHAAQSDIELHSRKAPWDAARLPPELNKARSHWKWSSLNTHRPETSRAERAGYVEKLQIRLSGKYSELNLNQDKAASRRQYK

SEQ ID NO: 35297 - protein, 111 aa, Neisseria meningitidis
  misc_feature 2, 3, 4: 'Xaa' is any amino acid
VXXXSDDEVHQVVNYVKSQAPADYIEGLLSGEAALETANIVNPNADSDELFDQAVAYVLESKKTSISSLQRQLRIGYNRAANLMEALENAGVVSPTDLNGSRKILAHKDHL

SEQ ID NO: 35298 - protein, 253 aa, Neisseria meningitidis
MTEFVVLIPARLDSSRLPRKALADIHGKPMVVRVAEQAAKSKAARVVVATDHPDIQTVCQAHGVEVVMTSNRHESGTTRLAEASAALKLPPHLVVVNVQGDEPLIAPELIDRTAEVLVENNVQMATAAHELHDFDELMNPNAVKVVLDKNRNAIYFSRAPIPYPRDAMRAGKREMPSETAVLRHIGIYAYRAGFLQRYAEMSVSPLETIESLEQLRVLWHGYPIAVETAKEAPAAGVDTQEDLDRVRAVFQTV

SEQ ID NO: 35299 - protein, 355 aa, Neisseria meningitidis
MGGKTFMLMAGGTGGHIFPALAVADSLRARGHHVIWLGSKDSMEERIVPQYGIRLETLAIKGVRGNGIKRKLMLPFTLYQTVREAQRIIRKHRVECVIGFGGFVTFPGGLAAKLLGVPIVIHEQNAVAGLSNRHLSRWAKRVLYAFPKAFSHEGGLVGNPVRADISNLPVPAERFQGREGRLKILVVGGSLGADVLNKTVPQALALLPDNARPQMYHQSGRGKLGSLQADYDALGVQAECVEFITDMVSAYRDADLVICRAGALTIAELTAAGLGALLVPYPHAVDDHQTANARFMVQAEAGLLLPQTQLTAEKLAEILGSLNREKCLKWAENARTLALPHSADDVAEAAIECTA

SEQ ID NO: 35300 - protein, 158 aa, Neisseria meningitidis; identical to SEQ ID NO: 2471

SEQ ID NO: 35301 - protein, 138 aa, Neisseria meningitidis; identical to SEQ ID NO: 774

SEQ ID NO: 35302 - protein, 41 aa, Neisseria meningitidis; identical to SEQ ID NO: 6068

SEQ ID NO: 35303 - protein, 46 aa, Neisseria meningitidis; identical to SEQ ID NO: 9631

SEQ ID NO: 35304 - protein, 468 aa, Neisseria meningitidis; identical to SEQ ID NO: 18038

SEQ ID NO: 35305 - protein, 88 aa, Neisseria meningitidis; identical to SEQ ID NO: 1100

SEQ ID NO: 35306 - protein, 794 aa, Neisseria meningitidis; identical to SEQ ID NO: 19836

SEQ ID NO: 35307 - protein, 250 aa, Neisseria meningitidis
  misc_feature 2, 3, 4: 'Xaa' is any amino acid
VXXXERILRDVQNIKNIGSEFTGQDSGSLTVATTHTQARYALPLIVADFVKRYPKVNLTIKQGSPAAIAQMVTSGESDLAIVTERIDDHPELGRLSCYDWTHAVIVPNDHPLLECRNPLRIEDLARFPLITYEFAFNAGSSIARAFSKARLEQPDVALAAADTDVLKTYVRLGLGVGLMAKMAYNPDTDGDLQLVDAAHLFEPSPTWIALRSDTYLRGYAYDFIQAFAPHLTREKVDRILYTPISEDFSI

SEQ ID NO: 35308 - protein, 498 aa, Neisseria meningitidis; identical to SEQ ID NO: 8286

SEQ ID NO: 35309 - protein, 412 aa, Neisseria meningitidis; identical to SEQ ID NO: 2406

SEQ ID NO: 35310 - protein, 333 aa, Neisseria meningitidis; identical to SEQ ID NO: 465

SEQ ID NO: 35311 - protein, 503 aa, Neisseria meningitidis
MKWLKRLTVIVGTFYRYRLAGLCASLMGSGWICALLKMMPQSSKLKNEPPAVRLRLALESLGPIFIKFGQVLSTRPDLIPHDYAVELAKLQDKVPPFDARLSREQIEKSLGQPIEKLYAEFETEPIASASIAQVHKARLHSGEQVAVKVLRPNLLPVIEQDLSLMRFGAGWVERLFADGKRLKPREVVAEFDKYLHDELDLMREAANASQLGRNFQNSDMLIVPKVFYDYCTSDVLTIEWMDGTPVSDIAKLKADGIDLHKLADYGVEIFFTQVFRDGFFHADMHPGNILVAADNRYIALDFGIVGTLTDYDKRYLAINFLAFFNRDYRRVATAHIESGWVPADTRAEELEAAVRAVCEPVFNKPISQISFGLVLMRLFEVSRRFNVEIQPQLVLLQKTLLNIEGLGRQLDPDLDLWKTAKPFLVKWMNGQVGPKALWRNLKNEAPDWAQIIPSLPRKISALIDENRQQEMRDAYIHLVKVQQRQSLWLAAIAVVLLLILLLK

SEQ ID NO: 35312 - protein, 411 aa, Neisseria meningitidis; identical to SEQ ID NO: 6085

SEQ ID NO: 35313 - protein, 234 aa, Neisseria meningitidis
  misc_feature 2, 3, 4: 'Xaa' is any amino acid
VXXXREIADKVGAYLFVDMAHYAGLIAGGEYPNPVPFCDFVTTTTHKTLRGPRGGVILCRDNTHEKALNSSIFPSLQGGPLMHVIAAKAVAFKEALQPEFKQYAKQVKINAAAMAEELVKRGLRIVSGRTESHVFLVDLQPMKITGKAAEAALGKAHITVNKNAIPNDPEKPFVTSGIRIGSAAMTTRGFNEADARVLANLVADVLSNPEDEANLAKVREQVTALCNKYPVYGA

SEQ ID NO: 35314 - protein, 321 aa, Neisseria meningitidis
MLRLTALTLCTVLALGACSPKDSDSAPQAKEQAVSAAQSESASVTVKTARGDVQIPQNPERIAVYDLGMLDTLSKLGVKTGLSVDKNRLPYLEEYFKTTKPAGTLFEPDYETLNAYKPQLIIIGSRAAKAFDKLNEIAPTIEMTADTANLKESSKERIDALAQIFGKQAEADKLKAEIDASFEAAKTAAQGKGKGLVILVNGGKMSAFGPSSRLGGWLHKDIGVPAVDEAIKEGSHGQPISFEYLKEKNPDWLFVLDRGAAIGEEGQAAKDVLDNPLVAETTAWKKGQVVYLVPETYLAAGGAQELLNASKQVADAFNAAK

SEQ ID NO: 35315 - protein, 126 aa, Neisseria meningitidis; identical to SEQ ID NO: 27428

SEQ ID NO: 35316 - protein, 242 aa, Neisseria meningitidis; identical to SEQ ID NO: 201

SEQ ID NO: 35317 - protein, 470 aa, Neisseria meningitidis; identical to SEQ ID NO: 14842

SEQ ID NO: 35318 - protein, 310 aa, Neisseria meningitidis; identical to SEQ ID NO: 8806

SEQ ID NO: 35319 - protein, 321 aa, Neisseria meningitidis; identical to SEQ ID NO: 6649

SEQ ID NO: 35320 - protein, 388 aa, Neisseria meningitidis; identical to SEQ ID NO: 18362

SEQ ID NO: 35321 - protein, 279 aa, Neisseria meningitidis; identical to SEQ ID NO: 8587

SEQ ID NO: 35322 - protein, 426 aa, Neisseria meningitidis
MENSLKEAALKFHELPVPGKISVTPTKSLATDKDLALAYSPGVAAPCMEIHADPQNAYKYTAKGNLVAVISNGTAVLGLGDIGALAGKPVMEGKGVLFKKFAGVDVFDIEIDEKDPQKLVDIIAALEPTFGGINLEDIKAPECFYIERELRKRCKIPVFHDDQHGTAIITAAAVLNALRFTGRKIEEATLVCSGAGAAAIACLNQLLDLGLKRENVTVCDSKGVIYQTREDKDRMDESKKFYAVEDNGQRVLADAVKGKDIFLGLSGANLLTPEMLNTMNEKPIVFAMANPNPEILPPLAKETRPDVVIGTGRSDFPNQVNNVLCFPFIFRGALDVGATTINEEMKRSCVYALADLAMEEVTEEVVAAYGKKFEFGAEYLIPTPFDSRLLPRVATAAAKAAMESGVATRPIADFEAYAAKLGEWKL

SEQ ID NO: 35323 - protein, 329 aa, Neisseria meningitidis; identical to SEQ ID NO: 247

SEQ ID NO: 35324 - protein, 283 aa, Neisseria meningitidis; identical to SEQ ID NO: 19158

SEQ ID NO: 35325 - protein, 376 aa, Neisseria meningitidis; identical to SEQ ID NO: 24290

SEQ ID NO: 35326 - protein, 147 aa, Neisseria meningitidis; identical to SEQ ID NO: 1095

SEQ ID NO: 35327 - protein, 306 aa, Neisseria meningitidis; identical to SEQ ID NO: 1708

SEQ ID NO: 35328 - protein, 276 aa, Neisseria meningitidis; identical to SEQ ID NO: 15375

SEQ ID NO: 35329 - protein, 547 aa, Neisseria meningitidis
MQRQQHIDAELLTDANVRFEQPLEKNNYVLSEDETPCTRVNYISLDDKTVRKFSFLPSVLMKETAFKTGMCLGSNNLSRLQKAAQQILIVRGYLTSQAIIQPQNMDSGILKLRVSAGEIGDIRYEEKRDGKSAEGSISAFNNKFPLYRNKILNLRDVEQGLENLRRLSSVKTDIQIIPSEEEGKSDLQIKWQQNKPIRFSIGIDDAGGKTTGKYQGNVALSFDNPLGLSDLFYVSYGRGLAHKTDLTDATGTETASGSRSYSVHYSVPVKKWLFSFNHNGHRYHEATEGYSVNYDYNGKQYQSSLAAERMLWRNRLHKTSVGMKLWTRQTYKYIDDAEIEVQRRRSAGWEAELRHRAYLNRWQLDGKLSYKRGTGMRQSMPAPEENGGGTIPGTSRMKIITAGLDAAAPFMLGKQQFFYATAIQAQWNKTPLVAQDKLSIGSRYTVRGFDGEQSLFGERGFYWQNTLTWYFHPNHQFYLGADYGRVSGESAQYVSGKQLMGAVVGFRGGHKVGGMFAYDLFAGKPLHKPKGFQTTNTVYGFNLNYSF

SEQ ID NO: 35330 - protein, 162 aa, Neisseria meningitidis
  misc_feature 157, 158: 'Xaa' is any amino acid
MKGDRLVIRELNKNLGLLLVTINQYFLHARILKNWGFEELGEHFFKQSIVEMKAADDLIERILFLEGLPNLQELGKLLIGESTEEIIACDLTKEQEKHEALLAAIATAEAQQDYVSRDLLEKQKDTNEEHIDWLETQQELIGKIGLPNYLQTAAQEXXHTLN

SEQ ID NO: 35331 - protein, 105 aa, Neisseria meningitidis; identical to SEQ ID NO: 895

SEQ ID NO: 35332 - protein, 604 aa, Neisseria meningitidis
MSEHDMQNTNPPLPPLPPEITQLLSGLDAAQWAWLSGYAWAKAGNGASAGLPALQTALPTAEPFSVTVLSASQTGNAKSVADKAADSLEAAGIQVSRAELKDYKAKNIAGERRLLLVTSTQGEGEPPEEAVVLHKLLNGKKAPKLDKLQFAVLGLGDSSYPNFCRAGKDFDKRFEELGAKRLLERVDADLDFTASANAWTDNIAALLKEEAAKNRATPAPQATPPAGLQTASEGRYCKADPFPAALLANQKITARQSDKDVRHIEIDLSGSDLHYLPGDALGVWFDNDPALVREILDLLGIDPATEIQAGGKTLPVASALLSHFELTQNTPAFVKGYAPFADDDELDRIAADNAVLQGFVQSTPIADVLHRFPAKLTAEQFAGLLRPLAPRLYSISSSQAEVGDEVHLTVGAVRFEHEGRARAGGASGFLADRLEEDGTVRVFVERNDGFRLPEDSRKPIVMIGSGTGVAPFRAFVQQRAAENAEGKNWLIFGNPHFAADFLYQTEWQQFAKDGFLHRYDFAWSRDQEEKIYVQDKIREQAEGLWQWLQEGAHIYVCGDAAKMAKDVEAALLDVIIGAGHLDEEGAEEYLDMLREEKRYQRDVY

SEQ ID NO: 35333 - protein, 210 aa, Neisseria meningitidis
MPSEPPSDGIARHPKSTIKMAKKPNKPFRLTPKLLIRAVLLICITAIGALAIGIVSTFNPNGGKTLQTEPQHTDSPRETEFWLPNGVVGQDAAQPEHHHAASSEPAQPDGTDESGSGLPSPAAPKKNRVKPQPADTAQTDRQPDDAGTQAENTLKETPVLPTNVPRPEPRKETPEKQAQPKETPKENHTKPDTPKNTPPKPHKEILDNLF

SEQ ID NO: 35334 - protein, 489 aa, Neisseria meningitidis
MTTARWVIDKHLQNFHILCKFAGILKTNSFISVEDKAKLSEKLEKLDLYHRRNTGKSLDATTHKIKELSFYMFGYRDVCGQVTQKFLFSPLGNLFLKHLDNNEYIQKIFLTMLWAIPFPHPYIKTDESIQLYPMRLIFKLLSDERLDCKLFSYEYIYLISFVKSADQNSYEKLVQDILVLRTCAEVKIKHQLTAENSRSHAYVNAAHEWESYFSKTLTDAGVLQKTDGKIICRLKHGKTETYRTVTSSEFSIPKQLQEFVKKLQSAYSFSEMPLNLNDSDRLKIDVIKEIYSFYPKELLEEIGELKDEAAYELLHLPRLIEQYADNNNGTEAYLFEDVLEMGFNMFYNVEAKKIGGPGNTDLECLYITQKRKFAVEAKSTKNKLSGINSGRLEDHKNKIKAIYTIVVTPRYVPAVLSDIRNCPIVIIRANTFAEFLYNCLINRSSIPEIDYRYFDEIIIKNLGKDISSEISNLTMQQFASNTTMEAYST

SEQ ID NO: 35335 - protein, 867 aa, Neisseria meningitidis
MSKTVRYLKDYQTPAYRILETDLHFDIAEPQTVVKSRLTVEPQRVGEPLVLDGSAKLLSVKINGAAADYMLEGETLTIADVPSERFTVEVETEILPAENKSLMGLYASAGNLFTQCEPEGFRKITFYIDRPDVMSKFTTTIVADKKRYPVLLSNGNKIDGGEYSDGRHWVKWEDPFAKPSYLFALVAGDLAVTEDYFTTMSGRNVKIEFYTAEADKPKVGFAVESLKNAMKWDETRFGLEYDLDIFMVVAVGDFNMGAMENKGLNIFNTKFVLADSRTATDTDFEGIESVVGHEYFHNWTGNRVTCRDWFQLSLKEGLTVFRDQEFSGDRASRAVRRIENIRLLRQHQFPEDAGPTAHPVRPASYEEMNNFYTMTVYEKGAEVVRMYHTLLGEEGFQKGMKLYFQRHDGQAVTCDDFRAAMADANGINLDQFALWYSQAGTPVLEAEGRLKNNSFELTIKQTVPPTPDMADKQPMMIPVKIGLLNRNGEAAAFDYQGKRATEAVLLLTEAEQIFLLEGVTEAVVPSLLRGFSAPVHLNYPYSDDDLLLLLAHDSDAFTRWEAAQTLYRRAVAANLAALSDGIGLPKHEKLLAAVEKVISDDLLDNAFKALLLGVPSEAELWDGAENIDPLRYHQAREALLDILAVRFLPKWHELNRQAAKQENQSYEYSPEAAGWRTLRNVCRAFVLRADPAHIETVAEKYAEMAQNMTHEWGILSAVNGNESDTRNRLLAQFADKFSDDALVMDKYFALVGSSRRSDTLQQVQTALQHPKFSLENPNKARSLIGSFSRNVPHFHAEDGSGYRFIADKVIEIDRFNPQVAARLVQAFNLCNKLEPHRKNLVKQALQRIRAQEGLSKDVGEIVGKILD

SEQ ID NO: 35336 - protein, 317 aa, Neisseria meningitidis; identical to SEQ ID NO: 4876

SEQ ID NO: 35337 - protein, 95 aa, Neisseria meningitidis; identical to SEQ ID NO: 440

SEQ ID NO: 35338 - protein, 222 aa, Neisseria meningitidis; identical to SEQ ID NO: 197

SEQ ID NO: 35339 - protein, 213 aa, Neisseria meningitidis; identical to SEQ ID NO: 5657

SEQ ID NO: 35340 - protein, 128 aa, Neisseria meningitidis; identical to SEQ ID NO: 8714

SEQ ID NO: 35341 - protein, 256 aa, Neisseria meningitidis; identical to SEQ ID NO: 19811

SEQ ID NO: 35342 - protein, 130 aa, Neisseria meningitidis; identical to SEQ ID NO: 18694

SEQ ID NO: 35343 - protein, 103 aa, Neisseria meningitidis; identical to SEQ ID NO: 392

SEQ ID NO: 35344 - protein, 96 aa, Neisseria meningitidis; identical to SEQ ID NO: 5810

SEQ ID NO: 35345 - protein, 313 aa, Neisseria meningitidis; identical to SEQ ID NO: 18749

SEQ ID NO: 35346 - protein, 117 aa, Neisseria meningitidis; identical to SEQ ID NO: 3629

SEQ ID NO: 35347 - protein, 231 aa, Neisseria meningitidis; identical to SEQ ID NO: 2520

SEQ ID NO: 35348 - protein, 393 aa, Neisseria meningitidis; identical to SEQ ID NO: 19353

SEQ ID NO: 35349 - protein, 150 aa, Neisseria meningitidis
MNIEVEMKVLDERMADFVPAYATEGSAGLDLRACLDEEVVLQPGETFLVPTGLAIYLANPAYAAVLLPRSGLGHKHGIVLGNLVGLIDSDYQGELKVSLWNRSSEPFAVKPFERIAQMVIVPIVQAGFKRVEEFVGSSRGEGGFGSTGSH

SEQ ID NO: 35350 - protein, 400 aa, Neisseria meningitidis; identical to SEQ ID NO: 19188

SEQ ID NO: 35351 - protein, 521 aa, Neisseria meningitidis; identical to SEQ ID NO: 19159

SEQ ID NO: 35352 - protein, 630 aa, Neisseria meningitidis; identical to SEQ ID NO: 24215

SEQ ID NO: 35353 - protein, 252 aa, Neisseria meningitidis; identical to SEQ ID NO: 10154

SEQ ID NO: 35354 - protein, 316 aa, Neisseria meningitidis; identical to SEQ ID NO: 5301

SEQ ID NO: 35355 - protein, 176 aa, Neisseria meningitidis; identical to SEQ ID NO: 3632

SEQ ID NO: 35356 - protein, 622 aa, Neisseria meningitidis; identical to SEQ ID NO: 19142

SEQ ID NO: 35357 - protein, 48 aa, Neisseria meningitidis; identical to SEQ ID NO: 6016

SEQ ID NO: 35358 - protein, 182 aa, Neisseria meningitidis; identical to SEQ ID NO: 2877

SEQ ID NO: 35359 - protein, 453 aa, Neisseria meningitidis
MLKKVLIANRGEIALRVLRACREMGIATVAVHSEADKDSLHVKLADESVCIGPAASAQSYLNVPAIIAAAEVSCADAVHPGYGFLAENADFAEQVEQSGFTFIGPKPDTIRLMGDKVSAKHAMIAAGVPCVPGSDGALPDDGEEILKIADKVGYPVIIKASGGGGGRGMRVVEKKEDLLQSVEMTKAEAGAAFGNPMVYMERYLQRPRHVEIQVIADEHGNAVYLAERDCSLQRRHQKVIEEAPAPFITEKERAKIGNACADACKRIGYRGAGTFEFLYEDGEFFFIEMNTRVQVEHPVTELITGVDIVQEQLRIASGLPLQYKQKDIKIEGHAFECRINAEDPYNFIPSPGPIESCHLPGGFGIRVDSHIYQGYRIPPYYDSLIGKICVHGKTREQAMAKMRVALAELAVTGIKTNTPLHRDLFADAGFQKGGVSIHYLEHWLEDRKAKQDK

SEQ ID NO: 35360 - protein, 162 aa, Neisseria meningitidis; identical to SEQ ID NO: 19196

SEQ ID NO: 35361 - protein, 211 aa, Neisseria meningitidis; identical to SEQ ID NO: 19275

SEQ ID NO: 35362 - protein, 232 aa, Neisseria meningitidis
MKSRHLALGVAALFALAACDSKVQTSVPADSAPAASAAAAPAGLVEGQNYTVLANPIPQQQAGKVEVLEFFGYFCPHCAHLEPVLSKHVKSFKDDMYLRTEHVVWQKEMLTLARLAAAVDMAAADSKDVANSHIFDAMVNQKIKLQEPEVLKKWLGEQTAFDGKKVLAAYESPESQARADKMQELTETFQIDGTPTVIVGGKYKVEFADWESGMHTIDLLADKVREEQKAAQ

SEQ ID NO: 35363 - protein, 495 aa, Neisseria meningitidis
MLKKIKKALFQPKKFFQDSMWLTTSPFYLTPPRNNLFVISNLGQLNQVQSLIKIQKLTNNLLVILYTSKNLKMPKLVHQSANKNLFESIYLFELPRSPNNITPKKLLYIYRSYKKILNIIQPAHLYMLSFTGHYSYLISIAKKKNITTHLIDEGTGTYAPLLESFSYHPTKLERYLIGNNLNIKGYIDHFDILHVPFPEYAKKIFNAKKYNRFFAHAGGISINNNIANLQKKYQISKNDYILVSQRYPISDDLYYKSIVEILNSISLQIKGKIFIKLHPKEMGNNYVMSLFLNMVEINPRLVVINEPPFLIEPLIYLTNPKGIIGLASSSLIYTPLLSPSTQCLSIGELIINLIQKYSMVENTEMIQEHLEIIKKFNFINILNDLNGVISNPLFKTEETFETLLKSAEFAYKSKNYFQAIFYWQLASKNNITLLGHKALWYYNALYNVKQIYKMEYSDIFYIDNISVDFHSKDKLTWEKIKHYYYSADNRIGRDR

SEQ ID NO: 35364 - protein, 138 aa, Neisseria meningitidis; identical to SEQ ID NO: 15462

SEQ ID NO: 35365 - protein, 658 aa, Neisseria meningitidis; identical to SEQ ID NO: 8975

SEQ ID NO: 35366 - protein, 71 aa, Neisseria meningitidis; identical to SEQ ID NO: 2650

SEQ ID NO: 35367 - protein, 204 aa, Neisseria meningitidis; identical to SEQ ID NO: 504

SEQ ID NO: 35368 - protein, 137 aa, Neisseria meningitidis
VFTNGCFDILHRGHVTYLAQARSAGAALVLALNTDASVRRLGKGGDRPINPLENRAAVAAALESVDLVTWFDEDTPAALIEAVKPEILVKGGDWAADKIVGAAETLARGGQVFSIPFLHQTSTTKTLAKIRAAEGGK

SEQ ID NO: 35369 - protein, 197 aa, Neisseria meningitidis; identical to SEQ ID NO: 27564

SEQ ID NO: 35370 - protein, 201 aa, Neisseria meningitidis; identical to SEQ ID NO: 19686

SEQ ID NO: 35371 - protein, 201 aa, Neisseria meningitidis; identical to SEQ ID NO: 9086

SEQ ID NO: 35372 - protein, 231 aa, Neisseria meningitidis
MSELILKCEGVGKRYRDGGLDVRVLHGLDLEILAGESTGIIGSSGSGKSTLLHILGGLDMPSEGRVLLMGEDLSTLSQRQLGILRNRHLGFVYQFHHLLPEFSALENVMMPLLIGKKKREEAAETAMAMLEKVGLKHRSAHRAGELSGGERQRAAIARALVTQPKCLLADEPTGNLDRANARNVLDMMLELKTELGTGLVVVTHDDELAGRFERVMVMKDGSLHPKQGANA

SEQ ID NO: 35373 - protein, 77 aa, Neisseria meningitidis; identical to SEQ ID NO: 1677

SEQ ID NO: 35374 - protein, 434 aa, Neisseria meningitidis; identical to SEQ ID NO: 19711

SEQ ID NO: 35375 - protein, 187 aa, Neisseria meningitidis; identical to SEQ ID NO: 18399

SEQ ID NO: 35376 - protein, 246 aa, Neisseria meningitidis; identical to SEQ ID NO: 18239

SEQ ID NO: 35377 - protein, 664 aa, Neisseria meningitidis
MKRHFMPKILQQTTLHRFFRANTHHPISPSVLQQAGDLIRWLCFSDGISDFRPCRLKPQNPIGGTVMNTVSNYLSALREAMKAQGLDALVIPSADPHLSEYLPEHWQARRELSGFTGSVGTFVLTTDEAGVWVDSRYWEQAAKQLAGSGIELQKSGQVPPYNEWLAANLPENAAVGIPSDMVSLTGKRTLAQSLTAKNIRIEHPDDLLDQVWTSRPAIPAETVFIHDPAYVSETAAEKLARVRAVMAEKGADYHLVSSLDDIAWLTNLRGSDVPFNPVFVSFLLIGKDNAVLFTEQCRLNAEAAAALQTAGIAVEPYAQVAGKLAQIGGALLIEPNKTAVSTLVRLPESVRLIEGTNPSTLFKSCKSEADIARIREAMEQDGAALCGFFAEFEDIIGNGGSLTEIDVDTMLYRHRSERPGFISLSFDTIAGFNANGALPHYSATPESHSTISGNGLLLIDSGAQYKSGTTDITRVVPVGTPTAEQKRDNTLVLKAHIALAEAVFPENIPSPLIDAICRKPLWQAQCDYGHGTGHGVGYFLNVHEGPQRIAFAAPATPETAMKKGMVTSIEPGLYRPGKWGIRIENLAANQAVAAPQETEFGSFLCFETLTLCPIDTRLMDTALMTDGEIDWVNHYHAEVRRRLEPLTEGAAKAWLIKRTEPLER

SEQ ID NO: 35378 - protein, 114 aa, Neisseria meningitidis; identical to SEQ ID NO: 53

SEQ ID NO: 35379 - protein, 88 aa, Neisseria meningitidis; identical to SEQ ID NO: 6148

SEQ ID NO: 35380 - protein, 876 aa, Neisseria meningitidis
MQEHYQPAAIEPAAQKKWDDARIFNVSEDASKPKYYCLSMFPYPSGKLHMGHVRNYTIGDVLSRFKRLNGFNVMQPMGWDAFGMPAENAAMKNNVAPAAWTYDNIEYMKTQLKSLGFAIDWARETATCKPEYYRWEQWLFTKLFEKGIVYRKNGTVNWDPVDQTVLANEQVIDGRGWRSGALIEKREIPMYYFKITDYAEELLNDLDKLEHWPEQVKTMQRNWIGKSRGMTVRFAVSDDSKQGLEGDYAKFLQVYTTRPDTLMGATYVAVAAEHPLATAAAADKPELQAFIAECKAGSVAEADMATMEKKGVPTGRYVVNPLNGDKLEVWIANYVLWGYGDGAVMAVPAHDERDFEFAAKYSLPKKQVIAVGDNAFDANRWQEWYGDKENGVLVNSGDLDGLDFQTAFDAVAAKLQSQGAGEPKTQYRLRDWGISRQRYWGCPIPIVHCEQCGDVPVPADQLPVVLPENVVPDGMGSPLAKMPEFYETACPSCGGAAKRETDTMDTFMESSWYFFRYMSPKFSDGMVSAEAAKYWGAVDQYIGGIEHAILHLLYARFFTKLMRDEGLVNVDEPFERLLTQGMVVCETYYRENDKGGKDWINPADVELTFDDKGRPISAVLKADGLPVVISGTEKMSKSKNNGVDPQELINAYGADTARLFMMFAAPPEQSLEWSDSGVEGAHRFLRRLWRTVYEYLKQGEAVKAFAGSQDGLSKELKDLRHKLHATTAKVSDDYGRRQQFNTAIAAVMELLNQYDKTDTGGEQGRAVAQEVLETAVRLLWPIVPHICETLWSELNGAKLWEAGWPTVDEAALVKSEIEVMVQVNGKLRGKITVAADASKADLEAAALATEGAVKFMEGKPAKKIIVVPGRLVNIVV

SEQ ID NO: 35381 - protein, 287 aa, Neisseria meningitidis; identical to SEQ ID NO: 14097

SEQ ID NO: 35382 - protein, 288 aa, Neisseria meningitidis; identical to SEQ ID NO: 2832

SEQ ID NO: 35383 - protein, 305 aa, Neisseria meningitidis; identical to SEQ ID NO: 1198

SEQ ID NO: 35384 - protein, 150 aa, Neisseria meningitidis
MAKPLKYPVSALVVLHDGDGGILLIERTHPKGFWQSVTGSLEPGETVAQTARREVWEETGILLADGQLQDWHDSTVYEIYHHWRHRYPKGVFENREHLFSAEIPRDTPIALQPEEHVSYGWFGLEEAAEKVFSPSNRRAILELGRFLGKR

SEQ ID NO: 35385 - protein, 371 aa, Neisseria meningitidis
MRLFKSLKNPKKTDAKLPKKSSGLNNRAAIGIDIDQHSIKMVQLSGRSLNQIQLEKYVIAKLPKNIIQGNKVQNYDQLVTYLQQAYAKLGTSCKNIIASVPQNLATIEQLTYTDKDAELDLQGFVESSISEVSSISLEEANYDYQVLSQSAAGEAVLAVASRKDEIEPLIDAFNAAGMKLSALDVDIFGQYNAYALWINHFAPELAAEKVAIFGVYAAQTYALVIQDGKLLYKQETSVSEEQLNQLIQHTYQVTEEKAEEIINSPQKPSDYQESVANYFNQQITQEIQRVLQFYYTTQTADDMTDIKHILLTGEAARQEGIAQTVASQTNADVQCVHPARYFADNLKTDKQQFELDAPTLTRAFGLAVRGL

SEQ ID NO: 35386 - protein, 539 aa, Neisseria meningitidis
MDNLVWDGIPDIRTLDQTIRKHAHPLNLIVCLPDNQIPDFQTAQDASDAECRLKHRLDQATQCLQFDSINLIEHILPDVRFWLVPPSRTRRLHEHFHHISWQTEAIPQTESKPDKPWFALPQTSERQKPEHILVIGAGISGAATAHALASYGISVTVLEARKAAQAASGNRQGLLYAKISPHDTEQTELLLAGYGYTKRLLGHILPESETWGGNGIIHLNYSRTEQQRNHELGLQKHHNHLYRSITSAEAEKIAGIPLSVPYDHPSCGLYWQHGVWLNPPAFVRTLLNHPLIGLHEDTPLTDISHDGEKWIASTPNGIFSATHIIYCTGAHSPRLPETNLAALPLRQIRGQTGLTPSTPFSEQLRCAVSGESYISPSWHGLHCYGASFIPNSSHTGWNEAEEASNRQALAHLNPALSESLFAANPNPQKHQGHAAIRCDSPDHLPLVGALGDIAAMRQTYTKLALDKNYRIDTPCPYLPNAYVNTAHGTRGLATAPICAAAIAAQILGLPHPLSKRLRHALHPNRTIIRAIVRRKDLTP

SEQ ID NO: 35387 - protein, 245 aa, Neisseria meningitidis; identical to SEQ ID NO: 19203

SEQ ID NO: 35388 - protein, 253 aa, Neisseria meningitidis
MMGDSVIYYVEQADKPVNRAGERARKTFKYFWRELFWERRRIIPALDFAMVKAPFFQDGEDGEICEHMWIDDIYFDGLYIYGVLNNEPGELTNVEQGESVCVPVDDISDWMFVCNGIPYGGFTVQAMRGQMTEEERTEHDAAWGIDFGDPWQVLLAYEEKEHPENLEEHPMCRNCIDDFRQQLSQNPDFLHEQDEDGYTPLHHDAIAGNALMVKAMLEYGANPASTTSEGYTALDFARLTGWQNVADLLEPRH

SEQ ID NO: 35389 - protein, 104 aa, Neisseria meningitidis; identical to SEQ ID NO: 18463

SEQ ID NO: 35390 - protein, 227 aa, Neisseria meningitidis; identical to SEQ ID NO: 1151

SEQ ID NO: 35391 - protein, 215 aa, Neisseria meningitidis; identical to SEQ ID NO: 19614

SEQ ID NO: 35392 - protein, 170 aa, Neisseria meningitidis; identical to SEQ ID NO: 1571

SEQ ID NO: 35393 - protein, 210 aa, Neisseria meningitidis; identical to SEQ ID NO: 18932

SEQ ID NO: 35394 - protein, 423 aa, Neisseria meningitidis; identical to SEQ ID NO: 7094

SEQ ID NO: 35395 - protein, 597 aa, Neisseria meningitidis; identical to SEQ ID NO: 345

SEQ ID NO: 35396 - protein, 260 aa, Neisseria meningitidis; identical to SEQ ID NO: 485

SEQ ID NO: 35397 - protein, 388 aa, Neisseria meningitidis; identical to SEQ ID NO: 22125

SEQ ID NO: 35398 - protein, 505 aa, Neisseria meningitidis; identical to SEQ ID NO: 19989

SEQ ID NO: 35399 - protein, 284 aa, Neisseria meningitidis; identical to SEQ ID NO: 9988

SEQ ID NO: 35400 - protein, 601 aa, Neisseria meningitidis
MRKVCASARTRSMIYGSMPSEKLTIFQTAFVMQVNIQIPYILPRCVRAEDTPYACYLKQLQVTKDVNWNQVQLAYDKWDYKQEGLTGAGAAIIALAVTVVTAGAGAGAALGLNGAAAAATDAAFASLASQASVSLINNKGNIGNTLKELGRSSTVKNLMVAVATAGVADKIGASALNNVSDKQWINNLTVNLANAGSAALINTAVNGGSLKDNLEANILAALVNTAHGEAASKIKQLDQHYITHKIAHAIAGCAAAAANKGKCQDGAIGAAVGEIVGEALVKNTDFSRMSATEIEKAKAKITAYSKLVAGTASAVVGGDVNTAANAATVAVENNTLYPRCVGAKCDEFQKEQQKWIRENPEEYREVLLLQTGFIPIIGDIQSFVQAQTAADHLFALLGVVPGIGESIQAYKVAKAAKNLQGMKKALDKAATVATAQGYVSKTKIKIGQTELRVTAATDKQLLKAIGEGRDTTGKMTEQLFDSLAKQNGFRVLSGGKYGGNNGFDHVWQAADGSVVLIVESKQIRNGTVQLNPNGAGGYTQMSEDWIRQVLDQLPDGSPAKAAVFKANKNGTLKTAIAGVDRQTGKAVILPVKVPSKANIRR

SEQ ID NO: 35401 - protein, 127 aa, Neisseria meningitidis; identical to SEQ ID NO: 19049

SEQ ID NO: 35402 - protein, 161 aa, Neisseria meningitidis; identical to SEQ ID NO: 7269

SEQ ID NO: 35403 - protein, 553 aa, Neisseria meningitidis
MTESITRDSMQYDVVIVGAGPSGLSAAIKLKQLAEQNGREISVCVVEKGSEAGAHSLAGAVIDPIALNELIPDWKEKGAPLTRTVTQDKVLFLTEKKAFNLPITPNFDNHGNYIVSLGEVVRWLAEQAENMGVEIYPGFAAAEVLYHEDGSVKGIATGNMGIGKDGEPTDSFQPGMELWAQQTLFAEGCRGSLSKQIIERFKLDQNSQPQTYGLGIKEVWEVPSEQHQPGLVVHSAGWPLDSKTYGGAFVYHFDDNKVAVGFVVGLDYQNPYLSPFEEFQRFKTHPEIRKTFEGGRRIAYGARSLIEGGLQSLPKLSFKGGILVGDAAGFLNMPRIKGIHTAMKSAMLAAEAVFPLLENLEEVENFDSGKEAADYQQRFEQSWLYQELYAARNVRPSFKWGVYLGSIYTGIDQMIFRGKAPWTLKHHGKDNEQLKKAAACKPIDYPKPDGVLTFDRLSSVFLANLAHEENQPDHLVLNNPQTMIDVNYKEYASPETRYCPAGVYEIVEENGNPRLQINAANCVHCKTCDIKDPTQNITWICPEGASGPNYGGM

SEQ ID NO: 35404 - protein, 101 aa, Neisseria meningitidis; identical to SEQ ID NO: 1118

SEQ ID NO: 35405 - protein, 226 aa, Neisseria meningitidis; identical to SEQ ID NO: 1949

SEQ ID NO: 35406 - protein, 424 aa, Neisseria meningitidis; identical to SEQ ID NO: 18400

SEQ ID NO: 35407 - protein, 370 aa, Neisseria meningitidis
MQTAARRSFDYDMPLIQTPTSACQIRQAWAKVADTPDRETAGRLKDEIKVLLKETNAVLVAHYYVDPLIQDLALETGGCVGDSLEMARFGAEHEAGTLVVAGVRFMGESAKILCPEKTVLMPDLEAECSLDLGCPEEAFSAFCDQHPDRTVVVYANTSAAVKARADWVVTSSVALEIVSYLKSRGEKLIWGPDRHLGDYIRRETGADMLLWQGSCIVHNEFKGQELAALKAEHPDAVVLVHPESPQSVIELGDVVGSTSKLLKAAVSRPEKKFIVATDLGILHEMQKQAPDKEFIAAPTAGNGGSCKSCAFCPWMAMNSLGGIKYALTSGHNEILLDRKLGEAAKLPLQRMLDFAAGLKRGDVFNGMGPA

SEQ ID NO: 35408 - protein, 277 aa, Neisseria meningitidis; identical to SEQ ID NO: 34063

SEQ ID NO: 35409 - protein, 481 aa, Neisseria meningitidis; identical to SEQ ID NO: 8355

SEQ ID NO: 35410 - protein, 265 aa, Neisseria meningitidis
MLKQRVITAMWLLPLMLGMLFYAPQWLWAAFCGLIALIALWEYARMGGLCKIKTNHYLAATLVFGVVAYAGGWMLPNLVWYVVLAFWLAVMPLWLRFKWRLNGGWQVYAAGWLLVMPFWFALVSLRPHPDDALPLLAVMGLVWVADVCAYFSGKAFGKHKIAPAISPGKSWEGAIGGAVCVAVYMTAVRSAGWLAFDTGWFDTVLIGLVLTVVSVCGDLLESWLKRAAGIKDSSNLLPGHGGVFDRTDSLIAVISVYAAMMSVLN

SEQ ID NO: 35411 - protein, 141 aa, Neisseria meningitidis; identical to SEQ ID NO: 6006

SEQ ID NO: 35412 - protein, 250 aa, Neisseria meningitidis; identical to SEQ ID NO: 2214

SEQ ID NO: 35413 - protein, 71 aa, Neisseria meningitidis
  misc_feature 65, 66: 'Xaa' is any amino acid
MGYRVGINCFDTRLQADDYLLSSLPPTVTQDGKIIRPERVGDKWILNGKPVTLSYPKCSNFEQIXXTHLIN

SEQ ID NO: 35414 - protein, 187 aa, Neisseria meningitidis; identical to SEQ ID NO: 508

SEQ ID NO: 35415 - protein, 197 aa, Neisseria meningitidis
MSELLNYVASCRLPTEWGVFTMHGFEEANGQEHVALTVGDFSDGNPVLTRIHSECLTGDALFSRKCDCGPQLEAAMRAVQTEGRGIIVYLRQEGRGIGLINKIRAYHLQDQGMDTVEANLALGLPVDARDFRLAQSIYEYLGIRSVKLLTNNPEKIQTLKDAGINVFERIPLHVGENLENKRYLQTKADKLGHLMSE

SEQ ID NO: 35416 - protein, 94 aa, Neisseria meningitidis; identical to SEQ ID NO: 11561

SEQ ID NO: 35417 - protein, 183 aa, Neisseria meningitidis; identical to SEQ ID NO: 18322

SEQ ID NO: 35418 - protein, 201 aa, Neisseria meningitidis; identical to SEQ ID NO: 10369

SEQ ID NO: 35419 - protein, 616 aa, Neisseria meningitidis
MYLPSMKHSLPLLAALVLAACSSTNTLPAGKTPADNIETADLSASVPTRPAEPERKTLADYGGYPSALDAVKQKNDAAVAAYLENAGDSAMAENVRNEWLKSLGARRQWTLFAQEYAKLEPAGRAQEVECYADSSRNDYTRAAELVKNTGKLPSGCTKLLEQAAASGLLDGNDAWRRVRGLLAGRQTTDARNLAAALGSPFDGGTQGSREYALLNVIGKEARKSPNAAALLSEMESGLSLEQRSFAWGVLGHYQSQNLNVPAALDYYGKVADRRQLTDDQIEWYARAALRARRWDELASVISHMPEKLQKSPTWLYWLARSRAATGNTQEAEKLYKQAAATGRNFYAVLAGEELGRKIDTRNNVPDAGKNSVLRMAEDGAIKRALVLFQNSRTAGDAKMRRQAQAEWRFATRGFDEDKLLTAAQTAFDHGFYDMAVNSAERTDRKLNYTLRYISPFKDTVIRHAQNVNVDPAWVYGLIRQESRFVIGAQSRVGAQGLMQVMPATAREIAGKIGMDAAQLYTADGNIRMGTWYMADTKRRLQNNEVLATAGYNAGPGRARRWQADIPIEGAVYAETIPFSETRDYVKKVMTNAAYYAALFGAPHIPLKQRMGTVPAR

SEQ ID NO: 35420 - protein, 226 aa, Neisseria meningitidis
VQADLAYAAERITHDYPKPTGTDKDKISTVSDYFRNIRAHSIHPRVSVGYDFGDWRIAADYASYRKWKESNFSTKKVTEEINDNYQETKTEHQGNGSFHASSSLGLSAIYDFKLNDKFKPYIGARVAYGHVKHQVHSVETKTTTVTSKPKNGSPQGGAVPSREPSKPPYHESNSISSLGLGVIAGVGFDITPKLTLDTGYRYHNWGRLENTRFKTHEVSLGMRYRF

SEQ ID NO: 35421 - protein, 148 aa, Neisseria meningitidis; identical to SEQ ID NO: 24250

SEQ ID NO: 35422 - protein, 423 aa, Neisseria meningitidis
MFQWLYDALWLLAPIWIRRYLDKRSGSAPAYRAHRDERFGKPYPNPVTGAVWIHAVSVGETRAAQPLIRELRQRFPDAPLLMTQMTPTGRETAQVLFPDAQCRYLPYDKKTWVRQFLREHRPMFGILMETEIWPNLMKECRRAGVPLFLANARLSEKSLNGYLKVRRLIRPAAASLTGCLAQTEADAARLAKLGAASVQVCGNTKYDLMPSEQMKTLAGQFEKRIGGRPVAVCGSTRVYRGEDEAEKLLAAWQQYRGDALLVVVPRHPEHFQTVFETAQRFGFKVQRRSDGLPVEPDTQVWIGDSMGELYAYYLCADVAFVGGSLVDSGCQNIIEPLSCGVPTIFGFSTYNFSEACRHALASGAAVRVESADAWREAVEKTLSSEGGGMQMQARVDGFIAQHRGAGARIAEAVREAVCGHRGR

SEQ ID NO: 35423 - protein, 62 aa, Neisseria meningitidis; identical to SEQ ID NO: 22938

SEQ ID NO: 35424 - protein, 310 aa, Neisseria meningitidis; identical to SEQ ID NO: 18494

SEQ ID NO: 35425 - protein, 43 aa, Neisseria meningitidis; identical to SEQ ID NO: 3165

SEQ ID NO: 35426 - protein, 321 aa, Neisseria meningitidis; identical to SEQ ID NO: 34489

SEQ ID NO: 35427 - protein, 109 aa, Neisseria meningitidis; identical to SEQ ID NO: 10359

SEQ ID NO: 35428 - protein, 188 aa, Neisseria meningitidis; identical to SEQ ID NO: 19683

SEQ ID NO: 35429 - protein, 391 aa, Neisseria meningitidis; identical to SEQ ID NO: 2334

SEQ ID NO: 35430 - protein, 628 aa, Neisseria meningitidis; identical to SEQ ID NO: 19779

SEQ ID NO: 35431 - protein, 65 aa, Neisseria meningitidis; identical to SEQ ID NO: 127

SEQ ID NO: 35432 - protein, 172 aa, Neisseria meningitidis
  misc_feature 167, 168: 'Xaa' is any amino acid
MTQANRVIIFDTTLRDGEQSPGAAMTKEEKIRVARQLEKLGVDIIEAGFAAASPGDFEAVNAIAKTITKSTVCSLSRAIERDIRQAGEAVAPAPKKRIHTFIATSPIHMEYKLKMKPKQVIEAAVKAVKIAREYTDDVEFSCEDALRSEIDFLAEICGAVIEAGATXXHTLN

SEQ ID NO: 35433 - protein, 76 aa, Neisseria meningitidis; identical to SEQ ID NO: 374

SEQ ID NO: 35434 - protein, 334 aa, Neisseria meningitidis
MTIIVTGAAGFIGSNIVKALNQRGITDIVAVDNLSKGEKFKNLAECEIAHYLDKHEFIRQVREHILPYQNIEAVFHQGACSDTMNHDGLYMMDNNYQYTLDLLDWCQDERIPFLYASSAAVYGKGEIFREERELEKPLNVYGYSKFLFDQVLRRRMKEGLTAQVVGFRYFNVYGQHEQHKGRMASVTFHHFHQYREHGYVNLFGSNDGYGNGEQTRDFVSVEDVAKVNLYFFDHPELSGIYNLGTGRSQQFNELAAATVNACRAAEGKPEMSLKELVEEELIRYIPFPDALKGKYQSFTQADITKLREAGYTEEFFDVKSGVERYVKWMLENLA

SEQ ID NO: 35435 - protein, 262 aa, Neisseria meningitidis; identical to SEQ ID NO: 19290

SEQ ID NO: 35436 - protein, 139 aa, Neisseria meningitidis; identical to SEQ ID NO: 18668

SEQ ID NO: 35437 - protein, 426 aa, Neisseria meningitidis; identical to SEQ ID NO: 18293

SEQ ID NO: 35438 - protein, 102 aa, Neisseria meningitidis; identical to SEQ ID NO: 18998

SEQ ID NO: 35439 - protein, 358 aa, Neisseria meningitidis; identical to SEQ ID NO: 96

SEQ ID NO: 35440 - protein, 332 aa, Neisseria meningitidis; identical to SEQ ID NO: 6359

SEQ ID NO: 35441 - protein, 238 aa, Neisseria meningitidis; identical to SEQ ID NO: 3469

SEQ ID NO: 35442 - protein, 205 aa, Neisseria meningitidis
MTFPPLKSPLKFYAVVPTADWVGRMVKAGADTVQLRCKALHGDELKREIARCAAACQGSRTQLFINDHWREAIEAGAYGVHLGQEDMDTADLAAIAAAGLRLGLSTHSVAELDRALSVHPSYIASGAIFPTTTKQMPTAPQGLDKLREYVKQAGGTPVVAIGGIDLNNAEEVLATGVSSLAVVRAVTEAANPEAVVKAFQALWDG

SEQ ID NO: 35443 - protein, 351 aa, Neisseria meningitidis; identical to SEQ ID NO: 18833

SEQ ID NO: 35444 - protein, 532 aa, Neisseria meningitidis; identical to SEQ ID NO: 19451

SEQ ID NO: 35445 - protein, 239 aa, Neisseria meningitidis; identical to SEQ ID NO: 3265

SEQ ID NO: 35446 - protein, 383 aa, Neisseria meningitidis
MSSRDQLFKAPPFENHSPLTWYQAASQLPNFIRDDAQTAAIEHLDRLWTELMMFKRKRNRFLGRSLRSPQVPKGLYFYGGVGRGKSFLMDAFFGCLPYRRKRRVHFHAFMAEIHQRLKTLKSESNPLKSVAAEIAKETRVLCFDEFHVSDIADAMILGRLLENLLNEGVVLVATSNYAPSELYPQGQNRSSFLPTIALIESSLTVLNVDGGEDYRLRTLRPAEIFFTPANEENEAKLAKLFKEMTGITDLNPGISTIHGREIPHKAESGRAIWFDFRALCFGPRSQSDYLYLAEHYEMVFISGLEQLSPQEKAEARRLTWLIDVLYDFRVKLCATGAVDVNHIYTEGDFAEEFTRTASRMVEMQSEVYLEQPHLTLSPKASGG

SEQ ID NO: 35447 - protein, 424 aa, Neisseria meningitidis
MPSETSSPRKENETEVHIPAAPFIVKQSGSNALAVCALVLAALGLGTSGFLFVQGQNVLKNQELAFNQKIDKAALGESENAALLKDNLNRQSAIQSELDRLDSGVKANGEQILMTQKAYRELTKGRADWLVDETETILNLAAQQLVLTGNIQTAVGVLEHIDSRLSRFNQAELLPIKQAVSSDLAELKNRPYVDISGTALRLDRLETAVSGLPLILDGVLKPGVQARNEAVSASWWQNVWEKSLGTLKGLVEIRRLENNDAMLLSPEQAYFVRENLRLRLLDARIALMQRNGEVYQGDLNNAEAAVRQYFDAKSPATQSWLKELAELKALDVRMTADDGLKNSLNAVRAYRDGTRMTAAENQEAEQAASEPANENTASEPAAASDVKTIEAPSLPSERKPEQPAKKQSVPEKAGRSPSAKGERA

SEQ ID NO: 35448 - protein, 64 aa, Neisseria meningitidis; identical to SEQ ID NO: 2003

SEQ ID NO: 35449 - protein, 69 aa, Neisseria meningitidis; identical to SEQ ID NO: 19611

SEQ ID NO: 35450 - protein, 350 aa, Neisseria meningitidis
MTVSPVALRRKTECKPHPTARYWKKCDVEALFGLPFLDLIYQAAEIHRQNFNPREIQLSTLLSIKTGGCPEDCAYCPQSAHHNTNLGKEQMMDVDEIVEKAKIAKSRGASRFCMGAAWRGPKPKDVETVSAIIKAVKGLGMETCGTFGMLEEGMAEDLKEAGLDYYNHNLDTDPDRYNDIIHTRRHEDRMDTLGKVRNAGLKVCCGGIVGMNETRAERAGLIASLANLDPQPESVPINRLVKVEGTPLADAEDLDWTEFVRTIAVARITMPQSYVRLSAGRSNMPEAMQAMCFMAGANSIFYGDKLLTTGNPDEDGDRILMEKLNLYPLQFELEGEVAEVEKASGIKVDY

SEQ ID NO: 35451 - protein, 131 aa, Neisseria meningitidis
VKLLANNWQPIAIIALVGTGLAVSHHQGYKSAFAKQQAVIDKMEKDKAQALLLSAQNYARELEQARAEAKKYEVKAHSVGMALAKKQAEVSRLKTERDLCKIPFPPDSRNPNTGFQLFSPQIPPNFTQIPP

SEQ ID NO: 35452 - protein, 162 aa, Neisseria meningitidis; identical to SEQ ID NO: 7842

SEQ ID NO: 35453 - protein, 285 aa, Neisseria meningitidis; identical to SEQ ID NO: 18795

SEQ ID NO: 35454 - protein, 508 aa, Neisseria meningitidis
MNTPLPYSNYLIRILTASVYDVAVETPLEPARSLSVRLKNNILLKREDLQPVFSFKIRGAYNKMSKLPKDALACGVIAASAGNHAQGVALSAQRLGCRAVIVMPETTPKIKVDAVKSRGGEVVLRGVSYNDAYDYAMELAEQEGLTYIAPFDDPDVIAGQGTVGMEIVSQHPDPIRAVFVPIGGGGLAAGVAAFIKQVRPEIKVIGVQTNDSCCMKQSVEAGEIVHLKDVGLFSDGTAVKVVGNETFRLCKELLDEIITVDTDAVCGAVKDIFDDTRSITEPAGALALAGLKAYIAREGAENQTLIAVTSGANMNFHRLRHVSERSELGEGNEGIFAVTIPEERGSFLKFVNILGNRNITEFNYRYGDDEKAHIFVGLQAAGPQDLAVIGSRLDEAGLPNVDLTDDEIAKIHIRYMVGGRTDKVENERLVSFEFPERPGALARFLNHMQGGWNITLFHYRNHGADYGRILVGIDVPPHDAAAFDGFLESLGYSYHEETQNAAYKLFLA

SEQ ID NO: 35455 - protein, 146 aa, Neisseria meningitidis
MNFWHMQMHPTDEMEFSENIDWILEHKKIIGLGQWEGGKGQIAAFINEMQVNDIVALKRGQELIALVQITGGAYKVTDDANLETAWIVNRRPVRVLDWAIEPKILKQARGTLNRCVRDDVETTQTIKQWYEAVVKSFTKRRVDLTV

SEQ ID NO: 35456 - protein, 157 aa, Neisseria meningitidis; identical to SEQ ID NO: 18255

SEQ ID NO: 35457 - protein, 277 aa, Neisseria meningitidis; identical to SEQ ID NO: 18591

SEQ ID NO: 35458 - protein, 140 aa, Neisseria meningitidis
MSIMQVEVVSSEQNIYSGEASFVVVPTVQGELGIYPRHEPIMSLVRPGALRLTVPGEDKEVLVAVSGGVLEVQPDKVTILADVAVRSAEMDQARAEEAKKAAEAGISQAKDDKALAEAHKALAAAIAQLKTLDYIRSHKK

SEQ ID NO: 35459 - protein, 398 aa, Neisseria meningitidis; identical to SEQ ID NO: 25631

SEQ ID NO: 35460 - protein, 275 aa, Neisseria meningitidis
MQNHVISLASAAERRAHIAATFGARGIPFQFFDALMPSERLEQAMVELVPGLSAHPYLSGVEKACFMSHAVLWKQALDEGLPYIAVFEDDVLLGEGAEKFLAEDAWLKERFDPDSAFIVRLETMFMHVLTSPSGVADYCGRAFPLLESEHWGTAGYIISKKAIRFFLQHFVMLQPEQIKPIDLMMFSDFFDKEGMPVYQVSPALCAQELHYAKFHDQNSALGSLIEHDRLLNRKQQRRDSPANTFKRRLIRALTKISREREKRRQRREQFIVPFQ

SEQ ID NO: 35461 - protein, 315 aa, Neisseria meningitidis; identical to SEQ ID NO: 18491

SEQ ID NO: 35462 - protein, 1067 aa, Neisseria meningitidis
MAKFFIDRPIFAWVISIFIIAAGIFGIKSLPVSQYPSVAAPTITLHATYPGASAQVMEDSVLSVIERNMNGVEGLDYMSTSADSSGSGSVSLTFTPDTDENLAQVEVQNKLSEVLSTLPATVQQYGVTVSKARSNFLMIVMLSSDVQSTEEMNDYAQRNIVPELQRIEGVGQVRLFGAQRAMRIWVDPKKLQNYNLSFADIGSALSAQNVQISAGSIGSLPAVRGQTVTATVTAQGQLGTAEEFGNVILRANTDGSNVYLKDVARVGLGMEDYSSSTRLNGVNTTGMAVMLSNSGNAMATAKAVKERMATLEKYFPQGMSWKTPYDTSKFVEISIEKVIHTLIEAMVLVFVVMYLFLQNIRYTLIPTIVVPISLLGGFAFISYMGMSINVLTMFAMVLVIGIVVDDAIVVVENVERIMAGEGLPPKEATKKAMGQISGAVIGITAVLISVFVPLAMFSGATGNIYKQFALTMASSIAFSAFLALTLTPALCATMLKTIPKGHHEEKKGFFGWFNKKFNSWTHGYEGRVAKVLRKTFRMMVVYIGLAVVGVFLFMRLPTSFLPTEDQGFVMVSVQLPAGATQERTNATLAQVTQLAKSIPEIENIITVSGFSFSGSGQNMAMGFAILKDWNERTAPGSDAVAIAGKLTGMMMGTLKDGFGIAVVPPPILELGNGSGLSINLQDRNNTGHTALLAKRNELIQKMRASGLFDPSTVRAGGLEDSPQLKIDINRAAAAAQGISFADIRTALASALSSSYVSDFPNQGRLQRVMVQADEDARMQPADILNLTVPNKSGVAVPLSTIATVSWENGTEQSVRFNGYPSMKLSASPATGVSTGQAMAAVQKMVDELGGGYSLEWGGQSREEAKGGSQTLILYGLAVAAVFLVLAALYESWSIPLAVILVIPLGLIGAAAGVTGRNLFEGLLGSVPSFANDIYFQVGFVTVMGLSAKNAILIIEFAKDLQAQGKSAVEAALEAARLRFRPIIMTSFAFILGVVPLYIAGGASSASQRAIGTTVFWGMLIGTLLSVFLVPLFYVVVRKFFKETAHEHEMAVKHAAEAGITGSDDSQH

SEQ ID NO: 35463 - protein, 157 aa, Neisseria meningitidis; identical to SEQ ID NO: 8805

SEQ ID NO: 35464 - protein, 296 aa, Neisseria meningitidis; identical to SEQ ID NO: 19379

SEQ ID NO: 35465 - protein, 71 aa, Neisseria meningitidis
  misc_feature 67, 68, 69: 'Xaa' is any amino acid
MEQQQRYISVLDIGTSKVLALIGEVQDDDKINIVGLGQAPSRGLRAGMVTNIDATVQAIRQAVNDAXXXHT

SEQ ID NO: 35466 - protein, 685 aa, Neisseria meningitidis; identical to SEQ ID NO: 19874

SEQ ID NO: 35467 - protein, 447 aa, Neisseria meningitidis; identical to SEQ ID NO: 18079

SEQ ID NO: 35468 - protein, 119 aa, Neisseria meningitidis; identical to SEQ ID NO: 6447

SEQ ID NO: 35469 - protein, 514 aa, Neisseria meningitidis
MCGVLGLVSHEPVNQFLYDGLQMLQHRGQDAAGIATAEGGTFHMHKGKGMVREVFRTRNMRDLTGNAGIAHVRYPTAGNAGSSAEAQPFYVSSPFGIVLAHNGNLTNTAELYENVCNKHLRHVNTSSDSEVLLNVFAHELRREVSKNADPHRLNADNIFNAVAQVHRLVRGAYGVIAMIAGYGMLAFRDPYGIRPLVLGSQTDNEGRKSYAVASESVAFNALAYDLERDIRPGEAVFVGFDGTMIARQCSDRAKLSPCLFEYVYFARPDSVIDGVSVYQSRLDMGVSLAEKIKRELPVDDIDVVMPIPDTSRPSAMELAVHLDKPYREGLIKNRYIGRTFIMPGQATRKKSVRQKLSPMETEFAGKSVLLVDDSIVRGTTSREIVEMVRAAGARKVYIASAAPEVRYPNVYGIDMPTREELIANGRSAAEIAAEIGADGIVFQDLGDLEAVVKALNPKIESFDSSCFNGIYQTGDIDDAYLDRLSAEKSGCGGLKIHPSRMEHSISISDAGDEE

SEQ ID NO: 35470 - protein, 513 aa, Neisseria meningitidis
MKFLDREASIAKPGFNRWLVPPAALAVHLAIGQIYAYSVFNAPLTKLIGITESAAGDWKLTTVGWIFSIALAMLGASAALFGTWMERVGPRKAIFAAACCFSLGFFVSAFGVSTHNLFLLYLGNGVIGGVGLGLGYIGPVSTLMKWFPDKPGMATGLAIMGFGGGAMLASPLSVSLMNAFSNAASVGVVETFAVLGLLYLALMMFGAFTIRVPADGWKPEGYTAPKTQNKLVSSNHVNVSQAMKTPQFWLLFWVLCLNVTAGIGVLGQASVMIQELFSETSVGRQASVGAGAAAGFVSLLSLFNMGGRFLWSSVSDKIGRKNTYTIFFVLGSLLYFAVPSIGEGGSKALFIIGFCVIISMYGGGFAAIPAYLKDLFGTYQVGAIHGRILLAWSTAAVIGPVLVNYIRQSQIDSGIPAAQAYSVTMYIMACLLIIGLLCNLAVKSVHEKHHEKDIKTAAHSGNPDDETAISDAYLVGEKVSGGGISVWWRWALAVIPLAYGVVMVFVKALDLFS

SEQ ID NO: 35471 - protein, 394 aa, Neisseria meningitidis; identical to SEQ ID NO: 6041

SEQ ID NO: 35472 - protein, 399 aa, Neisseria meningitidis; identical to SEQ ID NO: 18454

SEQ ID NO: 35473 - protein, 287 aa, Neisseria meningitidis; identical to SEQ ID NO: 2812

SEQ ID NO: 35474 - protein, 512 aa, Neisseria meningitidis
MWKILQACVEADVIVITQAANTGLTSGSTPDGNDYDRDIVIVNTMRMNIIQTINNNEQVVCLPGSTLNQLELLLKPLGREPHSVIGSSCIGASVLGGVCNNSGGALVQRGPAYTEMALFAQINEEGRLELVNHLGIDLGDTPEEILTNLQGHHYQNKDIKQDAGKGHDHAYCEHVRQVDEPTAARFNADPARHYEASGCAGKLMVFAVRLDTFPQEKQTAVFYIGTNDINELTDIRRAALGEFESLPVSGEYIHRHAFDIADVYGKDTFYVIKKFGTHQLPKLFDLKARVDRFGKKASFLPKHFSDKAMQFVSKYLPDHLPKSMRDYRDKYEHHLILKMGGKGVDEARAFLKEYFAHHSGAFFECNAEETQAAMLHRFAVASAAIRYRAVHDDEVEDLVALDIALRRDDRDWFEKLPPEIDNKIIHKLYYGHFMCHVFHQDYIIKKGNDCMALEHEMLHLLDQRGAQYPAEHNVGHLYEAKPALKQFYRKLDPTNSFNPGVGKTSKKKNWAE

SEQ ID NO: 35475 - protein, 621 aa, Neisseria meningitidis; identical to SEQ ID NO: 18904

SEQ ID NO: 35476 - protein, 177 aa, Neisseria meningitidis; identical to SEQ ID NO: 3350

SEQ ID NO: 35477 - protein, 193 aa, Neisseria meningitidis; identical to SEQ ID NO: 1600

SEQ ID NO: 35478 - protein, 896 aa, Neisseria meningitidis
MSDNRLDTARRHSLFLARQLDNGKLKPEIFLPMLDKVLTEADFQAFADWDAIRAEENEEELARQLRGLRRYVVSQIIVRDINRISDLNEVTRTITLFADFAVNTALDFAYAYYRDMYGTPIGRYTKSPQHLSVVAMGKAGGYELNVSSDIDLIFVYPESGDTDGRRERGNQEFFTKVGQKLIALLNDITADGQVFRVDMRLRPDGDSGALVLSETALEQYLITQGREWERYAWCKGRVVTPYPNGIKSLVRPFVFRKYLDYGAYEAMRKLHRQIRSEVGKKGMADNIKLGAGGIREVEFIAQIFQMIRGGQMRALQLKGTQETLEKLAESGIMPSENVETLLAAYRFLRDVEHRLQYWDDRQTQTLPASPEQRQRLAESMGFDDYADFLNALNQHRNQVNRLFNEILSEPGEQTQSNGEWQWVWQEKPDEEGRQCRLKEHGFDAEAVAARLDQIRHGHKYRRLSAHAQPRFDALMPLLVRAAAAQSNPTDTLMRLLDFLENISRRSAYLAFLNEHPQTLAQLAEIMGQSSWVAAYLNKYPILLDELISAQLLDTAFDWQALAAALSDDLKACGGDTEAQMDTLRRFQHAQVFRLAVQDLAGLWTVESLSDQLSALADTVIAAALSCAWADMSKKHRDTPQFAVVGYGKLGGKELGYASDLDLVYLYDDPHPDAGDVYSRLARRLTNWLSAATGAGSLYETDLRLRPNGDAGFLAHSIAAFEKYQRENAWTWEHQSLTRARFICGTPEIQTAFDRIRTEILTAERDQTALSGEIIEMREKMFPTHPPADSNVKYARGGVVDVEFIVQYLILAHARKYPQLLANYGNIALLNIAADCSLIDKNLAEQSRTAYRFYRRQQHNTKLRDAAKTEVTGELLAHYGNVRKLWREVFGEEAATA

SEQ ID NO: 35479 - protein, 500 aa, Neisseria meningitidis; identical to SEQ ID NO: 11856

SEQ ID NO: 35480 - protein, 79 aa, Neisseria meningitidis; identical to SEQ ID NO: 1083

SEQ ID NO: 35481 - protein, 351 aa, Neisseria meningitidis; identical to SEQ ID NO: 1414

SEQ ID NO: 35482 - protein, 356 aa, Neisseria meningitidis; identical to SEQ ID NO: 19837

SEQ ID NO: 35483 - protein, 915 aa, Neisseria meningitidis
MQQQHLFRLNILCLSLMTALPVYAENVQAGQAQEKQLDTIQVKAKKQKTRRDNEVTGLGKLVKTADTLSKEQVLDIRDLTRYDPGIAVVEQGRGASSGYSIRGMDKNRVSLTVDGLAQIQSYTAQAALGGTRTAGSSGAINEIEYENVKAVEISKGSNSVEQGSGALAGSVAFQTKTADDVIGEGRQWGIQSKTAYSGKNRGLTQSIALAGRIGGAEALLIHTGRRAGEIRAHEDAGRGVQSFNRLVPVEDDNQYAHFVVEEECESGSYEKCKSKPKKDVVGKDERQTVSTRDYTGPNRFLADPLSYESRSWLFRPGFRFENKRHYIGGILEHTQQTFDTRDMTVPAFLTKAVFDANKKQAGSLSGNGKYAGNHKYGGLFTNGENGALVGAEYGTGVFYDETHTKSRYGLEYVYTNADKDTWVDYARLSYDRQGIGLDNHFQQTHCSADGSDKNCRPSADKPFSYYKSDRVIYGESHRLLQAAFKKSFDTAKIRHNLSVNLGFDRFGSNLRHQDYYFQNAKRAYSLKTPPKNGNKNISPNGNKEKPYWVSIGGGNVVTGQICLFGNNTYTDCTPRSINGKSYYAAVRDNVRLGRWADVGAGLRYDYRSTHSDDGSVSTGTHRTLSWNAGIVLKPADWLDLTYRTSTGFRLPSFAEMYGWRAGVQSKAVKIDPEKSFNKEAGIVFKGDFGNLEASWFNNAYRDLIVRGYEAQITNGKEEAKGDPAYLNAQSARITGINVLGKIDWNGVWDKLPEGWYSTFAYNRVHVRDIKKRADRTDIQSHLFDAIQPSRYVVGLGYDQPEGKWGVNGMLTYSKAKEITELLGSRALLNGNSRNTKATARRTRPWYIVDVSGYYTIKKHFTLRAGVYNLLNYRYVTWENVRQTAGGAVNQHKNVGVYNRYAAPGRNYTFSLEMKF

SEQ ID NO: 35484 - protein, 322 aa, Neisseria meningitidis; identical to SEQ ID NO: 24740

SEQ ID NO: 35485 - protein, 217 aa, Neisseria meningitidis; identical to SEQ ID NO: 34637

SEQ ID NO: 35486 - protein, 288 aa, Neisseria meningitidis; identical to SEQ ID NO: 19920

SEQ ID NO: 35487 - protein, 99 aa, Neisseria meningitidis
VPSGKPPHPAHQATTNKKCRLNASDGIPGKLAHRTLPRSCTNKHGTADVPDHTVFKAFCKIKANPTAIRRSPKNILPNTPPFFSGQNPPPNPPTAKRSK

SEQ ID NO: 35488 - protein, 230 aa, Neisseria meningitidis
  misc_feature 224, 225: 'Xaa' is any amino acid
MNVLISNDDGYLSEGIAVLARVTAEFANVRVVAPERDRSGVSNSLTLERPLQLKQAQNGFYYVNGTPTDCIHIGQSVFSDFQADFVFSGINRGANMGDDTLYSGTVAAATEAYLMGIPAVAFSLNDASGRYWATAEQALWTLLAHFFKTPPQSPILWNINIPAVAPEDVRGIKIARLGRRHHGQNVIPARNPRGEQIYWIGPVGEVSDREEGTDFGECGAGFIXXTHLIN

SEQ ID NO: 35489 - protein, 133 aa, Neisseria meningitidis; identical to SEQ ID NO: 2967

SEQ ID NO: 35490 - protein, 426 aa, Neisseria meningitidis
LKDCFPQGLNGKKTAVALSGGLDSVVLLHLLVRAGKKGGFIPDALHIHHGLSPRADDWADFCQNYCDMLGVGLETVKICVEKNGLGIEAAARQKRYAAFAEKGFDVLALAHHRDDQIETFMLAVARGGGLRALAAMPAVRPFGEKGIIWRPLLPFSRQDIWDYAQKHGLPNIEDESNSDTAYLRNRFRHRILPELSAQIPHFGRHLLNNVRALQEDLALLDEVVVQDCRWVCGAGYFDTARWLTFSPRRKTHILRHFLKENGIPVPNQNALADIARVLTEAKTGRWNVQGFELHHYAGRLFVFRPEKTDKLRFLKDRQISGNLREILAGQGFVLKRHPFGLPGHLLEQDGILRTVAASDRLAVGGIHKDVKKILQEKRVLPALRPFWPVVADKDNRPLALANYGTDFQISVSDGILPVHPDFPVLF

SEQ ID NO: 35491 - protein, 109 aa, Neisseria meningitidis
MSLPPCPQCASEYTYEDDGQYICPECAHEWNETEAAADLAVEVHDANGSVLQNGDTVILIKDLKVKGSSMTVKQGTKVKGIRLQEGDHNIACKIDGSAMNLKSEFVKKA

SEQ ID NO: 35492 - protein, 718 aa, Neisseria meningitidis; identical to SEQ ID NO: 18271

SEQ ID NO: 35493 - protein, 528 aa, Neisseria meningitidis; identical to SEQ ID NO: 4033

SEQ ID NO: 35494 - protein, 261 aa, Neisseria meningitidis; identical to SEQ ID NO: 8388

SEQ ID NO: 35495 - protein, 429 aa, Neisseria meningitidis; identical to SEQ ID NO: 26325

SEQ ID NO: 35496 - protein, 111 aa, Neisseria meningitidis; identical to SEQ ID NO: 233

SEQ ID NO: 35497 - protein, 2799 aa, Neisseria meningitidis
MNRTLYKVVFNKHRNCMIVVAENAKREGKNTADTQAVGILPNDIAGFAGFIHSISVISFSLSLLLGSALILTSSSANAQGIVADKSAPAQQQPTILQTGNGIPQVNIQTPTSAGVSVNQYAQFDVGNRGAILNNSRSNTQTQLGGWIQGNPWLARGEARVVVNQINSSHSSQLNGYIEVGGRRAEVVIANPAGIAVNGGGFINASRATLTTGQPQYQAGDLSGFKIRQGNVVIAGHGLDARDTDFTQILSHAVKIDGPVWGKDVRVSAGKNDVSADGSIRSSHSPATNINSDNSLYAIDTGALGGMYAGKITLISTDRDASVRNQGQWFASAGNVAVNAEGKLVNTGMIAATGENHAVSLHARNVHNSGTVASQDDANIHSQTLDNSGTVLSSGQLTVRNLGRLKNHNNGTIQAARLDMSTGGLDNTGNITQTGSQALDLVSAGKFDNSGKIGVSDVPQTGLNPNPSVIPQIPSTATGSGSSTVLASKPGSNNPVSPTAPAKNYAGGRIQTTGAFDNAGSINAGGQIDIAAQNGLENSGSLNAAKLRVSGDSFNNTVKGKLQAHDLAVNTQTAKNSGHLLTLTGKIDNRELHNAGEIAANNLTLIHSGRLSNDKKGNIRAAHLQLDTAGLHNAGNILADSGTVTTKNNLRNTGKVSVARLNTEGQTLDNTHGHIEAETVNIQSQQLTNQSGHITATEQLTINSRNVDNQNGKLLSANQAQLAVSDGLYNQHGEIATNRQLSIHDKNQNTLALNNADGTIQSAGNVSLQAKSLANNGTLTAGNKLDIALTDDFVVERDLTAGKQLNLSIKGRLKNTHTLQASHTLKLNAGNIDNQVTGKIIGGEQTDITSEQHVDNRGLINSDGLTHIGAGQTLTNTGTGKIYGNHIALDAQILLNREETTEGSTKAGAIAARKRLDIGAKEIHNQEGALLSSEGIFAVGNRLDEQHHAAGMADTFVNGSAGLEVQGDALMSVRNMQNINNHFKTETYLAKAEKQVRDYTVLGQNTYYQAGKDGLFDNSQGQKDQTTATFHLKNGSRIEANQWHVRDYHIETYKERIIENRPAHITVGGDLTASGQNWLNKDSRIVVGGRIITDDLNQKEITNQSTTGKGRTDAVGTQWDSVTKKGWYSGRKRQRRTERNHTPYHDTQLFTHDFDTPVSVIQQNAASPSFQPAASAIKLIDGVSTAAVNGQRIHTGNVVSLNNATVTLPNSSLYTTHPDNKGWLVETDPQFADYRRWLGSDYMLQQLQLDTNHLHKRLGDGYYEQKLVNEQIHQLTGYRRLDGYRSDEEQFKALMDNGLTAAKTFGLTPGIALSAEQVARLTSDIVWMENQTVTLSDGSTQTVLVPKVYALARKGDLNTSGGLISAEQVLLKLQNGNLTNSGTIAGRQAVLIQARNINSNGNIQADQIGLKAEKSINIDGGQVQAGRLLTAQAQNINLNGTTQTSGNERNGNTAIDRMAGINVVGSHTEQVDNRTSDGILSLHAGNDINLNAATVSNQVKGGTTQITAGNNLNLGTIHTEHREAYGTLDDENHRHVRQSTEVGSSIRTQNGALLRAGNDLKIRQGELEAEEGKTVLAAGRDVTISEGRQITELDTSVSGKSKGILSSTKTQDRYRFSHDEAVGSNIGGGKMIVAAGQDINVRGSNLISDKGIVLKAGHDIDISTAHNRYTGNEYHESKKSGVMGTGGLGFTIGNRKTTDDTDRTNIVHTGSIIGSLNGDTVTVAGNRYRQTGSTVSSPEGRNTVTAKSIDVEFANNRYATDYAHTQEQKGLTVALNVPVVQAAQNFIQAAQNVGKSKNKRVNAMAAANAAWQSYQAAQQMQQFAPSSSAGQGQNNNQSPSISVSITYGEQKSRNEQKRHYTEAAASQIIGKGQTTLAATGSGEQSNINITGSDVIGHAGTALIADNHIRLQSAKQDGSEQSKNKSSGWNAGVAVKIGNGIRFGITAGGNIGKGKEQGGNTTHRHTHVGSTAGQTTIRSGGDTTLKGAQLIGKGIQADTRNLHIESVQDTETYQSKQQNGNVQVTVGYGFSASGSYRQSKVKADHASVTGQSGIYAGEDGYQIKVRDNTDLKGGIITSSQSAEDKGKNLFQTATLTHSDIQNHSRYEGKSFGIGGSFDLNGGWDGTVTDKQGRPTDRISLAAGYGSDGDSKNSTTRSGINTRNIHITDEAGQLARTGRTAKETEARIYTGIDTETADQHSGRLKNSFDKDAVAKEINLQREVTKEFGRNAAQAVAAVADKLGNTQSYERYQEARTLLEAELQNTDSEAEKAAIRASLGQVNAYLAENQSRYDTWKEGGIGRSILHGAAGGLTTGSLGGILAGSGTSLAAPYLDKAAENLGTAGKAAVNALGGAAIGYATGGSGGAVVGANVDWHNRQLHPSERDWIRKNAQAFAKQEVGGREPTIDEIALAEKRLAQQAAKETDLFWMLTLEKVTDLSAQKFLRQAKGTFTNENGTQQQFFTTQGKQFMRPELFANEVYDLSFYKNHLQSPKNSSISKGTGELARRVTSSTWDKAKQDPILTGLQIAASPVHLVRDVGKASWQCVSGFGQCLQQGKENFVETGSAIGTGTASFQLNDLKPIYGQDVRGAQAGLVALQTADGITTALGAAKALNVAGKGSRYFINEWASSPPSGSRAAQRGAVGNLTHSQQVLTDGSHIQRGGKLLPNIRYKAGEFDYLYETDTLGRIKSFETDNLQLTQRDRLKHNSKTPDKVKGQDHAGHLIGDRFGGSPNLDNLVSQHKDVNLSAYKVLENKWAEAIKSGKNVKIQMQIEYAAGTRHPTRFVGYYWIDGKPTRININNL

SEQ ID NO: 35498 - protein, 701 aa, Neisseria meningitidis; identical to SEQ ID NO: 25788

SEQ ID NO: 35499 - protein, 216 aa, Neisseria meningitidis; identical to SEQ ID NO: 10044

SEQ ID NO: 35500 - protein, 498 aa, Neisseria meningitidis; identical to SEQ ID NO: 2733

SEQ ID NO: 35501 - protein, 675 aa, Neisseria meningitidis; identical to SEQ ID NO: 14170

SEQ ID NO: 35502 - protein, 169 aa, Neisseria meningitidis; identical to SEQ ID NO: 18610

SEQ ID NO: 35503 - protein, 307 aa, Neisseria meningitidis
MLLTLSLRDFVIVENLNLDFQSGFTVLTGETGAGKSITLDAIGLLLGDKADYSQVRSGAKEAQLSALFDISHLPVLKAELYEQGLLNDGEEELSIRRIIDAKGKSRSFINNQAATLAQLKSVGSQLIDIHGQNAHHSLNQEAAQRELLDAFAGSREQAETVRQLYQNWANAKKALQEAQEHADAVIIERERLEWQFNELNQLDIKQGEWEALSQSHDSLAHSAELLQAAEEVGSKIDGDNGIQRHIYQCQKLLANLQNIEPRFAESLNMLASIEAELGEISANMRDVAGRSDINPNELAAQNSAWAN

SEQ ID NO: 35504 - protein, 556 aa, Neisseria meningitidis; identical to SEQ ID NO: 26694

SEQ ID NO: 35505 - protein, 261 aa, Neisseria meningitidis
MSRIRQAFAALDGGKALIPYITVGDPDIGATLAIMHSMVENGADILELGVPFSDPMADGPVIQRAAERALANGISLRDVLDVVRKFRETDTQTPVVLMGYLNPVHKMGYREFAQEAAMAGVDGVLTVDSPVETIDPLYRELKDNGVDCIFLIAPTTTEDRIKTIAELAGGFVYYVSLKGVTGAASLDTDEVSRKIEYLHQYIDIPIGVGFGISNAESARKIGRVADAVIVGSRIVKEIENNAGNEAAAVGALVKELKDAVR

SEQ ID NO: 35506 - protein, 179 aa, Neisseria meningitidis
MSQVFKDFDLSSVWESDSWADENYQEAPFTPEILAAVESELGYKLPQSFIELMAVQNGGIFVKNCFPTTQRNSWAENHVQICEVSGIGFEKEGSLCGETGQKLWLEEWEYPPIGVYFANDPSGGHAMFALDYRACGKDGEPKVVFVEQESDFEIVELAPDFETFIRSLRHEDEFIDEEI

SEQ ID NO: 35507 - protein, 757 aa, Neisseria meningitidis; identical to SEQ ID NO: 18595

SEQ ID NO: 35508 - protein, 595 aa, Neisseria meningitidis; identical to SEQ ID NO: 18209

SEQ ID NO: 35509 - protein, 240 aa, Neisseria meningitidis
VFPDKYKLSLKENIFLAKKVLVAQIHNLSRFENCQTTLLQTEQIIHGKNVASASLEDIQTILNLKRAYQYVISHISNGEPVDISLLKKINNIVAKDDSLAPGDFRTGSVGVTLLDGSRHAPNPVKEIEVARVLQNIGLQSGSTTEAAVRFMLYCMRQQVFWDGNKRTATLFANGLMMERGRGILEISEMQMPQFNEKLSAFYRSGDDTDISKFVYQNCISGIDYFGADEDIDFPDPPNMG

SEQ ID NO: 35510 - protein, 194 aa, Neisseria meningitidis; identical to SEQ ID NO: 666

SEQ ID NO: 35511 - protein, 351 aa, Neisseria meningitidis; identical to SEQ ID NO: 15425

SEQ ID NO: 35512 - protein, 470 aa, Neisseria meningitidis
LLFEFKENKMIVTSRWPLLEKAFLRFGMPVAVVDLESTGGNLYEDRVTEVALVKFEQGRVVRHEWLVNPQKPIPQFVAGLTGISDGMVADAPVFAEIAGELFSVLKGCVLVAHNSRFDYTFLKHEFHRAGIGFSSPALCSVQLSRCLYPQFYKHSLDSIIERLGIVVEDRHRAMADVSALCDYLEYSLSEHGVEAWIRQCFRLMNPKPLPAALPERLREQLYGLPDSMGVLACFDGGGKVNYIGTFERVYSEVSALLDSGKAPFDWCNTEEVRFFPALGSLHAYKIKAELVGRYHSGCYVSAKNLLKTFTTVRFEKGSDGMLNAKTAALKNGVTDNPPTGLFANKKAARRALSSWAETYGLCPASAGILPDGYAEDEPCPVYVSGRCDKACGRSDEQVLAFAHKLPILDWGKMHEVEITETDPLTGEKVVLHGMGGALEMGDGLWYFDKDLPDAFKAKFKTDRKNIKEIG

SEQ ID NO: 35513 - protein, 68 aa, Neisseria meningitidis; identical to SEQ ID NO: 1421

SEQ ID NO: 35514 - protein, 566 aa, Neisseria meningitidis; identical to SEQ ID NO: 18971

SEQ ID NO: 35515 - protein, 106 aa, Neisseria meningitidis
MITLTENAAKHINDYLAKRGKGLGVRLGVKTSGCSGIAYNLEFVDEADGDDLIFEGHGARIYIDPKSLVYLDGTQVDYTKEGLQEGFKFENPNVKDSCGCGESFHV

SEQ ID NO: 35516 - protein, 210 aa, Neisseria meningitidis; identical to SEQ ID NO: 22126

SEQ ID NO: 35517 - protein, 224 aa, Neisseria meningitidis
  misc_feature 218, 219: 'Xaa' is any amino acid
MKITHCKLKKKVQKELLRFFVLEVTARSAADILGIHPNSAALFYRKIRTVINHHLALAADEVFEGPVEPDESDFGGRRKGRRGRGAAGKVVVFGILKRNGRVYTVVVNNAKSETLLPVIKKKIMPDSIVYTDSLSSCDKLDVSGFIHYRINHSKECADRQNHINGIENFWNQAKRVLRKYNGIDRKSFPLFLKECEFRFNFGTPSQQLKILRDWCGIXXTHLIN

SEQ ID NO: 35518 - protein, 133 aa, Neisseria meningitidis
MPSEAFRRHRAYRENKLQPLVSVLICAYNAEKYFAQSLAAVVNQTWRNLDILIVDDGSTDGTLAIAKDFQKWDSRIKILAHDRLLNRKQQRRDSPANTFKHRLIRALTKISREREKRRQRREQLIGKIIVPFQ

SEQ ID NO: 35519 - protein, 1827 aa, Neisseria meningitidis; identical to SEQ ID NO: 18949

SEQ ID NO: 35520 - protein, 347 aa, Neisseria meningitidis
  misc_feature 343, 344, 345: 'Xaa' is any amino acid
MTLFCEQVPYPRLAEEFGTPLYVYSKSALTEAFENYQTAFATLNPLVCYAVKANGNLSIIKHFASLGSGFDIVSDGELARVLAAGGDAAKTIFSGVGKSEAEIEFALNAGVKCFNMESIPEIDRIQKVAARLGKVAPVSLRVNPDVDAKTHPYISTGLKANKFGIAYADALEAYRHASRQSHLKIVGIDCHIGSQLTDLSPLVEACERILVLVDQLADEGIVLEHLDLGGGVGIVYQDENVPDLGAYAQAVQKLIGTRRLKLILEPGRSLVGNAGSLLTRVEFVKYGEEKNFVMVDAAMNDLMRPALYDAYHHIEAVETKDIEPLTANIVGPICETGDFLGKXXXHT

SEQ ID NO: 35521 - protein, 617 aa, Neisseria meningitidis
MNRYPLWKYLLIVFTIAVAAVYSLPNLFGETPAVQVSTNRQAIIINEQTQSKVDAALQNAGIQTDGMFVVDNSLKVRFKDTETQLKARDVIENTLGEGYITALNLLADSPEWMAKIKANPMFLGLDLRGGVHFTMQVDMKAAMQKTFERYSGDIRRELRREKIRSGTVRQAGNSLTVPLQDAGDVQKALPQLRKLFPEATLNSDGSNIVLTLSEEAVNKVRSDAVKQNITTLHNRVNELGVAEPVIQQSGADRIVVQLPGVQDTAKAKDIIGRTATLELRMVEDDPAKLREALEGNVPSGYELLSSGGDRPEILLISKQVELTGDNINDAQPSFDQMGAPAVSLSLDSAGGSIFGELTAANVGKRMAMVLIDQGKSEVVTAPVIRTAITGGRVEISGSMTTAEANDTSLLLRAGSLAAPMQIVEERTIGPSLGKENIEKGFHSTLWGFAIVAAFMVVYYRLMGFFSTIALSANILFLIGILSAMQATLTLPGMAALALTLGMAIDSNVLINERIREELRAGVPPQQAINLGFQHAWATIVDSNLTSLIAGIALLVFGSGPVRGFAVVHCLGILTSMYSSVVVFRALVNLWYGRRRKLQNISIGSVWKPKAEIAGGKE

SEQ ID NO: 35522 - protein, 70 aa, Neisseria meningitidis; identical to SEQ ID NO: 5197

SEQ ID NO: 35523 - protein, 482 aa, Neisseria meningitidis
  misc_feature 2, 3: 'Xaa' is any amino acid
VXXCDKAGSFFGADKKEASFVERIEHTKDDGSVSMLLPDFVQLVQSEGPAVVNIQAAPAPRTQNGSGNAETDSDPLADSDPFYEFFKRLVPNMPEIPQEEADDGGLNFGSGFIISKDGYILTNTHVVTGMGSIKVLLNDKREYTAKLIGSDVQSDVALLKIDATEELPVVKIGNPKDLKPGEWVAAIGAPFGFDNSVTAGIVSAKGRSLPNESYTPFIQTDVAINPGNSGGPLFNLKGQVVGINSQIYSRSGGFMGISFAIPIDVAMNVAEQLKNTGKVQRGQLGVIIQEVSYGLAQSFGLDKAGGALIAKILPGSPAERAGLQAGDIVLSLDGGEIRSSGDLPVMVGAITPGKEVSLGVWRKGKEITVAVKLGNASEQTGSSSEPDKAPYAEHQSGTFSVESAGITLQTHTDSSGGRLVVVRVSGAAERAGLRRGDEILAVGQVPVNDEDGFRKAMDKAGKNVPLLVMRRGNTLFIALNLQ

SEQ ID NO: 35524 - protein, 366 aa, Neisseria meningitidis
MTRIAILGGGLSGRLTALQLAEQGYQIALFDKGCRRGEHAAAYVAAAMLAPAAEAVEATPEVIKLGRQSIPLWRNIRGHLKTPAMMQENGSLIVWHGQDKPLSSEFVRHLKRGGVADDEIVRWRADEIAEREPQLGGRFSDGIYLPTEGQLDGRQILSALADALDELNVPCHWEHECVPEGLQAQYDWLIDCRGYGAKTAWNQSPEHTSTLRGIRGEVARVYTPEITLNRPVRLLHPRYPLYIAPKENHVFVIGATQIESESQAPASVRSGLELLSALYAIHPAFGEADILEIATGLRPTLNHHNPEIRYNRARRLIEINGLFRHGFMISPAVTAAAVRLAVALFDGKDAPERDEESGLAYIRRQD

SEQ ID NO: 35525 - protein, 115 aa, Neisseria meningitidis
MRKSRLSRYKQNKLIELFVAGVTARTAAELVGVNKNTAAYYFHRLRLLIYQNSPHLEMFDGKVEADESYFGGQRKGKRGRGAAGKVAVFGLLKRNGKVYTVTVPNSNRYFISYYP

SEQ ID NO: 35526 - protein, 155 aa, Neisseria meningitidis
MTGFNDAAGVASSADIKGKYVEKVEVANGVITAEMKSSGVNKEIQGKKLSLWAKRQAGSVKWFCGQPVTRTANNTANDEVTAANGKTKKIDTKHLPSTCRDAASAICTRTPRADFKHFQKISRYRVLPESRHMAEKLRHSRAGGNLALSVRKLIG

SEQ ID NO: 35527 - protein, 335 aa, Neisseria meningitidis; identical to SEQ ID NO: 34561

SEQ ID NO: 35528 - protein, 246 aa, Neisseria meningitidis; identical to SEQ ID NO: 18931

SEQ ID NO: 35529 - protein, 269 aa, Neisseria meningitidis; identical to SEQ ID NO: 17359

SEQ ID NO: 35530 - protein, 453 aa, Neisseria meningitidis; identical to SEQ ID NO: 18644

SEQ ID NO: 35531 - protein, 279 aa, Neisseria meningitidis; identical to SEQ ID NO: 2627

SEQ ID NO: 35532 - protein, 205 aa, Neisseria meningitidis
  misc_feature 2, 3, 4: 'Xaa' is any amino acid
VXXXRYTALAHPSQEDFDGHSGFPEFSIDERRREISVETFGLDIGKPVLAFCPGAEFGPAKRWPTRHFAELGKHYLAAGWQVWLFGSQKDDEIAEEINRLSDGMCVNLCGKTDLSQAMDLLSLADTVVCNDSGLMHLAAALGRKVVAVYGSSSPTHTPPLSDRAKIVSLHLECSPCFKRECPLGHTDCLNRLYPEKIVQAVEEAV

SEQ ID NO: 35533 - protein, 418 aa, Neisseria meningitidis; identical to SEQ ID NO: 18114

SEQ ID NO: 35534 - protein, 287 aa, Neisseria meningitidis; identical to SEQ ID NO: 1804

SEQ ID NO: 35535 - protein, 95 aa, Neisseria meningitidis; identical to SEQ ID NO: 6947

SEQ ID NO: 35536 - protein, 335 aa, Neisseria meningitidis; identical to SEQ ID NO: 34561

SEQ ID NO: 35537 - protein, 228 aa, Neisseria meningitidis
MTVLQERYCEVSDRIGKLVLQAGRKPHSVSLIAVGKTFPSDGVREVYAAGQRDFGENYIQEWYGKTEELADLTDIVWHVIGDVQSNKTKFVAERAHWVHTVCRLKTAVRLSEQRPSSMPPLQVCIEVNIAGEAVKHGVAPEEAVALAVEVAKLPNIVVRGLMCVAKANSSETELKVQFQTMRKLLADLNAAGVKADVLSMGMSDDMPAAIECGATHVRIGSAIFGKRG

SEQ ID NO: 35538 - protein, 364 aa, Neisseria meningitidis; identical to SEQ ID NO: 6346

SEQ ID NO: 35539 - protein, 370 aa, Neisseria meningitidis
MTAKEELFAWLRHMNKNKDSDLFVTTHFPPAMKLDGKITRITDEPLTAEKCMEIAFSIMSAKQAEEFSSTNECNFAISLPDTSRFRVNAMIQRGATALVFRAITSKIPKFESLNLPPVLKDVALKKRGLVIFVGGTGSGKSTSLASLIDYRNENSFGHIITIEDPIEFVHEHKNCIITQREVGVDTENWMAALKNTLRQAPDVILIGEIRDRETMDYAIAFAETGHLCMATLHANSTNQALDRIINFFPEERREQLLTDLSLNLQAFISQRLVPRDGGKGRVAAVEVLLNSPLISELIHNGNIHEIKEVMKKSTTLGMQTFDQHLYQLYEKGDISLQEALKNADSAHDLRLAVQLRSRRAQSSSPDLELL

SEQ ID NO: 35540 - protein, 431 aa, Neisseria meningitidis
MAIYQSGVIFDQVDTANPDCWTLDEYVKRGGYTALRKILSENISQTDVIDEVKTSGLRGRGGAGFPTGLKWSFMPRSFPGEKYVVCNTDEGEPGTFKDRDIIMFNPHALIEGMIIAGYAMGAKAGYNYIHGEIFEGYQRFEAALEQARAAGFLGKNILGSDFEFELFAHHGYGAYICGEETALLESLEGKKGQPRFKPPFPASFGLYGKPTTINNTETFSSVPFIIRDGGQAFADKGIPNAGGTKLFCISGHVERPGNYEVPLGTPFAEVLKMAGGMRGGKKLKAVIPGGSSAPVLPADIMMQTNMDYDSISKVGSMLGSGAIIVMDEDVCMVKALERLSYFYYDESCGQCTPCREGTGWLYRIVHRIVEGKGKMEDLDLLDSVGNQMAGRTICALADAAVFPVRSFTKHFRDEFVHYIEHGGPMKPNKWC

SEQ ID NO: 35541 - protein, 60 aa, Neisseria meningitidis; identical to SEQ ID NO: 18484

SEQ ID NO: 35542 - protein, 280 aa, Neisseria meningitidis; identical to SEQ ID NO: 4431

SEQ ID NO: 35543 - protein, 421 aa, Neisseria meningitidis; identical to SEQ ID NO: 19186

SEQ ID NO: 35544 - protein, 240 aa, Neisseria meningitidis
VWQALLYALVVLLMWLVGAARRIADTRTFTRIYTEIAVPVVLEQRQRQVPHSAVTARVALSREFVSFFEEHLPIAATSVVSIFGACIMLLVLEFWVGVSAVGILALFLWLLPRFAAISENLYFRLKNSLECDNHFIRKGDRRQLDRHYGLVARLRVLISNREAFGYLCVGAAMGILFGFAFVMMTLKGYSSAGHVYSVGTYLWMFAMSLDDVPRLVEQYSNLKDIGQRIEWSERNIKAGT

SEQ ID NO: 35545 - protein, 113 aa, Neisseria meningitidis; identical to SEQ ID NO: 118

SEQ ID NO: 35546 - protein, 349 aa, Neisseria meningitidis; identical to SEQ ID NO: 328

SEQ ID NO: 35547 - protein, 639 aa, Neisseria meningitidis
  misc_feature 633, 634: 'Xaa' is any amino acid
MSQLANAIRFLSADAVQKANSGHPGAPMGMAEMAETLWTKFLNHNPANPKFYNRDRFVLSNGHASMLLYSLLHLTGYNLSIEDLKNFRQLHSKTPGHPEYGYTDGVETTTGPLGQGIANAVGMALAEKILAAEFNKDGLNIVDHYTYVFMGDGCLMEGVSHEACSLAGTLGLGKLIVLYDDNNISIDGKVDGWFTENIPQRFESYGWHVVPNVNGHDTAAIQAAIEAARAETGKPSIICCKTLIGKGSANKEGSHKTHGAPLGADEIEATRKHLGWTYPAFEIPQEIYDAWNAKEQGAKLEADWNELFAQYQAKYPAEAAEFVRRMDKKLPDNFDEYVQTALKEVCAKAETIATRKASQNSIEILAKELPELVGGSADLTPSNLTDWSNSVSVTRDKGGNYIHYGVREFGMGAIMNGLALHGGVKPFGATFLMFSEYERNALRMAALMKINPVFVFTHDSIGLGEDGPTHQPIEQTATLRLIPNMDVWRPCDTAESLVAWAEAVKAADHPSCLIFSRQNLKFQARSEQQLNDIKRGGYIISEAQGNAQAVIIATGSEVELALEAQKALAAQNIAVRVVSMPSTNVFDRQDAAYQATVLPEGLPRVAVEAGHADGWYKYVGLNGAVVGINRFGXXTHLIN

SEQ ID NO: 35548 - protein, 472 aa, Neisseria meningitidis
MNIHTLLSKQWTLPPFLPKRLLLSLLILLAPNAVFWVLALLTATARPIVNLDYLPAALLIALPWRFVKIAGVLAFWLAVLFDGLMMVIQLFPFMDLIGAINLVPFILTAPAPYQIMTGLLLLYMLAMPFVLQKAAAKTDFRHIAVCAAVVAAAGYFTGHLSYYDRGRMANIFGANNFYYAKSQAMLYTVSQNADFITAGLVDPVFLPLGNQQRAATHLNEPKSQKILFIVAESWGLPANPELQNATFAKLLAQKDRFSVWESGSFPFIGATVEGEMRELCAYGGLRGFALRRAPDEKFARCLPNRLKQEGYATFAMHGAGSSLYDRFSWYPRAGFQEIKTAENLIGKKTCAIFGGVCDSELFGEVSAFFKKHSKGLFYWMTLTSHADYPESDIFNHRLKCTEYGLPAETDLCRNFSLHTQFFDQLADLIQRPEMKGTEVIIVGDHPPPVGNLNETFRYLKQGHVAWLHFKIK

SEQ ID NO: 35549 - protein, 687 aa, Neisseria meningitidis
MMTQTLLIELLTEELPPKALNNLGNHFAAAVAEGLEKAQLVDGAAEFTAYASPRRLAVQVKNVKAVQADQKIVKKGPAVANAMKDGAPTKALEGFARGAGAKIEDLTIVHDGKQDVYAYEYVQTGKPLGELLEDIINQAVKKLPIPKVMRWGSSTFTFVRPVHGLIVLHGGDIVNVSVLGLQSSNQTLGPRFLSNGEITIENADSYAEQMRGQGKVVASFAERKAAIQTALEGQARRLNATVAADEALLDEVTALVEYPVVLEAGFEEHFLAVPQECLILTMQQNQKYFPLLDQNGKLMNRFLLVSNLQTADPSHIIQGNERVLRARLSDAEFFYKQDQKATLESRLPKLANVVYHNKIGSQAERIERLQSIAAHIAKALGADAAAAERAARLAKADLVTEMVGEFPELQGTMGKYYARLDGETEEIAEAIEQHYQPRFAGDNLPNGKVATAVALADKLETLVGIWGIGLIPTGDKDPYALRRAALGILRMLMQYGLDVNELIQTAFDSFPKGLLNEKTPSETADFMQARLAVLLQNDYPQDIVAAVLAKQPRRLDDVVAKLQAVAAFKQLPEAAALAAANKRVQNLLKKADAELGAVNESLLQQDEEKALFAAAQGLQPKIAAAVAEGNFQTALSELASVKPQVDAFFDGVMVMAEDAAVKQNRLNLLNRLAEQMNAVADIALLGE

SEQ ID NO: 35550 - protein, 102 aa, Neisseria meningitidis
  misc_feature 2, 3, 4: 'Xaa' is any amino acid
VXXXPAKLPDEQDLRAVLAYNMRLFRVNKGWSQEELARQCGLDRTYVSAVERKRWNIALSNIEKMAAALGVAAYQLLLPPQERLKLMTNSADTRQMPSESGI

SEQ ID NO: 35551 - protein, 719 aa, Neisseria meningitidis
MNNPLVNQAAMVLPVFLLSACLGGGGGSFDLDSVDTEAPRPAPKYQDVSSEKPQAQKDQGGYGFAMRFKRRNWHPQANPKEDEIKLSENDWEATGLPSDPKNLPERQKSVIEKVETDSDSNIYSSPYLTQSNHQNGSINGGANLPKNEVTNYKDFKYVYSGWFYKHAKRKINSSSQNKIAQQGDDGYIFYHGKEPSRQLPASGTVTYKGVWHFATDTKKGQKFREIIQPSKNQGDRYSGFSGDDGEEYSNKNEATLQNGQEGYGFTSNLEVDFDNKKLTGKLIRNDKVTNATTSDKHTTQYYSLEAQVTGNRFNGKATATDKPKENETKQHPFVSDSSSLSGGFFGPKGEELGFRFLSDDKKVAVVGSAKTKDKPANGNTAEASGGTDAAASGGTAGTPSESTKLTTVLDAVELKSGGKEVKNLDNFSNAAQLVVDGIMIPLLPKDSESGGNQADKSKNGETAFTRKFDHTPKSDEKDTQAGTPTNGAQTASNTAGDTNGKTKTYEVEVCCSNLNYLKYGMLTRKNSKSAMQAGGNSSQADAKTEQVEQSMFLQGERTDEKEIPKEQQDIVYRGSWYGHIANGTSWSGNASDKEGGNRAEFTVNFGDKKITGTLTAENRQAATFTIEGDIEGNGFSGTAKTAELGFDLDQSDNTRTPKAYITDAKVKGGFYGPKAEELGGWFAYPSDKQTKNAPDASGNGNSASSATVVFGAKRQQPVR

SEQ ID NO: 35552 - protein, 279 aa, Neisseria meningitidis
LQRSQVALVVTESTGGLEIPAAKAIRRAGIAVIIANPRQTHQFAQSQPLTKTDAKDAKMPAFFAQMTAQKEDSQTMPYQPPTEAEEVLEALVNRRNQPADMRTAEKNRLHQVHETQVGSVKQLIAHFDRLIDELDKQIDDHTHTHFDGKAQVAEQIKGIGSITTATLMAMLPELGRLSHKRIASLVGIAPHPRESGETKFKSRCFGGRSAVLKALYMATVAATRFEPLIRDFYQRLPSEGKPYKVAVTACMRKLLTISNARMRDYFAENDTAENGIRTA

SEQ ID NO: 35553 - protein, 344 aa, Neisseria meningitidis
MPNCFKFHTVIERHWQKPYPVLSFLLKPLSGLFAKIAAKRRTDFLSGKRQSEKLPVPVVVVGNIHAGGTGKTPIAAALVSGLQEKGVKVGIISRGYGRKSKAVHVLNAASRAEDAGDEPLLLFSKTGAPTAVGSSRAEAGRALLAAHPDIGLIVADDGLQHYALRRDVEIAVFPAADTGRTDLDLLPNGNLREPLSRLDSVDAVVVSGGKADALFRPSENMFHSRIEAGRIYRLNNPSEILDTGRLKNQTVVAVAGIAKPARFFDSLRNMGITVKRTVALPDHADISAADLPDADAVIITEKDAVKFSDGICTDNVWVLPVCAIIEPDLAAFVLERLEDVPKAV

SEQ ID NO: 35554 - protein, 69 aa, Neisseria meningitidis; identical to SEQ ID NO: 5143

SEQ ID NO: 35555 - protein, 642 aa, Neisseria meningitidis
MAKVIGIDLGTTNSCLAISENGQTKVIENAEGARTTPSVIAYLDGGEILVGAPAKRQAVTNAKNTIYAAKRLIGHKFEDKEVQRDIESMPFEIIKANNGDAWVKAQGKELSPPQISAEVLRKMKEAAEAYLGEKVTEAVITVPAYFNDSQRQATKDAGRIAGLEVKRIINEPTAAALAFGMDKGDNKDRKVAVYDLGGGTFDISIIEIANLDGDKQFEVLATNGDTFLGGEDFDQRLIDYIIDEFKKEQGIDLKQDVMALQRLKEAAEKAKIELSSGQQTEINLPYITMDATGPKHLAMKITRAKFESLVEDLIARSIEPCKIALKDAGLSTGDIDDVILVGGQSRMPKVQEAVKDFFGKEPRKDVNPDEAVAVGAAIQGEVLSGGRSDVLLLDVTPLSLGIETMGGVMTKLIQKNTTIPTKASQVFSTAEDNQSAVTIHVLQGERERASANKSLGQFNLGDIAPAPRGMPQIEVTFDIDANGILHVSAKDKGTGKAANITIQGSSGLSEEEIERMVKDAEANAEEDKKLTELVASRNQAEALIHSVKKSLADYGDKLDAAEKEKIEAALKEAEEAVKGDDKTAIDAKAEALGTASQKLGEMVYAQAQAEAQAGESEQANASAKKDDDVVDADFEEVKDDKK

SEQ ID NO: 35556 - protein, 666 aa, Neisseria meningitidis
MLPTQPNPTQPNPTQPNPTQPNPTQPNPTQPNPSPDLSDTAGANTEAIYTSDGITANSTQLEQLKKLFPACFDADGNFLIDRLQAEIAPQTDIGREFYEMNWLGKSYARLLRNLPPETLISEDKTHNAKPENAGSQNLLIRGDNLEVLKHLKNAYTNSVKMIYIDPPYNTGSDGFVYQDDRKFTPAELACLANIDEDEAARILDFTDKGSNSHSAWLTFMYPRLYIARELLKDDGVIFISIDDNEAAQLKLLCDEVFGEGNFVANVIWQKKYSPQNDAKWFSNMHDYILCVAKNKDIWRPNLLERTEEQNARYSNPDNDERGNWKATDFSVKTYSENYDYPITTPSGRIVNPPPSRSWRTSKENFEKLLADNRVWFGINGNNVPSIKKFLTEVKQGITPSTILFRENVGDNQEAAKNIRDLFDIPPFETPKPVRLLNYLIKLSSNSDDIVMDFFAGSGTTAHAVMQLNAEEQNGSRRYICVQLPEKTGEKSEARKAGYPTIFDITKARIEKAAAKIRAEHPDYTGDLGFKIFQTADNFRQHPDKDFSPEQPDLPLNDELSEEQLQTLLTTWTLYDGAALTTPVEPVRLGSYTAYLCEKRLYLMNAGFTSADLLAFIRKLDDDAAFNPNRVIVFGSNMASAMQHELDQAVRGYTNKKEIELNVIIRV

SEQ ID NO: 35557 - protein, 729 aa, Neisseria meningitidis
MIYHRIAVNVPLSDGLLTYSHSDPLPPGTRVLVPFRNKTVVGMVWETDIAPDMDTARILSIQTTFLDEPPLPESWRDLLSFTSRYYHYPTGQAVFAALPQGLKETRAVEMPQPPLFYALNEAGRAQTPPLARFNKKAALWDALLSGGMTMAALKQVNAQAAKLIEDWAEQGWIETTEAAKPVLRSCNGQASHSEFVLNADQQKASDAIQTALGRFQPFLLYGITGSGKTEVYFDAMAKVLAQGRQVLFLLPEINLTPQLLKRVENRFADVPTAVLHSQMAAGKRTQDYLRAMLGQAKLVIGTRLAVFTPMDDVGLIVVDEEHDGSFKQDNELRYHARDLAVWRAKQGGCPVVLGSATPSLESWHKAQSGAYRLLQLTERAHTAAQLPQVDILNVGRLKLDNGFSPQALQLLKQNFEAGGMSLVYLNRRGFAPALFCGDCGHTFGCPNCSAKMVLHQRARQLRCHHCDHREPIPYKCPDCGNQDLTAVGHGTQRVEETLRAFLPKAAVVRVDRDSTAHKNDWADLYRRIADNEIDILVGTQMLAKGHDFARLNLVIVLNADGSLYSADFRAPERLFAELMQVSGRAGRADKPGKVLIQTQLPEHPVFAAVKAQDYAVFAENELNERQMFAMPPFGFQTAVRADAPRVADAMEFLNAAKETLAPLLPESVSQFGAAPMLMVRLAERERAQIFLESVSRQDLHRAVSLWVQVLQQNRDSKIRWSVDVDPQEA

SEQ ID NO: 35558 - protein, 156 aa, Neisseria meningitidis; identical to SEQ ID NO: 955

SEQ ID NO: 35559 - protein, 319 aa, Neisseria meningitidis
MSKKTKQELENNKLSKRLRHAVGDAINDFNMIEPGDKIMVCLSGGKDSYALLDILRQLQASAPIDFQLVAVNLDQKQPGFPEEVLPTYLESIGVPYKIVEEDTYSTVKRVLDEGKTTCSLCSRLRRGILYRTAKELGCTKIALGHHRDDILATMFLNMFYGGKLKAMPPKLVSDNGEHIVIRPLAYVKEKDLIKYAELKQFPIIPCNLCGSQPNLQRQVIGDMLRDWDKRFPGRIESMFSALQNVVPSHLADTELFDFVGLERGQSLKHGGDLAFDSEKMPERFSDGSEEDESEIKIEPQKAERKVINILANKPKTCGA

SEQ ID NO: 35560 - protein, 283 aa, Neisseria meningitidis
MARHVWQAGRFEIGLDKPKIMGIVNLTPDSFSDGGAYSQNAQTALAHAERLLKEGADILDIGGESTRPCADYVSPEEEWARVEPVLAEVAGWGVPVSLDTRRTVIMEKALALGGIDIINDVAALTDEGAVELLARQTDTGICLMHMRGLPENMQINPKYQDVVGEVARYLKARAAECIAAGIAPQRITLDPGFGFGKTLQHNIALMRHLPELMAETGFPLLIGVSRKRMVGELTGETDAAARVHGSVAAAVAAVARGAQIVRVHDVKATADALKVWEALGINL

SEQ ID NO: 35561 - protein, 171 aa, Neisseria meningitidis; identical to SEQ ID NO: 18791

SEQ ID NO: 35562 - protein, 469 aa, Neisseria meningitidis; identical to SEQ ID NO: 19069

SEQ ID NO: 35563 - protein, 347 aa, Neisseria meningitidis; identical to SEQ ID NO: 2159

SEQ ID NO: 35564 - protein, 193 aa, Neisseria meningitidis
MSARFQVAAEGRDKNAVNAEFVKKFNSFNRKLKNGSFKTELVSRSAMPRYQYTNGRRIQTGWEERAEFKVEGRDFDALNRFIADVQTDASLEYTDFSVSRERRNEVIDQVSKDAILRFKTRAEKLAGILGASGYKIVKLNLGHIGSHIAGGGAAQAKMLRAMPMAASVNMEGADSAAQGVEEISISVNGTVQF

SEQ ID NO: 35565 - protein, 169 aa, Neisseria meningitidis; identical to SEQ ID NO: 111

SEQ ID NO: 35566 - protein, 60 aa, Neisseria meningitidis; identical to SEQ ID NO: 2489

SEQ ID NO: 35567 - protein, 164 aa, Neisseria meningitidis; identical to SEQ ID NO: 18028

SEQ ID NO: 35568 - protein, 251 aa, Neisseria meningitidis; identical to SEQ ID NO: 25667

SEQ ID NO: 35569 - protein, 352 aa, Neisseria meningitidis; identical to SEQ ID NO: 19238

SEQ ID NO: 35570 - protein, 76 aa, Neisseria meningitidis; identical to SEQ ID NO: 34526

SEQ ID NO: 35571 - protein, 197 aa, Neisseria meningitidis; identical to SEQ ID NO: 6180

SEQ ID NO: 35572 - protein, 259 aa, Neisseria meningitidis; identical to SEQ ID NO: 588

SEQ ID NO: 35573 - protein, 349 aa, Neisseria meningitidis; identical to SEQ ID NO: 6547

SEQ ID NO: 35574 - protein, 216 aa, Neisseria meningitidis; identical to SEQ ID NO: 3431

SEQ ID NO: 35575 - protein, 307 aa, Neisseria meningitidis
MPSEHPFSDGISTPNPKETMNDTAQITASYGRRYIVRTPDGTTYEASTRKKRVDFACGDRVRISPVNAEQVVIEDFLPRQSLLYRQDAWKTKLIAANVTQLLIVTAAVPSPSMRLLQRALLAAEAAGIRAVIVLNKADLPETALWREKLKFYETLGYPVIETRALENAGSLRPALQGHSNILLGQSGMGKSTLTNALLGSQTARTGDISAALDSGKHTTTHARLYDLNGETQLIDSPGLQEFGLHHLQAADLPRYFPDFRHLVGQCRFHNCTHRAEPGCAFKAAAQTGAASPERLAFLQGITDELPG

SEQ ID NO: 35576 - protein, 289 aa, Neisseria meningitidis; identical to SEQ ID NO: 2681

SEQ ID NO: 35577 - protein, 485 aa, Neisseria meningitidis
MSRHPAPTGEKTFFGHPFQLSTLFHIELWERFSFYGMQGILLIYLYYTADKGGLGIDKTLAGGIVGAYSGSVYLSTILGAWFADRVWGAEKTLFLSGIVVMLGHIVLAAAPGLYGLLIGLIFIALGSGGVKSTASSMVGALYEQDEMRPLRDAGFSIFYIAINIGGFPGPLLTGLLQENIGFHYGFGAAAVGMAFGLWRYSLGRKNLPHPTVPHPLSKGQGKTAAAVGITLIAALATAIKTGLVNLDNFSGILLSTVILAVIAYFARLLTNPRVSSDNKRHIIAYIPLFLTICMFWAVWFQIYTVATVYFDETVNRTIGSFTVPVAWKDSMQSLWVILFSGLMAAMWTKMGRKQPKTPLKFAMAVFVTGASFLGFVPFISAGTPMPIAVFALIVLAITIGELMISPIALSISTKIAPPLFKTQMVALNFLAFSLGFTLGGVLFEKGYQAGDEIGFYRLLFYIGATTGFLLLLLVPKLNKMLEGTD

SEQ ID NO: 35578 - protein, 512 aa, Neisseria meningitidis
MFHSIEKYRTPAQVLLGLIALTFVGFGVSTVSHPGADYIVQVGDEKISDHSINNAMQNEQADGGSPSRDAVFQSLLQRAYLKQGAKLMGISVSSEQIKQIIVDDPNFHDANGKFDHALLNRYLSQRHMSEDQFVEEIRDQFALQNLVNLVQNGVLVGDAQAEQLIRLTQVNRTIRSHTFNPDEFIAQVKVSEADLQKFYNANKKDYLLPQAVKLEYVALNLKDFADKQTVSETEVKNAFEERVARLPTNEAKPSFEQEKAAVENELKMKKAVADFNKAKEKLGDDAFNHPSSLAEAAKNSGLKVETQETWLSRQDAQMSGMPENLINAVFSDDVLKKKHNSEVLTINSETAWVVRAKEVREEKTLPFAEAKDAVRQAYIRTEAAKLAENKAKDVLTQLNGGKAVDVKWSEVSVLGAQQARQSMPPEAYAELLKAKPANGKPAYVRLIGLPAPVIVEVQAVTPPDDIAAQLPLAKQALAQQQSANTFDLLIRYFNGKIKQTKGAQSVDNGDGQ

SEQ ID NO: 35579 - protein, 401 aa, Neisseria meningitidis; identical to SEQ ID NO: 2387

SEQ ID NO: 35580 - protein, 769 aa, Neisseria meningitidis
MLAPELEQILQQLYREARKAHYEFISLEHLLLVLIEEDASVHNVLKLCGADLKVVSEQLAASVAENTPLIPEHLLDTVETRPTLGFQRVMQRAMVHTQSAGKAAVEPLDVLVALMSETDSHTVYFLKLQSVTRFEVLRCIAHGSPDEDEDEDEDEDDGNYSSDGMDDDNGNRTKPGKNPLSAYTVNLNAEVKAGRIDPLIGRKHEMERLVQILCRRRKNNPLLVGEAGVGKTALAEGLAHQIVNGGIPDALKDAEVYALDMGSLLAGTKYRGDFEARVKSVLKQLEKIPHAILFIDEIHTIIGAGSTSGGTMDASNLLKPALAKGSLRCIGATTYDEYRTIFDKDHALSRRFQKIDVVEPTVSETVQILRGLKPMFEAFHQVRYTQGALEAAAELSARYINERFLPDKAIDVMDEAGAAQRILPKSKQKKVIGKAQIETVIAKVSRIPEKTVSHDDKQVLQFLGRDLKNMVYGQENAIDALVAAVKMSRSGLALPDKPIGSFLFSGPTGVGKTEAAKQLAYSLGVPLQRFDMSEYMERHAVSRLIGAPPGYVGFEQGGLLTEAVNKQPHCVLLLDEIEKAHPDIFNVLLQVMDAGKLTDNNGKSADFRNVILIMTTNAGAESLSRPSLGFTAKRERGDEMQAINKLFTPEFRNRLDAIIPFAPLSEPIIVKVVDKFLLQLEHQLLDKKVETEFTPALHKYLAEKGFDPQMGARPMHRLIQEKIRKPLADELLFGKLSDGGFVRIDWDAAKEEAVLKFKKSKVKIKTASA

SEQ ID NO: 35581 - protein, 122 aa, Neisseria meningitidis; identical to SEQ ID NO: 3130

SEQ ID NO: 35582 - protein, 127 aa, Neisseria meningitidis; identical to SEQ ID NO: 2622

SEQ ID NO: 35583 - protein, 421 aa, Neisseria meningitidis; identical to SEQ ID NO: 4874

SEQ ID NO: 35584 - protein, 273 aa, Neisseria meningitidis
MMRIFSTGGKMDTQAVITHIVRWLDEYAARANAKGFVVGVSGGIDSAVVSALAARTGRPTLLLDMPIRQHPDQLERARLHIRNLQRQYANVSAQTVDLTDTFQTFEQTVGIHQTAFDNQPLSLANARSRLRMLTLYYYGQIHGLLVTGTGNKIEDFGVGFFTKYGDGGVDISPIADLTKTQVYRLAEALGVDEAIQKAPPTDGLWDTERTDEEQMGASYPELEWAMGVYGTRKPEDFEGRQREVLEIYTRLHRAMQHKINPIPVCRIPPELLG

SEQ ID NO: 35585 - protein, 270 aa, Neisseria meningitidis; identical to SEQ ID NO: 9035

SEQ ID NO: 35586 - protein, 111 aa, Neisseria meningitidis; identical to SEQ ID NO: 7069

SEQ ID NO: 35587 - protein, 468 aa, Neisseria meningitidis; identical to SEQ ID NO: 15715

SEQ ID NO: 35588 - protein, 183 aa, Neisseria meningitidis; identical to SEQ ID NO: 4524

SEQ ID NO: 35589 - protein, 313 aa, Neisseria meningitidis
MKGFTIIEFLVAGMLSMIVLMAVGSSYFTSRKLNDAANERLAIQQDLRNAATLIVRDARMAGSFGCFNMSEHTEKDVVPDVAQKNRLFSLKGSSANKLIPITESLNIGYPGFTQRLNALIFQYGIDDVNASADTTVVSSCAKIAKPGKKISTLQEAKSALQITNDDKQNGNITRQRHVVNAYAVGRIDDEEGLFRFQLNDDGQWGNPQLLVKKINKMDIRYIYLLVESPGIQPTNSPRYIYGCPEDDDAGKEETFRYTDKFNSAQDAVTPAGVEVLLSSGTDTKIAASSDNHIYAYRIDATIRGGNICANRTL

SEQ ID NO: 35590 - protein, 151 aa, Neisseria meningitidis; identical to SEQ ID NO: 27560

SEQ ID NO: 35591 - protein, 425 aa, Neisseria meningitidis
MQQIKFIDLFSGMSGIRKGFEQACRKQSVACECVFTSEIKPAALEVLKQNYPDEVPYGDITKIETGDIPDFDILLAGFPCQAFSFAGKRLGFEDTRGTLFFDVARILKAKKPKGFILENVEGLVTHDRKDPTQKIGRTLTVILETLETLGYYVSWKVLNAKDFGIPQNRKRIYLTGSLKSKPDLSFETTLSPKLKNILESGLPTESSPFIKKLLKKFPPSELYGKSVKDKRGGKNNIHIRGWDIELHGTVTKEEKQLLNMLLKERRKKKWASEIGIDWMDGMPLTKAQISTFYKHPNLQNILDSLTDKGYLVLEHPKQKIGGRRIKDESLPKGYNIVSGKKSFEINKILDPNDVAPTLVAMDMEHLFVVDNGGLRTLTGKEGLRLFGYPDDYSFDIPKKDKYDLLGNTVAVPVIKAVSERLLHTL

SEQ ID NO: 35592 - protein, 455 aa, Neisseria meningitidis; identical to SEQ ID NO: 19672

SEQ ID NO: 35593 - protein, 950 aa, Neisseria meningitidis; identical to SEQ ID NO: 9050

SEQ ID NO: 35594 - protein, 642 aa, Neisseria meningitidis; identical to SEQ ID NO: 2342

SEQ ID NO: 35595 - protein, 283 aa, Neisseria meningitidis; identical to SEQ ID NO: 19904

SEQ ID NO: 35596 - protein, 95 aa, Neisseria meningitidis; identical to SEQ ID NO: 4938

SEQ ID NO: 35597 - protein, 371 aa, Neisseria meningitidis; identical to SEQ ID NO: 19086

SEQ ID NO: 35598 - protein, 130 aa, Neisseria meningitidis
  misc_feature 125, 126: 'Xaa' is any amino acid
MDFSWLAEPHTWIGFATLLVLEVVLGIDNLVFVAILANKVQPARRDRARIIGLGLAVVIRIIMLAFMAHIITLTEPLFQIGGLAVSGKDMIMLAGGIFLLYKATTELHERLEGHNRFTVADNQKXXHTLN

SEQ ID NO: 35599 - protein, 245 aa, Neisseria meningitidis; identical to SEQ ID NO: 1449

SEQ ID NO: 35600 - protein, 423 aa, Neisseria meningitidis
MKLLVIGNGGREHALAWKLAQLPKVETVFVAPGNAGTAIEPKLQNIDLTAHQDLIEFCRKENIVFTVVGPEAPLAAGVVDDFRAAGLKIFGPTQYAAQLESSKDFAKAFMAKYNIPTAQYQTFENADAAHDYVNQKGAPIVIKADGLAAGKGVIVAMTLDEAHAAIDDMLLDNKMGNAGARVVIEDFLQGEEASFIVMVDGNNVLPMATSQDHKRLLDGDKGLNTGGMGAYSPAPVVTPVVYERAMNEIILPTVAGMKAEGHEFTGFLYAGLMIDQSGAPYTIEFNCRFGDPETQPIMSRLNSDLADLVEAAIDGKLDSVAAEWNPQTAVGVVLAAQNYPETPKKGDVISGLDAANQVGKVFHAGTTANEKGDVLTNGGRVLCVVGLGDNVAQAKAKAYGALEKISFDGMQYRKDIADKAINR

SEQ ID NO: 35601 - protein, 118 aa, Neisseria meningitidis; identical to SEQ ID NO: 13999

SEQ ID NO: 35602 - protein, 79 aa, Neisseria meningitidis; identical to SEQ ID NO: 831

SEQ ID NO: 35603 - protein, 205 aa, Neisseria meningitidis; identical to SEQ ID NO: 8342

SEQ ID NO: 35604 - protein, 491 aa, Neisseria meningitidis; identical to SEQ ID NO: 24645

SEQ ID NO: 35605 - protein, 548 aa, Neisseria meningitidis
MKQSARIKNMDQTLKNTLGICALLAFCFGAAIASGYHLEYEYGYRYSAVGALASVVFLLLLARGFPRVSSVVLLIYVGTTALYLPVGWLYGAPSYQIVGSILESNPAEAREFVGNLPGSLYFVQALFFIFGLTVWKYCVSGGVFADVKNYKRRSKIWLTILLTLILSCAVMDKIASDKDLREPDAGLLLNIFDLYYDLASAPAQYVAKRAHILEAAKKASTWHIRHVAPKYKNYVVVIGESARSDYMNVYGFPLPDTPFLSQTKGLLINGYQSTAHATNLSLPQTLGLPGEPNNNIVSLAKQAGFRTAWLSNQGMLGHFANEISTYALRSDYPWFTQRGDYGKSAGLSDRLLLPAFKRVLIGNAGTKPRLIVMHLMGSHSDFCTRLDKDARRFQYQTEKISCYVSTIAQTDKFLEDTVKILNENKESWSLVYFSDHGLMHVGKGGERTLTHGAWKRQSYGVPLVKISSDDTRREMIKVRRSAFNFLRGFGSWTGIETDELPDDGYDFWGNVPDVQGEGNNLAFIDGLPDDPAPWYAGKGKSTKNTSKK

SEQ ID NO: 35606 - protein, 230 aa, Neisseria meningitidis; identical to SEQ ID NO: 675

SEQ ID NO: 35607 - protein, 397 aa, Neisseria meningitidis; identical to SEQ ID NO: 19122

SEQ ID NO: 35608 - protein, 122 aa, Neisseria meningitidis
LNNIPVEIRLLKNRTVLVLTYGDEPKNLPAEFLRVYSPSAEVRGHGVGQDVLQTGKADVQITDLQPVGQYALKIVFSDGHDSGLYDWAYLHRLAYGYDAMWQEYLDKLAAAGASRFEKQSDC

SEQ ID NO: 35609 - protein, 228 aa, Neisseria meningitidis; identical to SEQ ID NO: 15532

SEQ ID NO: 35610 - protein, 431 aa, Neisseria meningitidis; identical to SEQ ID NO: 24432

SEQ ID NO: 35611 - protein, 473 aa, Neisseria meningitidis; identical to SEQ ID NO: 18166

SEQ ID NO: 35612 - protein, 425 aa, Neisseria meningitidis
  misc_feature 3, 4: 'Xaa' is any amino acid
VCXXPDANKGIALLIFVAALWFTEAVHITVTALMVPILAVVLGFPDMDIKKAMADFSNPIIYIFFGGFALATALHMQRLDRKIAVSLLRLSRGNMKVAVLMLFLVTAFLSMWISNTATAAMMLPLAMGMLSHLDQEKEHKTYVFLLLGIAYCASIGGLGTLVGSPPNLIAAKALNLDFVGWMKLGLPMMLLILPLMLLSLYVILKPNLNERVEIKAESIPWTLHRVIALLIFLATAAAWIFSSKIKTAFGISNPDTVIALSAAVAVVVFGVAQWKEVARNTDWGVLMLFGGGISLSTLLKTSGASEALGQQVAATFSGAPAFLVILIVAAFIIFLTEFTSNTASAALLVPIFSGIAMQMGLPEQVLVFVIGIGASCAFMLPVATPPNAIVFGTGLIKQREMMNVGILLNILCVVLVALWAYAVLM

SEQ ID NO: 35613 - protein, 558 aa, Neisseria meningitidis
MSFKTDAEIAQSSTMRPIGEIAAKLGLNADNIEPYGHYKAKINPAEAFKLPQKQGRLILVTAINPTPAGEGKTTVTIGLADALRHIGKDAVIALREPSLGPVFGVKGGAAGGGYAQVLPMEDINLHFTGDFHAIGAANNLLAAMLDNHIYQGNELNIDPKRVLWRRVVDMNDRQLRNIIDGMGKPVDGVMRPDGFDITVASEVMAVFCLAKDISDLKERLGNILVAYAKDGSPVYAKDLKAHGAMAVLLKDAIKPNLVQTIEGTPAFVHGGPFANIAHGCNSVTATRLAKHLADYAVTEAGFGADLGAEKFCDIKCRLAGLKPDAAVVVATVRALKYNGGVERANLGEENLEALAKGLPNLLKHISNLKNVFGLPVVVALNRFVSDSDAELAMIEKACAEHGVEVSLTEVWGKGGVGGADLARKVVNAIENQTNNFGFAYDVELGIKDKIRAIAQKVYGAEDVDFSAEASAEIASLEKLGLDKMPVCMAKTQYSLSDNAKLLGCPEGFRITVRGITVSSGAGFIVALCGNMMKMPGLPKVPAAEKIDVDAEGVIHGLF

SEQ ID NO: 35614 - protein, 238 aa, Neisseria meningitidis; identical to SEQ ID NO: 24875

SEQ ID NO: 35615 - protein, 603 aa, Neisseria meningitidis; identical to SEQ ID NO: 6451

SEQ ID NO: 35616 - protein, 787 aa, Neisseria meningitidis
MQFSYSWLKTQADTELSSDKLEHLLTMSGLEVEEAETAAPAFAGVVIAEVKSVEKHPDADRLNVTRVDAGTGGLVQIVCGAPNVKAGIKVPCSLPGAVLPGNFKIKPTKMRGVPSNGMLCSTNELGLPDDGVDGLHILPEDAPVGINIREYLDLDDTLFTLKITPNRADCLSVKGIAREVSALTGCAFRQPEIHTAPITGSRKQPVQINAPADCGRFISRVIENVNAKAATPDWMKQRLERSGIRSISVLVDIGNYVMLEIGQPMHVFDADKLSGSLHIRRAREGETLECLNEKTVSLSENTLVVADEKGALSLAGLMGGAASAVSDGTQNIVLEAAWFAPEIIAGKSRQYGFGSDSSFRFERGVDYRLQADAIERATELVLQICGGAAGEMVEAQGELPEAKQVGLRLDRLKTVLGVDIPAEQVETILQHLGLQPEKTAEGFRVTAPSFRFDIEIEADLIEEIGRVYGYENIPDDYTSGRLKMLELPETRRPRFAVYNEMAARGYREVVSYAFVDEQWEQDFAANADPIRLQNPLAAQYAVMRSTLIGGLVEILQNNLNRKQNRVCVFEIARVFSKGSDGQFVQNERIGGLWYGAVMPEQWGGKTRNADFYDIKADVENLLKNKAVEFVKTGHPALHPGRAANIVSDGKVIGFVGELHPKWLQKYDLPQAPLVFEIDMAAVLECGKTRYRVVSKFQPVRRDLAFVMPEAMSHDDLLLVLKGAANKLVQEISVFDVYRGTGLPEGMKSVAVKVILQDMENTLTDEAVEPLIGKLIGAATAAGARLRS

SEQ ID NO: 35617 - protein, 258 aa, Neisseria meningitidis; identical to SEQ ID NO: 1434

SEQ ID NO: 35618 - protein, 382 aa, Neisseria meningitidis; identical to SEQ ID NO: 18428

SEQ ID NO: 35619 - protein, 215 aa, Neisseria meningitidis
MKGVYFVSGIDTDIGKTVATGVLAKQLLQQGKSVITQKPVQTGCQNIADDIAVHRKIMGKPMQEADKQGLTMPEIFSYPASPHLAARLDGRALDLDKIRTATQELAAQYEVVLVEGAGGLMVPLTENLLTIDYIRQQGYPVILVTSGRLGSINHTLLSFAALKQYGIRLHSLVFNHIHDSRDAHIAQDSLSYLKCRLKADFSEAEWMELAKTDAV

SEQ ID NO: 35620 - protein, 180 aa, Neisseria meningitidis
MINHIEKYTGTISHGSKSDSGSQYKLNIAAIPSSPNRDLKTYITLGLSKHDLNYKSRSEILFVCSLKYDENQIFPFLRWLAETIIENKKILLRGQVVYLPRSIVDSTKMDALYVSAPFYFDDDFQVCYGEHYNIVFPLLVPLYKQEAELVEKKGWNAFEQFLLDNEVGNLSDMNRKPFTW

SEQ ID NO: 35621 - protein, 331 aa, Neisseria meningitidis
LKAAYQNIATVWQGDFHNAKQVLSAMKKRVRKPAAVRSDADIAALFHAHRMKQAQQSRILNMLAVEIRPGFVLDNKRAPDIRAALLDVYGEADGKPFFLPLNLLLGFMGAHEWHKKGVAVPQLGGSIHVPFGVFSPLRGEYLDLLAHAPSTGFQTALDIGTGSGVLAAILAKQGIPSVIGTDTNPKAVACARANIARLGFEKQVEIRETDLFPEGFVDLIVCNPPWLPAKPTSAVESALYDPESAMLAAFLRDAPKHLNPDGEIRLIISDLAEHLGLRPADFLEKAFIRAGLRVADMIKTKPKHKKAANPSDPLAFARTRETTFLYRLKKA

SEQ ID NO: 35622 - protein, 143 aa, Neisseria meningitidis; identical to SEQ ID NO: 2619

SEQ ID NO: 35623 - protein, 140 aa, Neisseria meningitidis; identical to SEQ ID NO: 2533

SEQ ID NO: 35624 - protein, 307 aa, Neisseria meningitidis
MDIETFLAGERAADGYRCGFVAIVGRPNVGKSTLMNHLIGQKISITSKKAQTTRNRVTGIYTDDTAQFVFVDTPGFQTDHRNALNDRLNQNVTEALGGVDVVVFVVEAMRFTDADRVVLKQLPKHTPVILVVNKIDKDKAKDRYALEAFVAQVRAEFEFAAAEAVSAKHGLRIANLLELLKPYLPESVPMYPEDMVTDKSARFLAMEIVREKLFRYLGEELPYAMNVEVEQFEEEDGLNRIYIAVLVDKESQKAILIGKGGERLKKISTEARLDMEKLFDTKVFLKVWVKVKSGWADDIRFLRELGL

SEQ ID NO: 35625 - protein, 420 aa, Neisseria meningitidis; identical to SEQ ID NO: 6891

SEQ ID NO: 35626 - protein, 515 aa, Neisseria meningitidis; identical to SEQ ID NO: 654

SEQ ID NO: 35627 - protein, 71 aa, Neisseria meningitidis
  misc_feature 2, 3: 'Xaa' is any amino acid
VXXYRAIVSHPLVKLVLIGVLWAYLHHSLAGIRFLFLDAHKGLELNTARNTAKAVFASALVLTVVLGALLW

SEQ ID NO: 35628 - protein, 258 aa, Neisseria meningitidis
MTLIHPTAVIDPKAELDSGVKVGAYTVIGPNVQIGANTEIGPHAVINGHTSIGENNRIFQFASLGEIPQDKKYRDEPTKLIIGNGNTIREFTTFNLGTVTGIGETRIGDDNWIMAYCHLAHDCVIGNHTIFANNASLAGHVTIGDYVVLGGYTLVFQFCHIGDYAMTAFAAGVHKDVPPYFMASGYRAEPAGLNSEGMRRNGFTAEQISAVKDVYKTLYHRGIPFEEAKADILRRAETQAELAVFRDFFAQSAHGIIR

SEQ ID NO: 35629 - protein, 962 aa, Neisseria meningitidis
MSNTTVEQFAAELKRPVEDLLKQLKEAGVSKTGGGDSLTLDDKQLLNAYLTKKNGSNGGTISIRRTKTEVSTVDGVKVETRKRGRTVNIPSAEELAAQVKAAQTQAAPVRPEQTAEDAAKARAEAATRAEARAKAEAEAAKLKAAKAGNKAKPAAQKPTEAKAETAPVAAETKPAEESKAEKAQADKMPSKKPAEPKEKAAKPKHERNGKGKDAKKPAKPAAPAAPQPVVSAEEQAQRDEEARRAAALRAHQEALLKEKQERQARREAMKQQAEQQAKAAQEAKTGRQRPAKPAEKPQAAAPAVENKPVNPAKAKKEDRRNRDDEGQGRNAKGKGGKGGRDRNNARNGDDERVRGSKKGKKLKLEPNQHAFQAPTEPVVHEVLVPETITVADLAHKMAVKGVEVVKALMKMGMMVTINQSIDQDTALIVVEELGHIGKPAAADDPEAFLDEGAEAVEAEALPRPPVVTVMGHVDHGKTSLLDYIRRTKVVQGEAGGITQHIGAYHVETPRGVITFLDTPGHEAFTAMRARGAKATDIVILVVAADDGVMPQTIEAIAHAKAAGVPIVVAVNKIDKDTANPERIRQELTQHEVIPDDWGGTVQFIDVSAKKGTNIDALLEAVLLEAEVLELTAPVDAPAKGIIVEARLDKGRGAVATLLVQSGTLKKGDMLLAGTAFGKIRAMVDENGKSITEAGPSIPVEILGLSDVPNAGEDAMVLADEKKAREIALFRQGKYRDVRLAKQQAAKLENMFNNMGETQAQSLSVIIKADVQGSYEALAGSLKKLSTDEVKVNVLHSGVGGITESDVNLAIASGAFIIGFNVRADASSRKLAENENVEIRYYNIIYDAIDDVKAAMSGMLSPEEKEQVTGTVEIRQVISVSKVGNIAGCMVTDGVVKRDSHVRLIRNNVVIHTGELASLKRYKDDVKEVRMGFECGLMLKGYNEIMEGDQLECFDIVEVARSL

SEQ ID NO: 35630 - protein, 261 aa, Neisseria meningitidis
  misc_feature 255, 256: 'Xaa' is any amino acid
MAKIITPLSANQVKNAKPRDKLYKLSDGGELALWVYPTGGRSWKLSFVQDGRQQTISLGRYPDFSLADAREWREEVRRKRAHGENVVNKKVRADFAFEKVARDWFVRWSKGRSEKYAGQVMRNFERWVFPAIGNLDIRQIRTADVVGCLRVMEARGIVDTLRKTKNSLKMVFAFAVGSGMMEINPVAQIGSGVFERAKTGNMAALSPSELPRLIDFLEQRNEFAVYAGRVRIHPVTRLCIYWLLLTMTRIQEAAXXTHLIN

SEQ ID NO: 35631 - protein, 136 aa, Neisseria meningitidis; identical to SEQ ID NO: 25189

SEQ ID NO: 35632 - protein, 338 aa, Neisseria meningitidis
VGTVLVSVVAQLDGAGATTFLLVVPALLPLYKRLHMNPYLLFLLLTSSAGLINLLPWGGPTGRVASVLGADVGELYKPLLTVQIIGVVFILALSLLLGVREKRRIVRELGALPAVADLIKPVPLSEEEQKLARPKLFWWNVLLFLAAMSLLFSGIFPPGYVFMLAATAALLLNYRSPQEQMERIYAHAGGAVMMASIILAAGTFLGILKGAGMLDAISKDIVHILPDALLPYLHIAIGVLGIPLELVLSTDAYYFGLFPIVEQITSQAGVAPEAAGYAMLIGSIVGTFVTPLSPALWMGLGLAKLSMGKHIRYSFFWAWGLSLAILASSIAAGIVPLP

SEQ ID NO: 35633 - protein, 367 aa, Neisseria meningitidis; identical to SEQ ID NO: 7962

SEQ ID NO: 35634 - protein, 199 aa, Neisseria meningitidis; identical to SEQ ID NO: 25733

SEQ ID NO: 35635 - protein, 265 aa, Neisseria meningitidis; identical to SEQ ID NO: 18352

SEQ ID NO: 35636 - protein, 172 aa, Neisseria meningitidis; identical to SEQ ID NO: 3384

SEQ ID NO: 35637 - protein, 395 aa, Neisseria meningitidis
MNTLLKQLKPYPFARLHEAMQGISAPEGMEAVPLHIGEPKHPTPKVITDALTASLHELEKYPLTAGLPELRQACANWLKRRYDGLTVDADNEILPVLGSREALFSFVQTVLNPVSDGIKPAIVSPNPFYQIYEGATLLGGGEIHFANCPAPSFNPDWRSISEEVWKRTKLVFVCSPNNPSGSVLDLDGWKEVFDLQDKYGFIIASDECYSEIYFDGNKPLGCLQAAAQLGRSRQKLLMFTSLSKRSNVPSLRSGFVAGDAELLKNFLLYRTYHGSAMSIPVQRASIAAWDDEQHVIDNRRLYQEKFERVIPILQQVFDVKLPDASFYIWLKVPDGDDLAFARNLWQKAAIQVLPGRFLARDTEQGNPGEGYVRIALVADVATCVKAAETIVSLYR

SEQ ID NO: 35638 - protein, 265 aa, Neisseria meningitidis
MNRLYPHPIIAREGWPIIGGGLALSLLVSMCCGWWSLPFWVFTVFALQFFRDPAREIPQNPEAVLSPVDGRIVVVERARDPYRDVDALKISIFMNVFNVHSQKSPADCTVTKVAYNKGKFVNADLDKASTENERNAVLATTASGREITFVQVAGLVARRILCYTQAGAKLSRGERYGFILFGSRVDMYLPVDAQAQVAIGDKVNGVSTVLARLPLTAPQIESEPESEPALQTAPVETAANPSAEQRQIEAVAAKIQAAVQDVLKD

SEQ ID NO: 35639 - protein, 85 aa, Neisseria meningitidis; identical to SEQ ID NO: 19708

SEQ ID NO: 35640 - protein, 196 aa, Neisseria meningitidis; identical to SEQ ID NO: 24441

SEQ ID NO: 35641 - protein, 547 aa, Neisseria meningitidis; identical to SEQ ID NO: 35329

SEQ ID NO: 35642 - protein, 531 aa, Neisseria meningitidis; identical to SEQ ID NO: 19821

SEQ ID NO: 35643 - protein, 669 aa, Neisseria meningitidis
LAQQGSYTKTDGTTAKMGDLLLAADNLHSRFKDKVELTAEQAKAANLAGIGRLRDLREAAALSGDLANMLKAYSAAETKEAQLALLDNLIHKWAETDSNWGKKSPMRLSTDWTQTANEGIALTPSQVAQLKKNALVSLSDKAKATIDAARDRIAVLDAYTGQDSNTLYYMSEEDALNIVKVTNDTYDHLAKNIYQNLLFQTRLQPYLNQISFKMENDTFTLDFSGLVQAFNHVKETNPQKAFVDLAEMLAYGELRSWYEGRRLMADYVEEAKKAGKFEDYQKVLGQETVALLAKTSGTQADDILQNVGFGHNKNVSLYGNDGNDTLIGGAGNDYLEGGSGSDTYVFGKGFGQDTVYNYDYATGRKDIIRFTDGITADMLTFTREGNHLLIKAKDGSGQVTVQSYFQNDGSGAYRIDEIHFDNGKVLDVATVKKLVQQSTDGSDRLYAYQSGSTLNGGLGDDYLYGADGNDLLNGDAGNDSIYSGNGNDTLNGGEGNDALYGYNGNDALNGGEGNDHLNGEDGNDTLIGGAGNDYLEGGSGSDTYVFGEGFGQDTVYNYHVDKNSDTMHFKGFKAADVHFIRSGSDLVLSASEQDNVRISGFFYGENHRVDTFVFDDAAISNPDFAKYINAGNNLVQSMSVFGSNTAATGGNVDANTQSVQQPLLVTPSA

SEQ ID NO: 35644 - protein, 306 aa, Neisseria meningitidis; identical to SEQ ID NO: 14851

SEQ ID NO: 35645 - protein, 318 aa, Neisseria meningitidis; identical to SEQ ID NO: 12498

SEQ ID NO: 35646 - protein, 128 aa, Neisseria meningitidis; identical to SEQ ID NO: 1074

SEQ ID NO: 35647 - protein, 206 aa, Neisseria meningitidis; identical to SEQ ID NO: 1725

SEQ ID NO: 35648 - protein, 502 aa, Neisseria meningitidis; identical to SEQ ID NO: 18448

SEQ ID NO: 35649 - protein, 589 aa, Neisseria meningitidis
MTVQTKTKGLAWQEKPLSDNERLKTESNFLRGTILDDLKDPLTGGFKGDNFQLIRFHGMYEQDDRDIRAERAEAKLEPLKFMLLRCRLPGGIIKPSQWIELDKFARENSHYRSIRLTNRQTFQFHGVPKAKLQTLHRLLHKLGLDSIATAADMNRNVLCTSNPIESELHQQAYEYAKKISEHLLPRTRGYLDVWVDGKKIQSSDDFLQEDEPILGKTYLPRKFKTAVVIPPLNDVDCYGNDLDFVAISDGNGQLAGFNVLAGGGLSMEHGNTKTYPNISLELGFVPPEHALKAAEAVVTTQRDFGNRSDRKNARTRYTIQNMGLDNFRAEVERRMGMPFEPVRPFKFTGRGDRIGWVKGIDGNWHLTLFIESGRLVDEGGKQLLTGVLEIAKIHKGDFRITANQNLIVANVPEGGKARIEQLARSYGLIHDGVSKLRENAMSCVSFPTCPLAMAEAERVLPDFIGELDKIMAKHGTSDDYIVTRITGCPNGCGRAMLAEIGLVGKAVGRYNLHIGGDREGVRIPRLYKENITLPEILAELDDLIGKWAAERNIGEGFGDFAIRTGIVKPVLNAPVDFWDASKAVAIARA

SEQ ID NO: 35650 - protein, 559 aa, Neisseria meningitidis; identical to SEQ ID NO: 22592

SEQ ID NO: 35651 - protein, 423 aa, Neisseria meningitidis
MNEGEVVLTPEQIQTLRGYAFRGDTYGGWRYLANLGDRYADDAAAIVGKDANLNGLNLWMKKGVENLWDDTVGKKTRLEKFDRVALQHFSQYVDLINENNGRLPNTSEIERSYYKAVTENGVSSSAAIDLVINRSLPDMADGYWALGLGIEAERIHNAQAVNNPNGSEWDNRKQLISALDKGFDGSFKEKHFTFLQSVIMDVTKLGVEYTIDGWQKIGGWGNGIINDLYKSVAKREWTGIFEIVNNNIKQFRDLFPNPEGWIDDGHQCFAPWVKETKKRNGKYHVYDPLALDLDGDGIETVATKGFAGSLFDHTNNGIRTATGWVSADDGLLVRDLNGNGIIDNGAELFGDNTKLADGSFAKHGYAALAELDQTATTSSTRQTPHSKPCVYGRISIRTAFPKLMNCVPLKNWVFNLWISPIKM

SEQ ID NO: 35652 - protein, 442 aa, Neisseria meningitidis; identical to SEQ ID NO: 2771

SEQ ID NO: 35653 - protein, 407 aa, Neisseria meningitidis; identical to SEQ ID NO: 19083

SEQ ID NO: 35654 - protein, 56 aa, Neisseria meningitidis; identical to SEQ ID NO: 18281

SEQ ID NO: 35655 - protein, 203 aa, Neisseria meningitidis; identical to SEQ ID NO: 352

SEQ ID NO: 35656 - protein, 160 aa, Neisseria meningitidis; identical to SEQ ID NO: 4185

SEQ ID NO: 35657 - protein, 176 aa, Neisseria meningitidis; identical to SEQ ID NO: 3131

SEQ ID NO: 35658 - protein, 304 aa, Neisseria meningitidis
  misc_feature 300, 301, 302: 'Xaa' is any amino acid
MDTLTRFLPEHLQQNQLPEALGGVLLSVVSACTEINAKVRLGALAGVLGMAGTGNIQGEDQKKLDVIANNIMIDTLKANPAVAGLASEEEDSFVSAGENGRYLVLFDPLDGSSNIDVNISVGTIFSILEKPEGALATESFLQTGRQQLAAGYILYGPQTQLVFTFGHGVYMFTLNAENEFVLTKEKPKVPESTKEFAINMSNRRHWLPPVQQYIDELLAGETGTRGKNYNMRWVASMVAEIHRILMRGGVFMYPQDKRDPSKPGKLRLMYEANPMSLILEQAGASASNAYQAMLDIQPEXXXHT

SEQ ID NO: 35659 - protein, 317 aa, Neisseria meningitidis; identical to SEQ ID NO: 11285

SEQ ID NO: 35660 - protein, 271 aa, Neisseria meningitidis; identical to SEQ ID NO: 1333

SEQ ID NO: 35661 - protein, 595 aa, Neisseria meningitidis; identical to SEQ ID NO: 18408

SEQ ID NO: 35662 - protein, 380 aa, Neisseria meningitidis; identical to SEQ ID NO: 14949

SEQ ID NO: 35663 - protein, 207 aa, Neisseria meningitidis; identical to SEQ ID NO: 25887

SEQ ID NO: 35664 - protein, 108 aa, Neisseria meningitidis; identical to SEQ ID NO: 3002

SEQ ID NO: 35665 - protein, 332 aa, Neisseria meningitidis; identical to SEQ ID NO: 19103

SEQ ID NO: 35666 - protein, 66 aa, Neisseria meningitidis; identical to SEQ ID NO: 1185

SEQ ID NO: 35667 - protein, 604 aa, Neisseria meningitidis; identical to SEQ ID NO: 19642

SEQ ID NO: 35668 - protein, 346 aa, Neisseria meningitidis
MQPIRYRTDLTPYNTFGLRAQAQAFIALEHADELHDIVRLPEFDRDTVLWLGGGSNILLMQDYAGLVVHMENKGIREIVRSDGMVLIEAQAGEIWHDFVLHTVALGLNGLENLSLIPGTVGASPVQNIGAYGVETKDVIHSVRCFDLDTETFVTLSNADCRFAYRESLFKQEGKGRYVIVSVVFALKTHFVPNLDYGDLAAAVAELSAGRVPTAKDVSDAVCAIRNSKLPNPNVLGNVGSFFKNPVIGAEKAAALLEQHPDMPHYPQPDGSVKLAAGWLIDQCRLKGFQIGGAAVHDRQALVLVNKNNASANDVRQLAQHIKFTVFARFQVELHAEPNWLPASFSL

SEQ ID NO: 35669 - protein, 106 aa, Neisseria meningitidis; identical to SEQ ID NO: 853

SEQ ID NO: 35670 - protein, 547 aa, Neisseria meningitidis
MNAFTRAWYALERHYQDTRHVLLRDRFACEPDRFERMHERLDGMLFDYSKNRLGEDTLQLLCRLAETADLEGKMRALRTGAKVNGSEGRAALHTALRLPDGADAVYADGRDVLPEIRRELNRALEFAHSLDDGSYQGTTGKRITDFVHIGIGGSDLGPAMCVQALEPFRRHITVHFAANADPACLDAVLCRLNPETTVFCVASKSFKTPETLLNAQAVKAWYRGAGFSESETACHFCAVSADTAAAAAFGIAAERVFAMYDWVGGRYSVWSPVGLPVMVAVGGARFRELLAGAHAMDSHFFHTPPRRNIPVLMALIAVWYNNFQHADGQTAVPYSHNLRLLPVWLNQLDMESLGKSRASDGSPAVCKTGGIVFGGEGVNCQHAYFQLLHQGTRLIPCDFIVPVTAQGVEDGRSRFTVANAFAQAEALMKGKTLDEARAELADLPEAERERLAPHKEFPGNRPSNSILLDRLTPYNLGMLMAAYEHKTFVQGAIWNVNPFDQWGVEYGKQLAKTIIGELEGGTSVHDASTEGLMAFYRECRLKGGGAA

SEQ ID NO: 35671 - protein, 226 aa, Neisseria meningitidis; identical to SEQ ID NO: 35420

SEQ ID NO: 35672 - protein, 397 aa, Neisseria meningitidis; identical to SEQ ID NO: 18337

SEQ ID NO: 35673 - protein, 200 aa, Neisseria meningitidis; identical to SEQ ID NO: 19173

SEQ ID NO: 35674 - protein, 342 aa, Neisseria meningitidis
MKQTVKWLAAALIALGLNQAVWADDVSDFRENLQAAEQGDAAAQYNLGAMYYKGRGVRQDDTEAVRWYRQAAAQGFAPAQALLGSMYAIGQGVRQDDAEAVKWYRQAAEQGDAQAQVLLGVMYDKGEGVRQDDAQAMQRFRKAAEQGDAAAQHNLGLMYLTGEGVRQDYAEAMQWFRKAAEQGIAEAQYNLGVMYHKGAGVRQDYAQAVQWFRKAAERGKAEAQHNLGLMYLTGEGVRRDSKQAAQWFRKAAEQGIVQAQHNLGIRYYKGEGVRRDYKQAAQWYRRAAEQGDAVAQHNLGLMYLKGEGVRQDRALAQEWLGKACQNGNQDGCDNDQRLKAGY

SEQ ID NO: 35675 - protein, 128 aa, Neisseria meningitidis; identical to SEQ ID NO: 605

SEQ ID NO: 35676 - protein, 92 aa, Neisseria meningitidis
  misc_feature 88, 89, 90: 'Xaa' is any amino acid
MKNQKNFDKMLEARQRFDLESPQYFYLQTAFHHARQKIYNRLLLLVPHRRAVLFCACLKSIPYAKQAARKWGGFFVTFTQVARFGNTXXXHT

SEQ ID NO: 35677 - protein, 81 aa, Neisseria meningitidis; identical to SEQ ID NO: 2079

SEQ ID NO: 35678 - protein, 391 aa, Neisseria meningitidis; identical to SEQ ID NO: 24888

SEQ ID NO: 35679 - protein, 335 aa, Neisseria meningitidis; identical to SEQ ID NO: 18995

SEQ ID NO: 35680 - protein, 161 aa, Neisseria meningitidis; identical to SEQ ID NO: 8432

SEQ ID NO: 35681 - protein, 248 aa, Neisseria meningitidis; identical to SEQ ID NO: 25365

SEQ ID NO: 35682 - protein, 173 aa, Neisseria meningitidis; identical to SEQ ID NO: 19372

SEQ ID NO: 35683 - protein, 203 aa, Neisseria meningitidis
MITTYKTITSPTQAGFKDKGSRFIAFAYPIRTLADVKKYLDPLKEEHHKARHWCYAYRLGVDGMQFRANDDGEPSGSAGRPILGQIDSVGITDVLVVVVRYFGGTLLGVSGLIHAYKEATAQALAIAEVIEKNIEKTVWLKCEYPFLNEAIRIAKQYQADILERDLQLDCRLTVSLSLANYEVCVAAWKNTRQIEVNTEKPFE

SEQ ID NO: 35684 - protein, 159 aa, Neisseria meningitidis
MSKHTYPITPAVRVLRENGIEFEPFTYAYEEHGGTAQFSRLFGKDEHLVIKTIVLQDENGKGLIVLMHGDKQISTRNLARHLGAKHIEPATPAQANKWTGYLVGGTTPFGIRTKLDIYVEQSVMDLETIYINGGKRGFIIGIRPRDLNILNPKTIQAAV

SEQ ID NO: 35685 - protein, 319 aa, Neisseria meningitidis
MSTFFRQTAQAMIAKHIDRFPLLKLDQVIDWQPIEQYLNRQRTRYLRDHRGRPAYPLLSMFKAVLLGQWHSLSDPELEHSLITRIDFNLFCRFDELSIPDYSTLCRYRNRLAQDDTLSELLKLINRQLTEKGLKVEKASAAVVDATIIQTADSKQRQAIEVDEEGQINGQTTPSKDSDARWIKKNGLYKLGYKQHTRTDAEGYIEKLHITPANAHECKHLSPLLEGLPKGTTVYADKGYDSAENRQHLEEHQLLDGIMRKACRNRPLTETQTKRNRYLSKTRYVVEQSFGTLHRKFRYARAAYFGLICARCRLKGSPDA

SEQ ID NO: 35686 - protein, 87 aa, Neisseria meningitidis; identical to SEQ ID NO: 932

SEQ ID NO: 35687 - protein, 428 aa, Neisseria meningitidis [sequence omitted]

SEQ ID NO: 35688 - protein, 69 aa, Neisseria meningitidis; identical to SEQ ID NO: 1621

SEQ ID NO: 35689 - protein, 349 aa, Neisseria meningitidis
  misc_feature 2, 3, 4, 343, 344: 'Xaa' is any amino acid
VXXXLPVRVIAQTAKTRSGWDTVLEGTEFKTTLAGADIQAGVGEKARVDAKIILKGIVNRIQSEEKLETNSTVWQKQAGRGSTIETLKLPSFESPTPPKLSAPGGYIVDIPKGNLKTEIEKLSKQPEYAYLKQLQVAKNINWNQVQLAYDRWDYKQEGLTEAGAAIIALAVTVVTSGAGTGAVLGLNGAAAAATDAAFASLASQASVSFINNKGDVGKTLKELGRSSTVKNLVVAAATAGVADKIGASALNNVSDKQWINNLTVNLANAGSAALINTAVNGGSLKDNLEANILAALVNTAHGEAASKIKQLDQHYIVHKIAHAIAGCAAAAANKGKCQDGAIXXTHLIN

SEQ ID NO: 35690 - protein, 64 aa, Neisseria meningitidis; identical to SEQ ID NO: 34713

SEQ ID NO: 35691 - protein, 140 aa, Neisseria meningitidis; identical to SEQ ID NO: 18060

SEQ ID NO: 35692 - protein, 193 aa, Neisseria meningitidis; identical to SEQ ID NO: 3067

SEQ ID NO: 35693 - protein, 224 aa, Neisseria meningitidis; identical to SEQ ID NO: 18482

SEQ ID NO: 35694 - protein, 245 aa, Neisseria meningitidis; identical to SEQ ID NO: 25287

SEQ ID NO: 35695 - protein, 260 aa, Neisseria meningitidis; identical to SEQ ID NO: 2560

SEQ ID NO: 35696 - protein, 107 aa, Neisseria meningitidis; identical to SEQ ID NO: 875

SEQ ID NO: 35697 - protein, 218 aa, Neisseria meningitidis
MNRQKVIAIDGPGASGKGTVAARVAAALGYDYLDTGALYRLTALYAQKQGVGWHDEENVSELAKKLPAVFSGSRILLGGEDVSDGIRTEAIGMGASAVAQLPKVRASLLQRQRDFLTEKGLVADGRDTGSVVFPQAELKIFLTAESKIRAERRAKQIGIPCEGLAFERILSDIEARDEADRNRKVAPLKQQPDALLLDTSRLTIEETVKKVLDWYREV

SEQ ID NO: 35698 - protein, 255 aa, Neisseria meningitidis; identical to SEQ ID NO: 24883

SEQ ID NO: 35699 - protein, 294 aa, Neisseria meningitidis
MSTFFQQTAQAMIAKHIDRFPLLKLDQVIDWQPIEQYLNRQKNRYLRDHRGRPAYPLLSMFKAVLLGQWHSLSDPELEHSLITRIDFNLFCRFDELIIPDYSTLCRYRNWLAQDDTLSELLKLINCQLTEKGLKIEKASAAVVDATIIQTAGSKQRQAIEVDEEGQISGQTTPSKDSDARWIKKNGLYKLGYKQHTRTDAEGYIEKLHITPANAHECKHLSPLLEGLPEGTTVYADKGYDSAENRTSGRTSVVRRHYARAAYFGLIKVSAQSHLKAMCLNLLKAANRLSAPAAA

SEQ ID NO: 35700 - protein, 105 aa, Neisseria meningitidis; identical to SEQ ID NO: 895

SEQ ID NO: 35701 - protein, 41 aa, Neisseria meningitidis; identical to SEQ ID NO: 18046

SEQ ID NO: 35702 - protein, 269 aa, Neisseria meningitidis; identical to SEQ ID NO: 17359

SEQ ID NO: 35703 - protein, 433 aa, Neisseria meningitidis
MPSETARPLYADTRAAHTLVWFRQNLRIRDNAALCAAVAEGLPVIGIWIDDAETDNPRRAAFYRQSAAELAQGLAGRGIPLYTAASPAELVRLAVRLNIRAVIADESHTFADKLADNALWHELDKHGIALTFVNDRAVFGKTDLIPDGGTAHTDFDRYREVWLDRFSKQPPAGPDLFVAYRQPFPENLSAPPPAALSDGIFLPQNSGETAAWRQWRRFLEQADSYSVLKDFPSRKHTSLMGAYLSAGCISPRLLARESLERRLNAWADNIIRRDFFLQLALQHTDDDPSDGNPEHTLRLTLWQQGRTGIPIIDAAMRCLHKTGSLHPALRRLSADFFCHVLNLPRREGEIWFARQLTDFDAAINQGNWWLAASRHTCPDIAAAAHKTDPDGTFVRRHIPELAHLSADTVHTPWRFACSVDTHGYPAHPVAGIP

SEQ ID NO: 35704 - protein, 223 aa, Neisseria meningitidis; identical to SEQ ID NO: 28261

SEQ ID NO: 35705 - protein, 250 aa, Neisseria meningitidis; identical to SEQ ID NO: 2637

SEQ ID NO: 35706 - protein, 201 aa, Neisseria meningitidis; identical to SEQ ID NO: 1094

SEQ ID NO: 35707 - protein, 365 aa, Neisseria meningitidis
  misc_feature 3, 4: 'Xaa' is any amino acid
VCXXRRDSLLKPLQAVTGIVERRHTLPILSNVLIEGKGGQTKLLATDLEIQIDTAGPEGGAGDFRITTNAKKFQDILRALPAGALVSLDWDDSRLTLKAGKSRFALQTLPAADFPMMNVGEDISATFSLEQERFKTMLSQVQYSMAVQDIRYYLNGLLMQVEGSQLRLVATDGHRLAYAACAIDADLPHAEVILPRKTVLELFKLLNNPDDPIQIELLDKQVRFQCNGTTIVSKVIDGKFPDFNRVIPLDNDKIFVLSRAELLGALERVSILANEKFRGARLFLQSGLLSVVCSNNEQEEAREEIEIAYQGGELEVGFNIGYLMDVLRNIHSDDMQLAFGDANRSTLFTVPNNPNFKYIVMPMRI

SEQ ID NO: 35708 - protein, 281 aa, Neisseria meningitidis
MNIADGRQAFPAPAKLNLDLRITGRREDGYHNIESIFCLIDLQDTVYLKPRDDGKIILHNPVGGIAQEADLSYRAASLLQKYARNPAGVEIWLDKKIPTGAGLGGGSSDAATVLLVLNRWWQCGLTQRQLIDSGAALGADVPFFIFGKNAFARGIGDRLDEMDIPKQWYVIVKPPVHVSTAKIFTHEGLTRNSASSIMPTFQNLQPFRNDMQAVVFKEYPEVWKAYSELSRYGFALMTGSGACVFTACQDRNSAYNIYRQVSDLYEAYLAEGLSKHPWLSV

SEQ ID NO: 35709 - protein, 256 aa, Neisseria meningitidis; identical to SEQ ID NO: 19257

SEQ ID NO: 35710 - protein, 57 aa, Neisseria meningitidis; identical to SEQ ID NO: 6070

SEQ ID NO: 35711 - protein, 300 aa, Neisseria meningitidis; identical to SEQ ID NO: 19179

SEQ ID NO: 35712 - protein, 274 aa, Neisseria meningitidis; identical to SEQ ID NO: 5218

SEQ ID NO: 35713 - protein, 239 aa, Neisseria meningitidis
MATLSNKTILVTGASQGLGEQVAKAYAAAGATVILVARHQKKLEKVYDAIVEAGHPEPFAIRFDVMSAEEKEFNQFATTIAEATQGKLDGIVHCAGYFYALSPLDFQTVAEWVNQYRINTVAPMGLTRALFPLLKQSPDASVIFVGEPHGETPKAYWGGFGASKAALNYLCKVAADEWERFGNLRANVLVPGPINSPQRIKSHPGEAKSERKSYGDVLPAFVWWASAESKGRSGEIVYL

SEQ ID NO: 35714 - protein, 90 aa, Neisseria meningitidis
  misc_feature 2, 3, 4: 'Xaa' is any amino acid
VXXXAGTDGTLRNRFKQSGGLLRLKTGTLNNVRALAGYWLGDKPMAVVVIINSGRAVSLLPDLDNFVAKNIISGGDGWLDAKLMCKERRA

SEQ ID NO: 35715 - protein, 637 aa, Neisseria meningitidis; identical to SEQ ID NO: 18315

SEQ ID NO: 35716 - protein, 181 aa, Neisseria meningitidis; identical to SEQ ID NO: 19550

SEQ ID NO: 35717 - protein, 335 aa, Neisseria meningitidis; identical to SEQ ID NO: 24181

SEQ ID NO: 35718 - protein, 469 aa, Neisseria meningitidis
MDTQIKTEAGQQNNRRYLTVWRWHFYAGLLVMPFLTLLAVTGLGMLLFANITGKEGERIHVVPQATVQPLSVQAEAARSAVNPETSSVVQYIAPRADDMVAVFRVNNEGKATMVAVDPYTAKVVSTMPRNQGWYYAMDEIHSDMMLGSTGDYLLETAASLTIIMIISGLYLWWVKRRGIKAMLLPPKGKARSWWRNLHGAFGTWVSLILLLFCLSGIAWAGIWGGKFVQAWSQFPAGKWGVEPNPVSVVPTHGEVLNDGKVKEVPWILELTPMPVSGTTVGKDGINPDEPMTLETVDRFAREIGFKGRYQLNLPKGEDGVWTLSQDSMSYDMISPFADRTVHIDQYSGKILADIRFDDYNPFGKFMAASIALHMGTLGWWSVLANVVFCLAVIFIGISGCVMWWKRRPTGAVGIVPPAQKVKLPVWWMMALPLLAIALLFPTALLAIAVIWLLDTLLLSRIPVLRRWFK

SEQ ID NO: 35719 - protein, 190 aa, Neisseria meningitidis; identical to SEQ ID NO: 31417

SEQ ID NO: 35720 - protein, 278 aa, Neisseria meningitidis; identical to SEQ ID NO: 19243

SEQ ID NO: 35721 - protein, 210 aa, Neisseria meningitidis
MTLRYEILSVTPFRQNCTLIWDDESGEAVLTDVGGDVPFLLQALANRKLTLTAIWLTHGHLDHAGGVVEMLKTRNVPVLGPHPDDEFLLQSLPQTTAQYGFPVSPAFAPNRWLEEGETLTVGRYAFQVLHIPGHTPGHIVFYCAEAELLIAGDVLFYETIGRTDFPRGNHADLINNIRNKLFALPETVQVVAGHGRMTSIGHEKRHNPFF

SEQ ID NO: 35722 - protein, 215 aa, Neisseria meningitidis; identical to SEQ ID NO: 1509

SEQ ID NO: 35723 - protein, 91 aa, Neisseria meningitidis; identical to SEQ ID NO: 9295

SEQ ID NO: 35724 - protein, 197 aa, Neisseria meningitidis; identical to SEQ ID NO: 7050

SEQ ID NO: 35725 - protein, 127 aa, Neisseria meningitidis; identical to SEQ ID NO: 2146

SEQ ID NO: 35726 - protein, 42 aa, Neisseria meningitidis; identical to SEQ ID NO: 19082

SEQ ID NO: 35727 - protein, 1292 aa, Neisseria meningitidis
MTYPIPKPREKSRWPNLSQGSLPLALARYLPHKRLKVVLTQDAEQALRLQTAWRFFRPHDTAVFLPDWETLPYERFSPHQDLVSERLSALWQIKSGAADVLFVPVATAMQKLPPVPFLAGRTFWLKTGQTLDIGRLKTDLVDAGYNHVSHVVAAGEFAVRGGIVDLFPMGSEMPYRIDLFDDEIDSIKTFDTETQRTISPVSEIRLLPAHEFPTDNEAQKIFRSRFREEVDGNPNDAAVYKAVSNGHFGAGVEYYLPLFFENELETLFDYIGEDALFVSLGDVHAEANRFWSDVKSRYAMAQGDETYPPLLPQYLYLSADVFAGRLKNYGQVLPDVSGKEYTLPDLAVNRQADEPLQALKDFQTAFDGRILLCAESLGRRETMLGFLQQNGLKAKPVSDWQGFLSAHEPLMITVAPLAYGFKLGGLQSPSQQQAAPASEGEGDAITDQTEFSASATNPLPSPLPQEREQSAAAVSDDLKAKSSLHLVASNLHGQIRQQPTPSPVGEGWGEGKAAADQTEFFLAVTSPLPQEREQSAAAVSDGLKTESSLYSIANNLHGQIRQQPAPSPVGEGWGEGKAVADQSAIAVITESDLYQYVARSRVHNRRKKHAAVSDGLLRDLAEINIGDPVVHEEHGIGRYMGLITMDLGGETNEMMLLEYAGEAQLYVPVSQLHLISRYSGQAHENVALHKLGSGAWNKAKRKAAEKARDTAAELLNLYARRAAQSGHKFEINELDYQAFADGFGYEETEDQAAAIAAVIKDLTQAKPMDRLVCGDVGFGKTEVALRAAFVAVMGGKQVAVLAPTTLLVEQHAQNFADRFADFPVKVASLSRFNNSKATKAALEGLADGTVDIVIGTHKLVQDDIRFKNLGLVIIDEEHRFGVRQKEQLKRLRANVDILTMTATPIPRTLSMALEGLRDFSLITTAPSRRLAVKTFVKPFSEGSVREAVLRELKRGGQVFFLHNEVDTIENMRERLKTLLPEARIGVAHGQLRERELEQVMRDFLQQRFNVLLCSTIIETGIDIPNANTIIINRADKFGLAQLHQLRGRVGRSHHQAYAYLLTPEYITKDAEKRLNAIAAADELGAGFTLAMQDLEIRGAGEILGEGQSGEMIQVGFTLYTEMLKQAVRDLKKGRQPDLDAPLGITTEIKLHSPALLPESYCPDIHERLVLYKRLAVCETVQQINAIHEELVDRFGLPEQPVKTLIESHHLRLMAKELGIDAIDAAGEAVTVTFGKNNNVDPTEIILLIQNDKKYRLAGADKLRFTAEMENIEVRINTVKNVLKTLQNRCLPK

SEQ ID NO: 35728 - protein, 134 aa, Neisseria meningitidis
MTAQPCPICTAQDEDILLQTPKLRVIAVHKDSGSPAFCRVIWRKHIAEMTDLSAAERGELMEMVYKVEAAMRQVFQPAKINLASLGNVVPHLHWHIIARFENDASFPAPIWANPVRKHGMTLPQDWTEQLKKLL

SEQ ID NO: 35729 - protein, 258 aa, Neisseria meningitidis; identical to SEQ ID NO: 5438

SEQ ID NO: 35730 - protein, 365 aa, Neisseria meningitidis; identical to SEQ ID NO: 27100

SEQ ID NO: 35731 - protein, 212 aa, Neisseria meningitidis; identical to SEQ ID NO: 3448

SEQ ID NO: 35732 - protein, 134 aa, Neisseria meningitidis; identical to SEQ ID NO: 6040

SEQ ID NO: 35733 - protein, 418 aa, Neisseria meningitidis
VANKLRNYTINFGPQHPAAHGVLRMILELDGETIVRADPHIGLLHRGTEKLAETKTYLQALPYMDRLDYVSMMVNEQAYCLAVEKLAGIDVPIRAQYIRVMFAEVTRILNHLMGIGSHAFDIGAMTAILYAFRDREELMDLYEAVSGARMHAAYFRPGGVYRDLPDFMPKYESSKFRNAKVLKQLNESREGTMLDFIDAFCERFPKNIDTLETLLTDNRIWKQRTVGIGVVSPERAMQKGFTGVMLRGSGVEWDVRKTQPYEVYDKMDFDIPVGVNGDCYDRYLCRMEEMRQSVRIIKQCSEWLRVNPGPVITTNHKFAPPKRTEMKTGMEDLIHHFKLFTEGMHVPEGETYTAVEHPKGEFGVYIISDGANKPYRLKIRAPGFAHLQGMDEMAKGHMLADVVAIIGTQDIVFGEVDR

SEQ ID NO: 35734 - protein, 591 aa, Neisseria meningitidis; identical to SEQ ID NO: 18403

SEQ ID NO: 35735 - protein, 90 aa, Neisseria meningitidis; identical to SEQ ID NO: 18174

SEQ ID NO: 35736 - protein, 487 aa, Neisseria meningitidis; identical to SEQ ID NO: 9402

SEQ ID NO: 35737 - protein, 381 aa, Neisseria meningitidis; identical to SEQ ID NO: 14816

SEQ ID NO: 35738 - protein, 102 aa, Neisseria meningitidis; identical to SEQ ID NO: 18763

SEQ ID NO: 35739 - protein, 378 aa, Neisseria meningitidis; identical to SEQ ID NO: 24648

SEQ ID NO: 35740 - protein, 263 aa, Neisseria meningitidis
MARHPYRRLRPAKSSFPEVGISEEGNIRSLHLGSDTIQSSMNLDHPSELVLSYSRAMMGWLLFTDALPQHITQIGLGGGSFARWIDTYLPDTRQTAVDINPQVIAIARSLFELPFEGEKFEIIEADGAEYIKVFRHNTDVILVDGFDGEQIIDALVEEPFFRDCRNALSSDGIFVTNWWSGDKRYQRFIERLLSVFEGRVLELPAESHGNVAVMAFQSSPKEQNIDKLKKRADKLSNAYGLDFHRMLAGLKASNPNNGKHFHL

SEQ ID NO: 35741 - protein, 219 aa, Neisseria meningitidis; identical to SEQ ID NO: 19810

SEQ ID NO: 35742 - protein, 431 aa, Neisseria meningitidis; identical to SEQ ID NO: 19050

SEQ ID NO: 35743 - protein, 367 aa, Neisseria meningitidis; identical to SEQ ID NO: 6599

SEQ ID NO: 35744 - protein, 391 aa, Neisseria meningitidis; identical to SEQ ID NO: 19115

SEQ ID NO: 35745 - protein, 166 aa, Neisseria meningitidis
MTRLTRAFAAALIGLCCTAGAHADTFQKIGFINTERIYLESKQARKIQKTLDSEFSARQDELQKLQREGLDLERQLAEGKLRNAKKVQAEEKWRGLVAAFRKKQAQFEEDYNLRRNEEFASLQQNANRVIVKIAKQEGYDVILQNVIYVNTQYDVTDSVIKEMNAR

SEQ ID NO: 35746 - protein, 916 aa, Neisseria meningitidis; identical to SEQ ID NO: 4091

SEQ ID NO: 35747 - protein, 142 aa, Neisseria meningitidis; identical to SEQ ID NO: 18752

SEQ ID NO: 35748 - protein, 203 aa, Neisseria meningitidis
MKNNDCFRLKNPQSGMALIEVLVAMLVLTIGILALLSVQLRTVASVREAETQTIVSQITQNLMEGMLMNPTIDSDSNKKNYNLYMGNHHTLSVVDGDFQVGVIKTKTQLAEAQLKRFSYELKNALPDAAAIHYAVCKDSSGNAPTLSGNAFSSNCDNKANGDTLIKVLWVNDSAGDSDISRTNLEVSGDNIVYTYQARVGGRE

SEQ ID NO: 35749 - protein, 335 aa, Neisseria meningitidis; identical to SEQ ID NO: 34561

SEQ ID NO: 35750 - protein, 167 aa, Neisseria meningitidis
MNTLQKGFTLIELMIVIAIVGILAAVALPAYQDYTARAQVSEAILLAEGQKSAVTEYYLNHGIWPGNNSDAGVASSSTIKGKYVKEVTVANGVITATMLSSGVNNEIKGKKLSLWAKRQDGSVKWFCGQPVERTDTATTTDVTAATDNNGINTKHLPSTCRDDSSTG

SEQ ID NO: 35751 - protein, 395 aa, Neisseria meningitidis
MNDLAAQTIQVVNKSDDLVASAIQTANKSIAVYCRYIRSNDVGTTGSHQSGFYIQKHFSDDLFDVVCQKGTNKTISIKINWQDGSVTNSNFKYYGQGTRNEARITGFGKNFEFLSDKYSGSLLVLCRACYKDLLFHAFVLSSDEDIEIFIAETNILPGSLYLPKKQEVEDNLTKLFSLFPNFPKTEEMAVLARENIALNKTNVSNVLKQWVSKEYELFSIFEKREFEIIKSKITDLDSFINFAHSFTNRRKARAGKSLELHLSRIFDEFSLKFETQAKTEGKKKPDFLFPGSEEYHAMDESGNFIFQTEKLTMLGSKTTCKDRWRQVLNEADRIPHKHLFTLQEGISDTQIQEMSDENLTLVVPKESVKTFGTFGKTHVLTLENFIKYIKSQQVS

SEQ ID NO: 35752 - protein, 107 aa, Neisseria meningitidis; identical to SEQ ID NO: 1793

SEQ ID NO: 35753 - protein, 116 aa, Neisseria meningitidis
  misc_feature 112, 113, 114: 'Xaa' is any amino acid
MKQMLLAVGVVAVLAGCGKDAGGYEGYWREKSDKKEGVIAVKKEKGNYFLNKINVFTGKEESLLLSEKDGALSINTGIGEIPIKLSDDGKELYVERRQYVKTDAAMKDKIIXXXHT

SEQ ID NO: 35754 - protein, 311 aa, Neisseria meningitidis; identical to SEQ ID NO: 27754

SEQ ID NO: 35755 - protein, 218 aa, Neisseria meningitidis; identical to SEQ ID NO: 3549

SEQ ID NO: 35756 - protein, 171 aa, Neisseria meningitidis
MKRTKKYPFLTLQRQRFHLNFENASSAAGIPAERDFYRWAWSALKSGYRRADISLILLDEEEARAYNRDYRGKDYATNVLSFALNEGEILPCQVSEKLYGDLIICPQVVLKEAAEQGKTPEQHFAHLTIHGTLHLMGYDHIEDDEAEIMEAEEIRLMRAAGFPNPYQEDGH

SEQ ID NO: 35757 - protein, 808 aa, Neisseria meningitidis; identical to SEQ ID NO: 19292

SEQ ID NO: 35758 - protein, 249 aa, Neisseria meningitidis; identical to SEQ ID NO: 19558

SEQ ID NO: 35759 - protein, 40 aa, Neisseria meningitidis; identical to SEQ ID NO: 1884

SEQ ID NO: 35760 - protein, 176 aa, Neisseria meningitidis; identical to SEQ ID NO: 18023

SEQ ID NO: 35761 - protein, 255 aa, Neisseria meningitidis; identical to SEQ ID NO: 8663

SEQ ID NO: 35762 - protein, 493 aa, Neisseria meningitidis
LATDIPIPDLKRLAGHIAERLDVLAQCESPVYIADILESVLSVIKNVDTGGKRARENFKQILKTEFIYAAAAVLKNKTKWEIPENTRNLDSDIICTYICEVFLKSHLLGNSFPMMRPREVKQMPEPVFDKVLFAEQRARQLEVIRTSKYIFAIAPYYTDDIPFSLRRFLSEDKLYTSYNRYYTAIHIPVRNITQNDALRFANGLKQILSLQSGVSWEIIDMMDRIEENYDKKALPLLFSPFPAQVERTQAIAARLDQFERLLGDTVLDPFYYCLTRMAKGEEDLKYIYIAFRQSFGGIFNSFENFRLLPALWMSRDAENMSDRMNAYISAMEDRRREILSIWQGKPEEEFSRKMVVCLIDLENCLEKHLEQFKPVSESIEACTAKLQEQPSFFNRLMKTNDKLNRQIDVLQKQSAAIHNEAYIEMNTLLYRHREVVSVHNRKADYAEKGKEQIALFPRGLNGITKLPAAVLLPERPYHFDMKEVLHIFSWIPR

SEQ ID NO: 35763 - protein, 107 aa, Neisseria meningitidis; identical to SEQ ID NO: 2236

SEQ ID NO: 35764 - protein, 311 aa, Neisseria meningitidis
MGHNMMTTQKWYEHITNVIIGNTANFNSGCLDSIDYVDERKGVPLAAMQHIFMDVRAAASHAYLFEHDLKKFKQYAYVAGKLGVLLSVNSTDPEPFFFPCDMLNIQNPMFLMLMSDSPQLREFLVRNIDNIANDTEAFVNRYDLNRHMIYNTLLMVEGKQLDRLKQRSEKVLAHPTPSKWLQKRLYDYRFFLAFAEQDAEAMKAALEPLFDKKTARMAAKETLSYFDFYLQPQIVTYAKIASMHGFDLGIDHEIAPRDLIVYDPLPADEYQDIFDFMKQYDLSYPYEYLQDWIDYYTFKTDKLVFGNAKRE

SEQ ID NO: 35765 - protein, 199 aa, Neisseria meningitidis; identical to SEQ ID NO: 2002

SEQ ID NO: 35766 - protein, 572 aa, Neisseria meningitidis
MNLHQTVEREAAAAFAAAGIAGSPVVLQPTKNAEHGDFQINGVMGAAKKAKQNPRELAQKIADALAGNAVIESAEVAGPGFINLRLRPEFLAQNIQTALNDARFGVAKTDKPQTVVIDYSSPNLAKEMHVGHLRSSIIGDSISRVSEFMGNTVIRQNHVGDWGTQFGMLVAYLVEQQKDNAAFELADLEQFYRAAKVRFDEDPAFADTAREYVVKLQGGDETVLALWKQFVDISLSHAQAVYDTLGLKLRPEDVAGESKYNDDLQPVVDDLVQKGLAVEDDGAKVVFLDEFKNKEGEPAAFIVQKQGGGFLYASTDLACLRYRVGTLHADRLLYVVDHRQALHFEQLFTTSRKAGYLPENVGAAFVGFGTMMGKDGKPFKTRSGDTVKLVDLLTEAVERATALVKEKNPELGADEAAKIGKTVGIGSIKYADLSKNRTSDYVFDWDAMLSFEGNTAPYLQYAYTRVQSVFRKAGEWDANAPTVLTEPLEKQLAAELLKFEDVLQSVADTAYPHYLAAYLYQIATLFSRFYEACPILKAEGASRNSRLQLAKLTGDTLKQGLDLLGIDVLDVM

SEQ ID NO: 35767 - protein, 136 aa, Neisseria meningitidis
VKLLANNWQPIAIIALVGTGLAVSHHQGYKSAFAKQQAVIDKMEKDKAQALLLSAQNYARELEQARAEAKKYEVKAHAVGMALAKKQAEVSRLKTENKKEIENVLTQDRKNAGGGCIDGFGHHGLQLYKRALGYGN

SEQ ID NO: 35768 - protein, 63 aa, Neisseria meningitidis; identical to SEQ ID NO: 7354

SEQ ID NO: 35769 - protein, 618 aa, Neisseria meningitidis
MLNKIFSWFESRIDPYPEAAPKTPEKGLWRFIWSNMAGVRKWIAALAALTAGIGIMEALVFQFMGKIVEWLGKYAPAELFAEKGWELAAMAAMMVFSVVWAFAASNVRLQTLQGVFPMRLRWNFHRLMLNQSLGFYQDEFAGRVSAKVMQTALALRDAVMTVADMVVYVSVYFITSGVILASLDSWLLLPFIGWIVGFASVMRLLIPKLGQTAAWQADARSLMTGRITDAYSNIATVKLFSHGAREAAYAKQSMEEFMVTVRAQMRLATLLHSCSFIVNTSLTLSTAALGIWLWHNGQVGVGAVATATAMALRVNGLSQYIMWESARLFENIGTVGDGMATLSKPHTILDKPNALPLKVSQGEIKFEHVDFSYEAGKPLLNGFNLTIRPGEKVGLIGRSGAGKSTIVNLLLRFYEPQSGTVSIDGQDISGVTQESLRAQIGLVTQDTSLLHRSVRDNIIYGRPDATDAEMVSAAERAEAAGFIPELSDAKGRRGYDAHVGERGVKLSGGQRQRIAIARVMLKDAPILLLDEATSALDSEVEAAIQESLDKMMDGKTVIAIAHRLSTIAAMDRLVVLDKGRIIEEGTHAELLEKRGLYAKLWAHQSGGFLNEHVEWQHD

SEQ ID NO: 35770 - protein, 78 aa, Neisseria meningitidis
  misc_feature 2, 3: 'Xaa' is any amino acid
VXXATAAFWFWVNGISGRLKEADKRIDDLKEELHAVKLSYHTKADAKADSTNIAAALERIENKLEKVNEKLDRKADKS

SEQ ID NO: 35771 - protein, 107 aa, Neisseria meningitidis; identical to SEQ ID NO: 2106

SEQ ID NO: 35772 - protein, 296 aa, Neisseria meningitidis; identical to SEQ ID NO: 6580

SEQ ID NO: 35773 - protein, 346 aa, Neisseria meningitidis; identical to SEQ ID NO: 18466

SEQ ID NO: 35774 - protein, 766 aa, Neisseria meningitidis
MHRPTAKQILHEVFGYPEFRGRQEAVINTLAGGGSLTVLMPTGGGKSLCYQIPALMCEGVAVVVSPLIALMNDQVANLHAAGIEAAAVNSGTSADGAREIADKLAQGRLKLLYVAPERLVTDRFLRFLDQQTVSLFAIDEAHCVSQWGHDFRPEYQQLGILAERYPNVPRIALTATADAATRADIKHYLHLDNAPEFVSSFDRPNIYYQVIEKNNGKKQLLDFIRKEMTGQSGIVYCLSRKKVEDVAQFLRENGLNAIPYHAGLSMDVREENQRRFTHEDNIIVVATVAFGMGIDKPDVRFVAHLDMPQSVEHFYQESGRAGRDGLPAASWLCYGLNDWVLLRERIAEGNSDEVQKQIEMQKLDAMLSVCETAACRRVLLLKHFGEESEPCGHCDNCLHPPVRFDGTVLVQKLLSCVYRAGQRFAAGYITNLLRGKSDDWIRGNRHEQLSTFGIGTELSDKEWRSVIRQCISLGYLTVNITRYQALQLTEAAKKVLKGETEVMLRPLKRDKPAARTLKDNWLRTEREERLWQALRVWRMKQAEAEVIPAYMIFGDKTLRDLVEKMPQDLNGLHDIYGLGEAKIDRFGHGILEVCRNTADFSHNAVIRPQTEREQQLRQKLEAWRYEQARAENCALHAVLSDESLADMLADTPETETDLEGVHGLGSVRAAKYGRDILAVCRPFSDGIDEAAKHKRRLMRALIQWCNETAKHEQSEPYRILSKAALRAIAAKQPEGLAELAAVYGVGEEKAARYGAAVLAVLERNAV

SEQ ID NO: 35775 - protein, 178 aa, Neisseria meningitidis; identical to SEQ ID NO: 2748

SEQ ID NO: 35776 - protein, 167 aa, Neisseria meningitidis; identical to SEQ ID NO: 189

SEQ ID NO: 35777 - protein, 54 aa, Neisseria meningitidis; identical to SEQ ID NO: 25649

SEQ ID NO: 35778 - protein, 196 aa, Neisseria meningitidis; identical to SEQ ID NO: 259

SEQ ID NO: 35779 - protein, 922 aa, Neisseria meningitidis
  misc_feature 2, 3, 4: 'Xaa' is any amino acid
VXXXGFFGNPDAVDEKWKQYFTDLSKQPGTVAVDVAHTPIRESFVTLAKKKIASAVAGGADEAMLKKQVSVLRLISAYRIQGVGAAQLDPLKRIPPRDIEALDPKFHGLSDADMTLQFNMGEGDFANRGKLPLSQIISNLKQTYCGHIALEYIYIPNTEERRWVRNYFESVLSTPHYNADQKRRILKEMTAAETLERYLHTKYVGQKRFGVEGGESAIAGLNYLIQNASKDGVEEVIIGMAHRGRLNVLVNILGKKPGDLFAEFEGRAEIKLPSGDVKYHMGFSSDIATPHGPMHVSLAFNPSHLEIVNPVVEGSARAKQKRLGENGRDKVLPVLIHGDSAFIGLGVNQATFNLSKTRGYTTGGTVHIVINNQIGFTTSDIRDTRSTVHCTDIAKMVSAPVIHVNGDDPERVCFAIQAALDYRKKFHKDIVIDVVCYRKWGHNEGDDPTLTQPMMYKKVSQHPGARALYTEQLIAEGVVTQAEADGYIQAYRDALDKGEHVEQTTLSNFQRTQIDWSKYQGKDWREHIETGLPAADIERLTEKFTAVPEGFALHPTAKRVIEARKAMASGKQAIDWGMAETLAYASLVTKGHGVRISGEDSGRGTFSHRHAVLHDQKREKWDDGTYVPLRHMGEGMGEFLVIDSILNEEAVMAFEYGFACSAPDKLTIWEAQFGDFANGAQVTIDQFLSSGETKWGRLCGLTTILPHGYDGQGPEHSSARVERWLQLCSENNMQVIMPSEASQMFHLLQRQVLGSYRKPLVIFMSKRLLRFKGAMSPLENFTEGSTFRPVIGDTAERASNGSVKRVVLCAGQVYYDLEAGRTERKLEDDVAIVRVEQLYPFPYEEVKAELAKYPNAKSVVWAQEEPKNQGAFYQIRHRIEDVISEEQKLSYAGRPSSASPAVGYSSKHIAQLKQLVEDALAL

SEQ ID NO: 35780 - protein, 194 aa, Neisseria meningitidis; identical to SEQ ID NO: 2490

SEQ ID NO: 35781 - protein, 398 aa, Neisseria meningitidis; identical to SEQ ID NO: 33533

SEQ ID NO: 35782 - protein, 175 aa, Neisseria meningitidis
LAEGQKSAVTEYYLNHGEWPGNNSDAGVASSSTIKGKYVKEVTVANGVITATMLSSGVNNEIKGKKLSLWAKRQDGSVKWFCGQPVERTDTATTTDVTAATGKTTDNINTKHLPSTCRDDSSTGCIETPRADFKYFQKISRYRVLPESRHMARQQQFCRRGILPLRHQRQICSES

SEQ ID NO: 35783 - protein, 248 aa, Neisseria meningitidis; identical to SEQ ID NO: 639

SEQ ID NO: 35784 - protein, 232 aa, Neisseria meningitidis; identical to SEQ ID NO: 1935

SEQ ID NO: 35785 - protein, 752 aa, Neisseria meningitidis
MYTRIMEISPWTLRSAKLEKEHKRLQESLTSLGNGYMGMRGSFEETYSADSHLGTYIAGVWFPDKTRVGWWKNGYPKYFGKAINALNFSKVKIFVDGQEVDLAKNDVAGFSVELDMQHGVLRRSFTVFGVRFNVCKFLSVAQKELAVIRWEAVSVDGKTHQIRIDSIIDADVKNEDSNYEEKFWQVLDKGVSDGLSYIAAQTVANPFGVEQFIVNAEQTFAGSFKALGGSQTDWQVSNSFEAEVGGTPETFEKRVIVTTSRDYQGLEAVKAAGRALSEKIAGVAFETLLDAHKAGWLHRWEIADVVIEGSDEAQQGIRFNLFQLFSTYYGEDARLNIGPKGFTGEKYGGATYWDTEAYAVPLYLALAEPEVTRNLLQYRRNQLPQAQHNAREQGLAGALYPMVTFTGIECHNEWEITFEEIHRNGAIPYAIYNYTNYTGDESYLAKEGLEVLVEVSRFWADRVHFSKRNGKYMIHGVTGPNEYENNINNNWYTNTLAAWVLDYTREALAKYPRPDLNVSAAELEKWADISANMYRPHDEELGVFVQHDGFLDKDIRPVSALSPDDLPLNQKWSWDKILRSPFIKQADVLQGIYFFGDRFNIDEKRRNFDFYEPITVHESSLSPCIHAILAAELGKEEKAVEMYQRTARLDLDNYNNDTEDGLHITSMTGSWLAIVQGFAQMKTWGGKLSFAPFLPSAWTGYAFHINYRGRLIKVAVGKENVVFTLLKGEPLDLQVYGKDITLNGSHTAALEK

SEQ ID NO: 35786 - protein, 249 aa, Neisseria meningitidis
MKALVAVKRVVDYNVKVRVKADGSDVDIGNVKMSMNPFDEIAVEEAVRLKEAGKVSEIVAVSLGEKKCEETLRTALAMGADRAIHVETDAKLEPLAVAKLLKAVADKENPQIFFLGKQAIDYDANQVAQMLAALLNAAQGTFASKVQIEGDEVQIVREIDGGEETIALKLPAVISADLRLNEPRFVKLPNIMAAKKKPLEKLAPADLATDILPRLKTVKFAEPKARQAGVKVASVAELVEKLKNEAKVI

SEQ ID NO: 35787 - protein, 116 aa, Neisseria meningitidis; identical to SEQ ID NO: 5541

SEQ ID NO: 35788 - protein, 336 aa, Neisseria meningitidis
MNDNTQTLPPRRLSVAPMLDWTDRHYRYMARQITRNAWLYSEMVNAGAIVYGDKDRFLMFNEGEQPVALQLGGSDPSDLAKAAKAAEEYGYNEVNLNCGCPSPRVQKGSFGACLMNEVGLVADCLNAMQDAVGIPVTVKHRIGVDRQTEYQTVADFVGTLRDKTACKTFIVHARNAWLDGLSPKENRDVPPLKYDYVYRLKQEFPDLEIIINGGITTNEAIAGHLQHVDGVMVGREAYHNPMVMHEWDRLFYGDTRSPIEYSDLVQRLYTYSQAQIQAGRGTILRHIVRHSLGLMHGLKNARTWRRMLSDATLLKDNDGSLILEAWKEVERANMRE

SEQ ID NO: 35789 - protein, 306 aa, Neisseria meningitidis
MTNKPAKRPVNGVLLLDKPEGLSSNTALQKARRLFRAEKAGHTGVLDPLATGLLPVCFGEAAKFAQYLIDADKAYTATLKLGEASSTGDAEGEIVATARADISLAEFQTTCQALTGNIRQVPPMFSALKHEGKPLYEYARKGIVIERKPRDITVYAIDIAEFDSPKAVIDVRCSKGTYIRTLSEDIAKHIGTFAHLTALRRTETAGFTITQSHTLEALANLDETRRDSLLLPCDVLVSHFPQTVLNDYAVHMLRCGQRPRFDEDLPSDTPVRVYTENGRFVGLAEYQKEICRLKALRLMNTAVSAV

SEQ ID NO: 35790 - protein, 329 aa, Neisseria meningitidis; identical to SEQ ID NO: 30683

SEQ ID NO: 35791 - protein, 497 aa, Neisseria meningitidis; identical to SEQ ID NO: 1619

SEQ ID NO: 35792 - protein, 205 aa, Neisseria meningitidis
MFALLEAFFVEYGYAAVFFVLVICGFGVPIPEDLTLVTGGVISGMGYTNPHIMFAVGMLGVLVGDGIMFAAGRIWGQKILRFKPIARIMTPKRYEQVQEKFDKYGNWVLFVARFLPGLRTAVFVTAGISRKVSYLRFIIMDGLAALISVPIWIYLGEYGAHNIDWLMAKMHSLQSGIFVILGIGATVVAWIWWKKRQRIQFYRSK

SEQ ID NO: 35793 - protein, 336 aa, Neisseria meningitidis
MSKKRVLTGVTTTGIPHLGNYVGAIRPAVRAAQNLDTESFLFLADYHGIIKCHEPEMIHQSTQAVAATWLACGLDPERTTFYRQSDIPEVMELNWILTCITAKGLMNRAHAYKAAVQANAENNQEDPDFGVEMGLFSYPILMTADILMFNANEVPVGRDQIQHVEMARDIAGRFNHRFREIFTLPEVKIDENVELLVGLDGRKMSKSYGNTIPLWENDKKTQKSVNKIITNMKEPGEPKQPDESPLFEIYKAFSTPSETAAFTQMLAEGLAWGEAKKLLAAKINAELAEPRERYNELTADPSQIEEILQAGAQKARKEARELLDKVRDAVGIRPLK

SEQ ID NO: 35794 - protein, 76 aa, Neisseria meningitidis; identical to SEQ ID NO: 34526

SEQ ID NO: 35795 - protein, 456 aa, Neisseria meningitidis; identical to SEQ ID NO: 18053

SEQ ID NO: 35796 - protein, 492 aa, Neisseria meningitidis
MFSKLTPLAETGIPTLSCANAAGRLLHSDSRQIKQGDIFVACPGEYADGRSYIPAAVANGAAFVFWDDDGKFAWNPEWKVPNQGIKDLKHRAGILAAQVYGNVSDGLKVWGVTGTNGKTSITQWLAQAADLLGEKTAIVGTVGNGFWGALEETTHTTPAPVDVQTLLYRFRQQGATVAAMEVSSHGLDQSRVNGVSFRSAIFTNLTRDHLDYHGTMEAYGAIKSRLFYWHGLKHAVINVDDEYGAELAGRLKKDCPDLAVYSYGFSEHADIRITDFTASSDGIAAVFQTLWGEGKCRTRLLGRFNAQNLAACIALLCANGYPLDNVLDVLAKIRPASGRMDCIMNSGKPLVVVDYAHTPDALEKALATLQEIKPQGAALWCVFGCGGNRDRGKRPLMGAAAVQGADKVVVTSDNPRLENPHDIINDILPAVPAPECVEADRAAAIRYAVEQAAANDIILIAGKGHENYQDVQGVKHRFSDLEIVGQALLTRK

SEQ ID NO: 35797 - protein, 51 aa, Neisseria meningitidis; identical to SEQ ID NO: 3530

SEQ ID NO: 35798 - protein, 291 aa, Neisseria meningitidis; identical to SEQ ID NO: 18797

SEQ ID NO: 35799 - protein, 42 aa, Neisseria meningitidis; identical to SEQ ID NO: 6907

SEQ ID NO: 35800 - protein, 81 aa, Neisseria meningitidis; identical to SEQ ID NO: 25086

SEQ ID NO: 35801 - protein, 695 aa, Neisseria meningitidis
MDYLSRLSFGFNKKLPVILQTEVAECGLACLTSILSYYGFHTDLRTLRQKYTLSLKGANLADIMRFGNEMNLTPRALRLELDELSNLQLPCILHWNLNHFVVLCSISKDSIVIMDPAVGMRKIKMDEVSQKFTGIALELFPNTHFEEKKETKKIKILSLLRGISGLKRSLIQMLILAISLEVFALVSPFFMQWVIDHVIVTADKNLLLTLTLGFGLLAILQQLISLLQAWVGMHLSTTLNLQWKANIFKRLLDLPNDYFSKRHLGDVISRFGSIDHIQETLTSTFFVLVLNSLMAVFTFVLMTIYSTQLSLIVLLTLVLYILIRWLAYYPLRNATEENIVHEAKQNSYFMETIRGIQSVKLFDKHYQRHGTWMSLFVSTVNTKLTTDKLSALFEFSNKLLFSMENIIIIYLGASAILDGSFTVGVLMAFLAYKGQFESRTASLVDQYIQIKMLGLHAERLADITLNETETEIIKYNHIPKLDNEQLVLKVENVSFRYADNEPYLFENINLEFKDNEAVVLTGQSGRGKSTLLNILTGSLKPETGTVSINGHDIYQVSPSFIRGLSGIVRQDDVLFAGSIGENISFFDESPNMELIEQCAKMAQIHDDILKMPMGYETLIGDMGNILSGGQKQRVILARALYKRPKILFLDEASSHLDVENEQKINHNLKSLGIMKIMVAHRQETIQSADKILNLG

SEQ ID NO: 35802 - protein, 328 aa, Neisseria meningitidis
MKNFLSLFASILMSALIAVWFSQNLINAYWQQTYHRNSPLEPLAAYGWWRSGAALQENAYTLSDGIKAFLSGETPPTAQDGGSADMPPEAAASEAVPQTGEIQEWKQNTDTAAVRSGDKVFFAGDSLMQGVAPFVQKSLKQQYGIESVNLSKQSTGLSYPSFFDWPKTIEETLQKHPEISVLAVFLGPNDPWDFPVGKHYLKFAADEWAQEYLKRTDRILEAARAHHVQVVWLGIPYMKKAKLDGQMRYLDKLLSEHLEGKIILIPTAHTLSGGEDRYTDSVNVNGKPVRYRSKDGIHFTAEGQKLLAAKIMEKIVFEPSTQPSSTQP

SEQ ID NO: 35803 - protein, 263 aa, Neisseria meningitidis; identical to SEQ ID NO: 14166

SEQ ID NO: 35804 - protein, 154 aa, Neisseria meningitidis; identical to SEQ ID NO: 2010

SEQ ID NO: 35805 - protein, 737 aa, Neisseria meningitidis
MTAISPIQDTQSATPQELREWFDSYCAALPDNDKNLIGTAWSLAQENYPADAATPYGEPLSDHFLGAAQIVHELDLLPDAVAATLLADIGRYVPDWNLLVSERCNSTVAELVKGVDEVQKLTHFARVDSLATPEERAQQAETMRKMLLAMVTDIRVVLIKLAMRTRTLQFLSNAPDSPEKRAVAKETLDIFAPLANRLGVWQLKWQLEDLGFRHQEPEKYREIALLLDEKRTERLEYIENFLNILRTELKKYNIHFEVAGRPKHIYSIYKKMVKKKLSFDGLFDIRAVRILVDTVPECYTTLGIVHSLWQPIPGEFDDYIANPKGNGYKSLHTVIVGPEDKGVEVQIRTFDMHQFNEFGVAAHWRYKEGGKGDSAYEQKIAWLRQLLDWRENMAESGKEDLAAAFKTELFNDTIYVLTPHGKVLSLPTGATPIDFAYALHSSIGDRCRGAKVEGQIVPLSTPLENGQRVEIITAKEGHPSVNWLYEGWVKSNKAIGKIRAYIRQQNADTVREEGRVQLDKQLAKLTPKPNLQELAENLGYKKPEDLYTAVGQGEISNRAIQKACGTLNEPPPVPVSETTIVKQSKIKKGGKNGVLIDGEDGLMTTLAKCCKPAPPDDIVGFVTRDRGISVHRKTCPSFRHLAEHAPEKVLDASWAALQEGQVFAVDIEIRAQDRSGLLRDVSDALARHKLNVTAVQTQSRDLEASMRFTLEVKQVNDLPRVLASLGDVKGVLSVTRL

SEQ ID NO: 35806 - protein, 166 aa, Neisseria meningitidis; identical to SEQ ID NO: 1240

SEQ ID NO: 35807 - protein, 140 aa, Neisseria meningitidis; identical to SEQ ID NO: 1135

SEQ ID NO: 35808 - protein, 130 aa, Neisseria meningitidis
  misc_feature 124, 125: 'Xaa' is any amino acid
VDEKQKIKILDFQIDLSSIFNSYKNQMGINIQDKNLKNNFCSFMEELLNDGSIRLHDYTDGIGIPLTGTSKEQVQKLKDIWPTLEDAQAIWPEDPWYYLEWLWWDIACPIDLADLPNIDIYEQXXTHLIN

SEQ ID NO: 35809 - protein, 199 aa, Neisseria meningitidis; identical to SEQ ID NO: 3649

SEQ ID NO: 35810 - protein, 841 aa, Neisseria meningitidis
MNPNSKHNTNLTNLLKPSDSDIKQFAAQHIRHLTDLLNRYAYEYYTLDAPSVPDAEYDKLFRELEALERNHPELKLPDSPTQRVGGEPLAGFAEVRHEVPMLSLTNAFSPQDENGVFDHAEMYAFDQRVRDGLDGGNPEYVIEPKFDGLAISLLYRDGVLIQAATRGDGTTGEDVTQNIKTVSNIPLRLHGENTPELIEVRGEVLMQKADFAALNKRQAENGQKPFANPRNAAAGSLRQLDSRITAQRKLHFFPYSVARQQGGFVAEEHIQELAYFQALGFSLPNGNFGCFKNIDEVLAFYGHMQQKRPELPYEIDGMVVKVNSLAQQHELGFISRAPRWAVAHKFPAEEALTIVEAIDVQIGRTGAVTPVARLQPVFVGGVTVTNATLHNQDEVSRKDVRVGDTVVVRRAGDVIPEVVRVIFERRPMQETAVAVSDGIGHRQDDLFAEAPAANQTQSVPLYKPYRLPTHCPICRSEIEREEGEAVARCSGGMLCQAQRAQGLIHFASRKAMDIDGLGEKQIEQLVAQDLVRHFADLYRLDIPTLQKMKETADKTVAESDQMPSEGSSVGASGKHKKQPTKWAENILAGIESGKTPELARFLFALGIRHVGERTAKTLAQAFGTLERVRRAPEPVLACLPDIGTVVAHSIAHFFAQAEQQAMIDELLAAGVAPQTQAVTIPPARHAEPQRWIARLPDFKISENKAQALWELAGKNIEGLQNDKALPADWQAWRSEPQNAALLENLKTFFAQMPSEDEAAQGSDGINKAVAGKTFVLTGTLPTLKRDQAQSLIEAAGGKVSGSVSKKTDYVVAGEAAGSKLEKANALGVSVLSEAELLTLLG

SEQ ID NO: 35811 - protein, 658 aa, Neisseria meningitidis; identical to SEQ ID NO: 25350

SEQ ID NO: 35812 - protein, 118 aa, Neisseria meningitidis
MNEHNLLIFCLKDNVSISEYTEMIDWAYKNIQSETVVEITENQIIEYQNRGLWRLVSEITDNWLFGPSEGDWLIDKESILAVKEKLQNSDFSTESLVKNIIHALEYAIKNEKTVIFHF

SEQ ID NO: 35813 - protein, 298 aa, Neisseria meningitidis; identical to SEQ ID NO: 5738

SEQ ID NO: 35814 - protein, 240 aa, Neisseria meningitidis
MDKDLYAVLGVSPQAGVDEIKRAYRKLAMKYHPDRNPGNPQAEEKFKEIQRAYDTLSDLSKRMQYDASFRRHEERGRQEEAFRREQARREQFYREQMRREQAFRQAFERQASRSCHTYEPSGGGSGRNYVLAAYILFGLGAIMLFMPIVGVIFAYMPIVGVILAYMKRNSLDSIVYAAHTEYLIKTFWRTFWLYILGALTALLGIGVLIIIATNVWYFYRIIAGFIRFNGGRAVAPEKWI

SEQ ID NO: 35815 - protein, 143 aa, Neisseria meningitidis; identical to SEQ ID NO: 303

SEQ ID NO: 35816 - protein, 256 aa, Neisseria meningitidis; identical to SEQ ID NO: 18157

SEQ ID NO: 35817 - protein, 817 aa, Neisseria meningitidis
LVELLAHRVPPGVDDAAKVKASFLAAVAEGSASSPLISPEYATELLGTMLGGYNIHALIELLDDDKLAPIAAKGLKHTLLMFDSFHDVQEKAEKGNKYAQEVLQSWADAEWFASRAKVPEKITVTVFKVDGETNTDDLSPAPDAWSRPDIPLHALAMLKNPRDGITPDKPGEVGPIKLLEELKAKGHPVAYVGDVVGTGSSRKSATNSVIWHTGEDIPFVPNKRFGGVCLGGKIAPIFFNTQEDSGALPIEVDVSALKMGDVVDILPYEGKIVKNGETVAEFELKSQVLLDEVQAGGRINLIIGRGLTAKAREALKLPASTAFRLPQAPAESKAGFTLAQKMVGRACGLPEGQGVRPGTYCEPRMTTVGSQDTTGPMTRDELKDLACLGFSADMVMQSFCHTAAYPKPVDVKTHKELPAFISTRGGVSLRPGDGVIHSWLNRLLLPDTVGTGGDSHTRFPIGISFPAGSGLVAFAAATGVMPLDMPESVLVRFSGKLQPGVTLRDLVNAIPLYAIKQGLLTVAKAGKKNIFSGRILEIEGLPDLKVEQAFELTDASAERSAAGCTVKLNKEPIIEYMKSNVVLMKNMIANGYQDPRTLERRIKAMEKWLANPELLEADKDAEYAAVIEINMDDIKEPIIACPNDPDDVCFMSERSGTKIDEVFIGSCMTNIGHFRAASKLLEGKADTPVRLWIAPPTKMDAKQLSDEGHYGVLGRAGARMEMPGCSLCMGNQAQVREGATVMSTSTRNFPNRLGKNTFVYLGSAELAAICSKLGKIPTVEEYQANIGIINEQGDKIYRYMNFNEIDSYNEVAETVNV

SEQ ID NO: 35818 - protein, 170 aa, Neisseria meningitidis
MKNFNGKLILIGLMGAGKTTLGRQMAQRLDYRFYDSDHEIAVAAGVPIPTIFEMEGEQGFRSRETAILKKLVILPHIVLSTGGGAVLKEENRALIRKSGTVVYLHAPPETLLERTRCDNSRPLLQVADPLAKLRELYAARDPVYRQTADFTVESANCRETVQTLLKRLSR

SEQ ID NO: 35819 - protein, 436 aa, Neisseria meningitidis; identical to SEQ ID NO: 18294

SEQ ID NO: 35820 - protein, 436 aa, Neisseria meningitidis; identical to SEQ ID NO: 7620

SEQ ID NO: 35821 - protein, 106 aa, Neisseria meningitidis; identical to SEQ ID NO: 3331

SEQ ID NO: 35822 - protein, 109 aa, Neisseria meningitidis
MDVQKQYSFETVAVCVLPNHIHAIWTLPPDDADYSLLRRLIKTKFSAYSPYTKNLSAGKQRQHERGIWQRRFYGHTVRDETDLQRCADYIHSNPIKQKMSRAKTESCKK

SEQ ID NO: 35823 - protein, 456 aa, Neisseria meningitidis
MLDNLTSRFSNVLKNIRGQAKLTEDNIKEALREVRLALLEADVALPVVKEFVNNVKEKALGQEVAGSLTPDQAFIGVVNQALVELMGKENKTLDLSVAPPAVVLMAGLQGAGKTTTVGKLARLLKNDQKKKVLVVSADVYRPAAIEQLRLLAEQVGVDFFPSDTNQKPVEIATAAVDYAKKHFYDVLMVDTAGRLAIDEEMMNEIKALHAAVNPVETLFVIDAMLGQDAVNTAQAFNEALPLTGVVLTKMDGDSRGGAALSVRHVTGKPIKFIGVGEKINGLEPFHPDRLASRILGMGDVLTLIEDVQKGIDEEAAAKMAKKLHKGKGFDLNDFKEQIQQMRNMGGLENLMSKMPGELGQISKQIPEGTAEKAMGKVEAIINSMTPKERANPALLKASRKRRIAMGAGTTVQEVNKLLKQFEQMQQMMKMFSGNGLGKLMRMAKGMRGIKGMFPGL

SEQ ID NO: 35824 - protein, 92 aa, Neisseria meningitidis; identical to SEQ ID NO: 32

SEQ ID NO: 35825 - protein, 311 aa, Neisseria meningitidis; identical to SEQ ID NO: 18238

SEQ ID NO: 35826 - protein, 304 aa, Neisseria meningitidis
MQNFGKVAVLMGGFSSEREISLDSGTAILNALKSKGIDAYAFDPKETPLSELKAQGFQTAFNILHGTYGEDGAVQGALELLGIPYTGSGVAASAIGMDKYRCKLIWQALGLPVPEFAVLHDDTDFDAVEEKLGLPMFVKPAAEGSSVGVVKVKEKGRLKSVYEELKHLQGEIIAERFIGGGEYSCPVLNGKGLPGIHIIPATEFYDYEAKYNRDDTIYQCPSEDLTEAEESLMRELAVRGAQAIGAEGCVRVDFLKDTDGKLYLLEINTLPGMTSHSLVPKSAAVTGVGFADLCIEILKTAHVG

SEQ ID NO: 35827 - protein, 214 aa, Neisseria meningitidis; identical to SEQ ID NO: 18686

SEQ ID NO: 35828 - protein, 668 aa, Neisseria meningitidis
MADMKKITPQNLRPLLSESLGHTDFVNVLNALIKFLRRGGKKCAGERFDLIIDTFKQDRELLSRFSRCFYIWLAQIHIYPALIKLGIFSRHSFAREMGIRIYERFSPSYKDFANLGEVFLYLFHSENDDKWLQTLNIRQWLVLYELIRSHAEPSKLQTAGIRLADARLRAIEMLSVWTASEAIEPDLIRIAPRLLEADSSFVALQRETAKLVEHYRNGTAPYDTAHLEVMFDQCFSQIDYLRRKGTGAGSGSSVKVAHLLERLRQTVGRLKLLTDIQTGVGNSNRLTIALMNSLIYAAVEQYSTRHLRRSSIHMLARSITENKSHHGEHYITRNRKEYFKMFYSAAGGGIIIALMALLKIRIGSLGLSPFLTSLSAGFNYGIGFMIIHMLHCTVATKQPAMTAASFAEQVDLNEGGKAVDNKLAKLLIDVCRSQSVAVFGNVSIAILLACAISFGYAHLYRLPILDAHTAAYQFKSIDIIAYPTLWYAAIAGLWLFCSGIIAGFFDNRADYLNLRQRLPFNPLLRKIMRPGPRRVLAAYIHKHYGSLVGNFIFGMLLGMTGYFGHLLGLPLDIRHVAFSSANLGYAAVSGNVGLGTFVLGIFSVLTIGLVNLCVSFSLALFVALRSRGTKIGSIRNLIKSFWNQIKSNPCILFLPPAKEQGHPPSDKP

SEQ ID NO: 35829 - protein, 462 aa, Neisseria meningitidis; identical to SEQ ID NO: 6381

SEQ ID NO: 35830 - protein, 343 aa, Neisseria meningitidis; identical to SEQ ID NO: 31347

SEQ ID NO: 35831 - protein, 414 aa, Neisseria meningitidis
MSNENRTCSFCGKSKSHVKHLIEGENAFICDECVSNCIEILHEDGNDGTSSESVGQTSEEPGKLPTPAEIVANLNDHVIGQEQAKKALAVSVYNHYKRLRHPKAGANVELSKSNILLIGPTGSGKTLLAQSLARKLDVPFVMADATTLTEAGYVGEDVEQIITKLLGKCDFDVEKAQRGIVYIDEIDKISRKSDNPSITRDVSGEGVQQALLKLIEGTVASVPPQGGRKHPNQEFINVDTTNILFICGGAFAGLEKVIRQRTEKGGIGFGASVHSKDENADITKLFGIVEPEDLIKFGLIPELIGRLPVIATLEELDEDALINILTEPKNALVKQYQALFGMENVELEFEEGALRSIARQAMERKTGARGLRSIVERCLLDTMYRLPDLQGLKKVVVGKAVIEEGREPELVFES

SEQ ID NO: 35832 - protein, 261 aa, Neisseria meningitidis
MKQTLKNWFAALLLAVPMSAAVASGGGHYEKVDIDLRDQVSLQHGAQIFTNYCLSCHSASGMRFNRLKDIGLTDEEIKKNLMFTTDNVGDVMHSAMNPKDAAKWFGAAPPDLTLIARSKGADYLYAYMRGFYKDPTRPSGWNNTVFDKVGMPHPLWEQQGVQAVELDAKGQPVMVKDEHGEMKPKLYWESTGLHSRRLPNGKVIQKEYDAYVRDLVNYLVYMGEPAQLQRKRIGYVVMIFLFAVMLPLAYFLNKEFSKDIH

SEQ ID NO: 35833 - protein, 263 aa, Neisseria meningitidis; identical to SEQ ID NO: 18499

SEQ ID NO: 35834 - protein, 463 aa, Neisseria meningitidis
MSGQLGKGADAPDLVYGLEDRPPFGNALLSAVTHLLAIFVPMITPALIVGGALELPVEMTAYLVSMAMVASGVGTYLQVNRFGPVGSGMLSIQSVNFSFVTVMIALGAGMKEGGLTKDAMISTLLGVSFVGAFLVCFSAWLLPYLKKVITPTVSGVVVMLIGLSLVHVGITDFGGGFGAKADGTFGSMENLGLASLVLLIVLIFNCMKNPLLRMSGIAVGLIAGYIVALFLGKVDFSALQNLPLVTLPVPFKYGFAFDWHAFIVAGAIFLLSVFEAVGDLTATAMVSDQPIEGEEYTKRLRGGVLADGLVSVIATALGSLPLTTFAQNNGVIQMTGVASRHVGKYIAVILVLLGLFPVVGHAFTTIPSPVLGGAMVLMFGLIAIAGVRILVSHGIRRREAVIAATSVGLGLGVAFEPEVFKNLPVLFQNSISAGGITAVLLNLVLPEDKTEAAVKFDTDHLEH

SEQ ID NO: 35835 - protein, 333 aa, Neisseria meningitidis
  misc_feature 329, 330, 331: 'Xaa' is any amino acid
MNFPKTAASLLLLLASLAAHALDTGRIPQNEIAVYVQELDSGKVIIDHRSDVPVNPASTMKLVTAFAAFKTFGSNYRWATEFKSNGTVNDGTLDGNLYWAGSGDPVFNQENLLAVQRQLREQGIRNITGHLMLDHSLWGEVGSPDDFEADSGSPFMTPPNPTMLSAGMVMVRAERNAADSTDILTDPPLSHIFAQNNLKITASQAACPSIKKLMRASFSDNTLKLRGNIPESCLGKPVGVRMFALDELIRQSFTNHWLLGGGRISDGIGIADTPEGAQTLAVAHAKPMKEILTDMNKRSDNLIARSVFLKLGGDGKLPAVSEQAASAVXXXHT

SEQ ID NO: 35836 - protein, 333 aa, Neisseria meningitidis; identical to SEQ ID NO: 31627

SEQ ID NO: 35837 - protein, 157 aa, Neisseria meningitidis
  misc_feature 2, 3: 'Xaa' is any amino acid
VXXDAGKLTRQRIERLDNQTDGENVDALRRELQRSVQLHAGVFRTDEILSKGVREVMAIAERVKRTEIKDKSKVWNTARIEALELDNLIEVAKATLVSAEARKESRGAHASDDHPERDDENWMKHTLYHSDTNTLSYKPVHTKPLSVEYIKPAKRVY

SEQ ID NO: 35838 - protein, 156 aa, Neisseria meningitidis
MYDVNTHDVRRFFARVWQQRLNPLQLSALEQKALRIIEAHPEYHRYLERIEDHLDTDWLPENGESNPFLHISLHLSVQEQAGIDQPHGIRAIHDTLCAKRGWLEAEHEMMEALAETLWTAQRYGTGLDVNFYMTRLRKLIGLGAEDQARLNPHKIA

SEQ ID NO: 35839 - protein, 462 aa, Neisseria meningitidis; identical to SEQ ID NO: 10292

SEQ ID NO: 35840 - protein, 302 aa, Neisseria meningitidis
MNTPQSAIIPDHAQAGIFIEADFAANRLNDIKSACRASLDALSALKTRFPDDILGLTIAFGSKAWATFGHTDEGSEIKPFSEMGNGLAPSTQHDMSIHIQSFRQNAAYALAQSVLGAFGDSICVASEEHGLRLYQDRGLDGFVDGTENPQGDENVREVAIIPEGKPDAGGSYVLLQKYLHDLKKWDAVPVAEQEASVGRGKETDDEFGHDVRLPDSHLGRVNLKENGVGLKIVRRSLPFGKISGEHGLMFTAYCRTLHNIEAQLLSMFGDTDGKTDLLLRHLSAAVSGGYYYAPSVERLQNL

SEQ ID NO: 35841 - protein, 823 aa, Neisseria meningitidis; identical to SEQ ID NO: 18962

SEQ ID NO: 35842 - protein, 157 aa, Neisseria meningitidis
MLSTESLKQIDIELAKYPADQRRSAIMGALRIAQTEKGWLAPETIAFVADYIGISPAQAYEVATFYNMYDLEPVGKYKLTVCTNLPCALRGGMATGEYLKKKLGIGYGETTPDGKFTLVEGECMGACGDAPVMLLNNHKMCSFMTEEAIEKKLAELE

SEQ ID NO: 35843 - protein, 130 aa, Neisseria meningitidis
MNAQTGAVKLSAISERQNISLSYLEQLFGKLRRAGLVESLRGPGGGYILAAPAARINIAQIIAAAEDRLDATQCGSKANCHHGAPCLTHDLWENLNKTINDYLGSVTLQSIIEQKNNGDGSRVVQFTHIH

SEQ ID NO: 35844 - protein, 180 aa, Neisseria meningitidis; identical to SEQ ID NO: 2298

SEQ ID NO: 35845 - protein, 1389 aa, Neisseria meningitidis
MTDTAPTDTDPTENGTRKMPSEHRPTPPAKKRRPLLKLSAALLSVLILAVCFLSWLAGTESGLRFGLYQIPSWFGVNISSQNLKGTLLDGFDGDNWSIETEGADLKISRFRFAWKPSELMRRSLHITEISAGDIAIVTKPTPPKEERPPLSLPDSIDLPAAVYLDRFETGKISAGKAFDKPTVYLERLDASYRYDIKGHRLDLKAADTPWSNSSGSASVGLKKPFALDTAIYTKGGLEGKTIHSTARLSGSLKDVRAELAIDGGNIRLSGKSVIHPFAESLDKTLEEVLVKGFNINPSAFVPSLPDAGLNFDLTAIPSFSDGIALEGSLDLENTKAGFADRNGIPVRQVLGNFVIRQDGTVHIGNTSAALLGRGGIRLSGKIDTEKDILDLNIGINSVGAEDVLQTAFKGRLDGSIGIGGTTASPKISWQLGIGTARTDGSLAIASDPANGQRKLVLDTVNIAAGQGSLTAQGYLELFKDRLLKLDIRSRAFDPSRIDPQLPAGNINGSINLAGELAKEKFTGKMRFLPGTFNGVPIAGSADIVYESRHLPRAAVDLRLGRNIIKTDGGFGKKGDRLNLNITAPDLSRFGFGLAGSLNVRGHLSGDLDGGIRTFETDLSGAARNLHIGKAADIRSLDFTLKGSPDTSRPIRADIKGSRLSLSGGAAVVDTADLMLDGTGVQHRIRTHAAMTLDGKPFKFDLDASGGINRELTRWKGSIGILDIGGAFNLKLQNRMTLEAGAERVAASAANWQAMGGSLNLQHFSWDKKTGISAKGGAHGLHIAELHNFFKPPFEHNLVLNGDWDVAYGRNARGYLNISRQSGDAVLPGGQALGLNAFSLKTRFQNDRIGILLDGGARFGRINADLDIGNAFGGNMANAPLGGRITASLPDLGTLKPFLPAAAQNITGSLNAAAQIGGRVGSPSVNAAVNGSSNYGKINGNITVGQSRSFDTAPLGGRLNLTVADAEVFRNFLPVGQTVKGSLNAAVTLGGSIADPHLGGSINGDKLYYRNQTQGIILDNGSLRSHIAGRKWVIDSLKFRHEGTAELSGTVGMENSGPDVDIGAVFDKYRILSRPNRRLTVSGNTRLRYSPQKGISVTGMIKTDQGLFGSQKSSMPSVGDDVVVLGEVKKEAAAPLPVNMNLTLDLNDGIRFAGYGADVTIGGKLTLTAQSGGSVRGVGTVRVIKGRYKAYGQDLDITKGTVSFVGPLNDPNLNIRAERRLSPVGAGVEILGSLNSPRITLTANEPMSEKDKLSWLILNRAGSGSSGDNAALSAAAGALLAGQINDRIGLVDDLGFTSKRSRNAQTGELNPAEQVLTVGKQLTGKLYIGYEYSISSAEQSVKLIYRLTRAIQAVARIGSRSSGGELTYTIRFDRFSGSDKKDSAGNSKGK

SEQ ID NO: 35846 - protein, 409 aa, Neisseria meningitidis; identical to SEQ ID NO: 11572

SEQ ID NO: 35847 - protein, 193 aa, Neisseria meningitidis; identical to SEQ ID NO: 1322

SEQ ID NO: 35848 - protein, 354 aa, Neisseria meningitidis
MEKEFRILNIVSAKIWGGGEQYVYDVSKALGLRGCTMFTAVNKNNELMHRRFSEVSSVFTTRLHTLNGLFSLYALTRFIRKNRISHLMIHTGKIAALSILLKKLTGVRLIFVKHNVVANKTDFYHRLIQKNTDRFICVSRLVYDVQTADNPFKEKYRIVHNGIDTGRFPPSQEKPDSRFFTVAYAGRISPEKGLENLIEACVILHRKYPQIRLKLAGDGHPDYMCRLKRDVSASGAEPFVSFEGFTEKLASFYRQSDVVVLPSLVPEAFGLSLCEAMYCRTAVISNTLGAQKEIVEHHQSGILLDRLTPESLADEIERLVLNPEAKNALATAAHQCVAARFTINHTADKLLDAI

SEQ ID NO: 35849 - protein, 507 aa, Neisseria meningitidis; identical to SEQ ID NO: 2566

SEQ ID NO: 35850 - protein, 709 aa, Neisseria meningitidis
MAYQVLARKWRPKTFSDLVGQEHVVKALQNALDEGRLHHAYLLTGTRGVGKTTIARILAKSLNCENAQHGEPCGVCESCTQIDAGRYVDLLEIDAASNTGIDNIREVLENAQYAPTAGKYKVYIIDEVHMLSKSAFNAMLKTLEEPPEHVKFILATTDPHKVPVTVLSRCLQFVLRNMTAQQVADHLAHVLDSEKITYAPPALQLLGRAAAGSMRDALSLLDQAIALGSGKVAENDVRQMIGAVDKQYLYELLTGIINQDGAALLAKAQEMAACAVGFDNALGELAILLQHLALIQAVPNALAHDDPDSDILHRLAQTISGEQIQLYYQIAVHGKRDLSLAPDEYAGFMMTLLRMLAFAPLAAASCDTNAVIENTELKSPSAQTAEKETAVKKPQPRPEAETAQTPVQTASAAAMPSEGKTAGPVSNQENNDVPPWEDAPDEAQAAAGTAQTSAKSIQTASEAETPPENQVSKNKAADNVTDAPLSEVPSENPIQATPNDEAVETETFAHEAPAEPFYGYGFPDNDCPVEDGAEIPPPDWEHAAPADTAGGGADEEAEAGGIGGNNTPSAPPPEFSTENWAAIVRHFARKLGAAQMPAQHSAWTEYHPDTGLMVLAMTAEARATADKKRLDKIRDTLAQAYGLQLTLQTQDWRDEAGRETPAMQDKRVQAEDRQKAQALLEADPAAQKILQAFGAQWQPESLELAANRP

SEQ ID NO: 35851 - protein, 265 aa, Neisseria meningitidis; identical to SEQ ID NO: 5208

SEQ ID NO: 35852 - protein, 219 aa, Neisseria meningitidis; identical to SEQ ID NO: 18394

SEQ ID NO: 35853 - protein, 527 aa, Neisseria meningitidis
MPNKKKKAAFARAATENGVPDVSNIKNSYDDLMYESKAFSQTAINALEARARMMGLKPAAAAKAKVLELGCSMGGNIITQALYYPDAEFVGIDLSGRQVAQGNAIIEKMGLKNVRLEEKDILTIDESFGKFDYIIVHGIWSWVPDAVKDKIFSICRNNLTEHGIAYISYNVYPGWKRQEQLREIMYFAGRDVLEEPLEARTRKGLDALKALAEILENDKGLGGGGKLPAIQKILNHNTYYVAHEYMEIFNDPIYVNGFIEWANRHRLAYIGDTDLHVSFVSWMAEHTRERILALAGDDYIAKEFYSDILSDRQFRRSLLCREEVGDTVRRDESVAVEVIESLNFRPARGETINFDENDTLLSGIRDVMKTGEPFKTEDVAENLARRFPGLEFDRMKINSQLLLQTILGRFSVSSDNAGKQFFEDHKTYVPARFTDYVAAFVEHGAEAFVQPANRYNESTPSFGYGHLYIMRQLSRPTSKQALIETVAENLNIVSTTPDGLTFHPPAEVYVEEILADLADRHFLVSAD

SEQ ID NO: 35854 - protein, 59 aa, Neisseria meningitidis; identical to SEQ ID NO: 642

SEQ ID NO: 35855 - protein, 1144 aa, Neisseria meningitidis
MTEPTYIPLRLHTEFSITDGMVRIKKLIAKAQEYGLPALGISDLMNEFGLVKFYKACRGAGIKPIGAADVWIGNPNAPDKPFRAMLIIRNDAGYLRLSELLTEAYVGKDRNIHHAELNPEWLENGDNSGLICLSGAHYGEVGMNLLNGNEDAARAAALKYAAWFPDAFYLELQRLPERPEWEACVSGSVKLAEELGLPVVATHPTQFMSRDDFNAHEARVCIAGGWVLTDKKRPHDFTPGQFFIPPETMAERFADLPEALENTVEIAKRCNLHITLGKNFLPLFPTPDGLSLDDYLIKLSNEGLQERMVQLYPDEAERAAKMPEYQKRLDFELNIIIQMKFPGYFLIVQDFINWAKTHGCPVGPGRGSGAGSLVAYSLKITDLDPLKYALLFERFLNPERVSMPDFDVDFCQSNRGRVIEYVREKYGAEAVSQIVTFGTMSSKAVIRDVGRVLELPFMLCDKLSKLIPLEANKPLSLEKAMETEPQIQELIEAEEADELITLAKKLEDLTRGLGMHAGGVLIAPGKISDYSPVYQADESASPVSMYDKGDVEDVGLVKFDFLGLRNLTIIEMAQDNIKNTTGDIIDVGKIPLDDQVAYQIFRDANTTAVFQFESTGMKKMLKTAHTTKFEELIAFVSLYRPGPMDNIPDFVARMKGQEFQYIHPLLEGILAPTYGIMVYQEQVMQAAQIIGGYSLGGADLLRRAMGKKKPEEMVKHREIFAEGAAKQGISREKSDEIFNYMEKFAGYGFNKSHAAAYALISYQTAWLKAHYPAEFMAATMSSELDNTDQLKHFYDDCRANGIEFLPPDINESDYRFTPYPDMKIRYALGAIKGTGEAAVESIIAARQSGGKFTGLLDFCERVGKEHMNRRTLEALIRGGAFDSIEPNRAMLLANIDLAMDNADQKAANANQGGLFDMMEDAIEPVRLIDAPMWSESEKLAEEKTVIGFYLSGHPFGPYAQEVRQIAPQKLSKLKPQDSVRLAGFVTAVRTMMGKRGKIAFVSLEDLSGQVEIMVGGQTLENCADCLKADQVLIIESKVSRDDYGGGDGLRILANQVMTLQMARERYARSLSLALAPHHDIGKLVQLLAAHQLPDTPRIPLQLSYANEKASGRLQVPPKWTVTPSSALFGELETLLGSRSVRVNW

SEQ ID NO: 35856 - protein, 485 aa, Neisseria meningitidis; identical to SEQ ID NO: 2552

SEQ ID NO: 35857 - protein, 199 aa, Neisseria meningitidis; identical to SEQ ID NO: 2856

SEQ ID NO: 35858 - protein, 137 aa, Neisseria meningitidis
  misc_feature 131, 132: 'Xaa' is any amino acid
MKELDKIDFRILKILQQNARIPMTELAEKVGLSTTPVTERVRRLEREHYISGYHAHLNPHLLGKPLLVFVELKLQSKSGNIFEDFKKEVLKIPQIMECHLVSGEYDYLIKVRLPDMSAYRDMLGNILLQLXXTHLIN

SEQ ID NO: 35859 - protein, 155 aa, Neisseria meningitidis; identical to SEQ ID NO: 18444

SEQ ID NO: 35860 - protein, 360 aa, Neisseria meningitidis
MVANNVRGVEFISANTDAQSLAKNHAAKRIQLGTNLTRGLGAGANPDIGRAAAQEDREAIEEAIRGANMLFITTGMGGGTGTGSAPVVAEIAKSLGILTVAVVTRPFAYEGKRVHVAQAGLEQLKEHVDSLIIIPNDKLMTALGEDVTMREAFRAADNVLRDAVAGISEVVTCPSEIINLDFADVKTVMSNRGIAMMGSGYAQGIDRARMATDQAISSPLLDDVTLDGARGVLVNITTAPGCLKMSELSEVMKIVNQSAHPDLECKFGAAEDETMSEDAIRITIIATGLKEKGAVDFVPAREVEAVAPSKQEQSHNVEGMIRTNRGIRTMNLTAADFDNQSVLDDFEIPAILRRQHNSDK

SEQ ID NO: 35861 - protein, 188 aa, Neisseria meningitidis; identical to SEQ ID NO: 1467

SEQ ID NO: 35862 - protein, 188 aa, Neisseria meningitidis; identical to SEQ ID NO: 10057

SEQ ID NO: 35863 - protein, 115 aa, Neisseria meningitidis; identical to SEQ ID NO: 18517

SEQ ID NO: 35864 - protein, 672 aa, Neisseria meningitidis; identical to SEQ ID NO: 18360

SEQ ID NO: 35865 - protein, 288 aa, Neisseria meningitidis; identical to SEQ ID NO: 464

SEQ ID NO: 35866 - protein, 194 aa, Neisseria meningitidis; identical to SEQ ID NO: 15809

SEQ ID NO: 35867 - protein, 651 aa, Neisseria meningitidis
  misc_feature 647, 648, 649: 'Xaa' is any amino acid
MTEKSHKKTAKGRAGSPSPTSARNKKADNGARGNKVSERLKAVKELQKTETKKARPEHVVNLIGDALWLMGLAATLYLAISLISFDMGDPSWSHSSPVVEDVANWGGLFGAYVADVGYYLFGWSFWWWIAAACVVLYKNFRLHAKQTENEAYNHKIAAAALFVLTVFSPVLEYFVLGGKYADSLPVGAGGMVGIRVGAVFAWLLGKSGSLLIILVVLLLSLSLLVQISWLEFLNGAGRAVQNRLSALSGKVMALGKRRPNTKTDGVDTQNTRRMVKEAKNITAKPVALPEGSSSNRKSVAVSVAPPPKIQVSLFEDDEPRQAGEYHKPTLNLLRIPDSEPVSINPAELERTAELIESKLAEFGIGVQVVSATSGPVITRYEIEPAQGVKGSQIVALSKDLARSMSLQSVRIVETIAGKNTMGIELPNDKRQDVMLSEILSSPVFAEAKSKLTVALGKDIAGTPVVGDLAKMPHLLVAGMTGSGKSVGVNGMIMSMLFKATPDEVRFIMIDPKMLELSIYDGIPHLLCPVVTDMREAGQALNWCVAEMEKRYRLLSHAGVRNLEGFNQKVEAAKAAGKPLLNPFSLNPDEPEPLEKLPLIVVVIDELADLMMTERKAVEQQIARLAQKARAAGIHMIVATQRPSVDVXXXHT

SEQ ID NO: 35868 - protein, 320 aa, Neisseria meningitidis; identical to SEQ ID NO: 24922

SEQ ID NO: 35869 - protein, 145 aa, Neisseria meningitidis; identical to SEQ ID NO: 14768

SEQ ID NO: 35870 - protein, 570 aa, Neisseria meningitidis; identical to SEQ ID NO: 25535

SEQ ID NO: 35871 - protein, 195 aa, Neisseria meningitidis
MEHKLPQLPYEPDALSPHLSKETLEFHYGKHHQTYITNLNNQIKGTEFENLPLEEIVKKSSGGVFNNAAQTWNHTFYWLGFTPKGQGKPSGELAAAIDAKWGSFEKFQEAFNACAAGTFGSGWAWLVKTPAGGLDLVSTSNAATPLTTENTPLLTCDVWEHAYYIDYRNSRPNYLKGFWEIVNWNEVAKRFAALS

SEQ ID NO: 35872 - protein, 227 aa, Neisseria meningitidis; identical to SEQ ID NO: 5897

SEQ ID NO: 35873 - protein, 522 aa, Neisseria meningitidis; identical to SEQ ID NO: 18279

SEQ ID NO: 35874 - protein, 259 aa, Neisseria meningitidis
MSATIPPKIIRYDSNPTDVYFFGTCVLDLFMPEAGMDAIALIEQQGIRVHFPMAQSCCGQPAYSSGHPTEAFDVARAQLDLFPEEWPIVVPSGSCGGMMKHHWPTLFKGSEYEERAVDCAGRIIEFTHFLLAIGFKPEDKGEPLKVAVHTSCAARREMNVHLSGWQLIDGMENVERIVHDHESECCGFGGTFSVKQADISGAMVTDKVAALKETGATEIISADCGCMMNIGGKIAKDEPNMPRPKHIASFLLERTGGKA

SEQ ID NO: 35875 - protein, 164 aa, Neisseria meningitidis; identical to SEQ ID NO: 8223

SEQ ID NO: 35876 - protein, 66 aa, Neisseria meningitidis; identical to SEQ ID NO: 1185

SEQ ID NO: 35877 - protein, 295 aa, Neisseria meningitidis
MYTGRFAPSPTGLLHIGSLLTAAASYADARSNGGKWLVRMEDLDPPREMPGAASHILHTLEAFGFEWDGEVAYQSRRYALYEETLCRLKTAGLVYPCHCSRKDWQAGARRGADGFVYNGRCRHPGQRPAPQGKQPAWRIRVPDRVIGFSDGIVGGYAQNLAGDIGDFVLLRADGYWAYQLAVVADDAEQSVTHIVRGQDLLVSTPRQIYLQQCLGVPTPQYAHLPLLTNAQGQKWSKQTLAPALDLNRREQLLRQVFRYLKLPEAPETDRPAELLDWAVAHWDMGKVPKHAVTTP

SEQ ID NO: 35878 - protein, 174 aa, Neisseria meningitidis
MNNLIPEHLAAYAHSDSLQIEGVHRCFSLSCQGRDTFHIRYYGEPFDGLITDTDKAPVKIVAVEAVSGDEIVLFDGAEHGYNAMFCDKYSPNQKQNRMLTDLDEYTYRVLIHLYYNIDYEDEYEDFVNSEGQVPLIDGRVISFDSLKRNGFDAISVDLIDEKQSVRELLNEELS

SEQ ID NO: 35879 - protein, 333 aa, Neisseria meningitidis; identical to SEQ ID NO: 17218

SEQ ID NO: 35880 - protein, 209 aa, Neisseria meningitidis; identical to SEQ ID NO: 1305

SEQ ID NO: 35881 - protein, 107 aa, Neisseria meningitidis; identical to SEQ ID NO: 19473

SEQ ID NO: 35882 - protein, 250 aa, Neisseria meningitidis; identical to SEQ ID NO: 18054

SEQ ID NO: 35883 - protein, 513 aa, Neisseria meningitidis
MTEMQQRAQLHRQIWKIADEVRGAVDGWDFKQYVLGTLFYRFISENFTDYMQAGDSSIDYAAMPDSIITPEIKDDAVKVKGYFIYPSQLFCNIAAEAHQNEELNTKLKEIFTAIESSASGYPSEQDIKGLFDDFDTTSSRLGSTVADKNKRLAAVLKGVAELDFGSFEDHHIDLFGDAYEYLISNYAANAGKSGGEFFTPQSVSKLIARLAVHGQEKVNKIYDPACGSGSLLLQAKKQFDEHIIEEGFFGQEINHTTYNLARMNMFLHNVNYNKFHIELGDTLTNPKLKDSKPFDAIVSNPPYSINWIGSDDPTLINDDRFAPAGVLAPKSKADFAFILHALNYLSGRGRAAIVSFPGIFYRGGAEQKIRQYLVEGNYVETVIALAPNLFYGTGIAVNILVLSKHKDNTDIQFIDAGSFFKKETNNNVLTEEHIADIVKLFADKADVPHIAQNAAQQTVKDNGYNLAVSSYVEPEDTREIIDIKQLNAEIGETVAKIERLRREIDEVIAEIEA

SEQ ID NO: 35884 - protein, 102 aa, Neisseria meningitidis
LSGININLKNGDSLLIRGPSGCGKTSLLRALAGLWPFGSSGKVSRPPHQDILSLPQRPYTAQGSLRDAVCYPDIDKQHPELAEAMNTCRLGYLIDKLDKTDD

SEQ ID NO: 35885 - protein, 335 aa, Neisseria meningitidis; identical to SEQ ID NO: 7988

SEQ ID NO: 35886 - protein, 232 aa, Neisseria meningitidis
VQADLAYAAERITHDYPKPTGTDKDKISTVSDYFRNIRAHSIHPRVSVGYDFGDWRIAADYASYRKWNNNKYSVNTKELQRNKEHGNWIELKTENQENGSFHAASSLGLSAIYDFKLNDKFDKFKPYIGVRVAYGHVKHQVHSVETETKIIFTTPTGGAKVGGKIPNKPSSKPPYHQSHSISSLGLGVIAGVGFDITPKLTLDTGYRYHNWGRLENTRFKTHEVSLGMRYHF

SEQ ID NO: 35887 - protein, 54 aa, Neisseria meningitidis; identical to SEQ ID NO: 18285

SEQ ID NO: 35888 - protein, 282 aa, Neisseria meningitidis; identical to SEQ ID NO: 1323

SEQ ID NO: 35889 - protein, 281 aa, Neisseria meningitidis; identical to SEQ ID NO: 18810

SEQ ID NO: 35890 - protein, 461 aa, Neisseria meningitidis
MMVRDNRIQMFPHEWRASTTLSGVYALRMLGMFLVLPVLAVYAASLPGAEGNKTLVGLAMGIYGLTQALLQLPLGIASDKFGRKKTIYVGLIVFAAGSFLAAAADTLPMLIAARAIQGAGAVSAAVTALLADLTRDGVRTRAMAMIGLSIGLTFSVSLVVAPVIADAVGVRGLFLLTGILTVASIGVVAWMTPDPEVSKLHEDTQAQPSRIGEVLKNRRLLTLDFGIFALHAAQMALFTALPFAMTQLGLEKIQHWKVYLPSTITGLVVMVPLIIVGETRNKLKQVFVLGIVCIAAAQLGLLSGMRSVGLITAYLVVYFIGFNVLEASLPSMVSKIAPSDLKGTAMGVYNTMQSLGLFAGGAAGGLLFQKYGFSGVFAFCSILMLLWLVIAVLSPAPKPVKNLSYPVGGVWQGNQEGLYRALSELEGVEDIGFSFDGQTVYLKVLQKGFDQAAAEKIITGV

SEQ ID NO: 35891 - protein, 72 aa, Neisseria meningitidis; identical to SEQ ID NO: 113

SEQ ID NO: 35892 - protein, 283 aa, Neisseria meningitidis; identical to SEQ ID NO: 9200

SEQ ID NO: 35893 - protein, 327 aa, Neisseria meningitidis; identical to SEQ ID NO: 29302

SEQ ID NO: 35894 - protein, 92 aa, Neisseria meningitidis; identical to SEQ ID NO: 752

SEQ ID NO: 35895 - protein, 166 aa, Neisseria meningitidis; identical to SEQ ID NO: 1704

SEQ ID NO: 35896 - protein, 85 aa, Neisseria meningitidis; identical to SEQ ID NO: 3676

SEQ ID NO: 35897 - protein, 107 aa, Neisseria meningitidis; identical to SEQ ID NO: 25946

SEQ ID NO: 35898 - protein, 177 aa, Neisseria meningitidis; identical to SEQ ID NO: 3663

SEQ ID NO: 35899 - protein, 163 aa, Neisseria meningitidis; identical to SEQ ID NO: 18549

SEQ ID NO: 35900 - protein, 94 aa, Neisseria meningitidis; identical to SEQ ID NO: 3728

SEQ ID NO: 35901 - protein, 342 aa, Neisseria meningitidis
MEARPPRVNEAQAPRADEMKKESRPAFDTAAVPVSDSGFAANANVRRFVDDEVGKGDFSRAEWQDFFDKAAYKADIVKIMHRPSTSRPWYVFRTGNSGKAKFRGARRFYAENRAVVDDVAQKYGVPAELIVAIIGIETNYGKNTGSFRVADALATLGFDYPRRAGFFQKELVELLKLAKEEGGDVFAFKGSYAGAMGMPQFMPSSYRKWAVDYDGDGHRDIWGNVGDVAASVANYMKQHGWRTGGKMLVSATLAPGADVQAIIGEKTALTRTVADLKAYGIIPGEELADDEKAVLFKLETAPGVFEYYLGLNNFYTVWQYNHSRMYVTAVRDIANSLGGPGL

SEQ ID NO: 35902 - protein, 173 aa, Neisseria meningitidis
VKDSLMDAFDFFMQGNFKKIATEQGLDRKYFIFHYIVCNLSAISSFCLMKVIHSYTILCLLIMIIGIAFGFILRNRVLSIVKNKQNFLSDMFPLEMPFFSRVYKIPILARFLNRGMKWLYLQNFFCLVMICFSISLILNEERGWMPYFICYWFGLCYPANTYYVFLSRDYKHI

SEQ ID NO: 35903 - protein, 305 aa, Neisseria meningitidis; identical to SEQ ID NO: 537

SEQ ID NO: 35904 - protein, 1391 aa, Neisseria meningitidis; identical to SEQ ID NO: 4736

SEQ ID NO: 35905 - protein, 98 aa, Neisseria meningitidis; identical to SEQ ID NO: 1735

SEQ ID NO: 35906 - protein, 138 aa, Neisseria meningitidis; identical to SEQ ID NO: 489

SEQ ID NO: 35907 - protein, 937 aa, Neisseria meningitidis
MSNRPTLLLVDGSSYLYRAYHAMAQLTAPDGAPTGAMYGVLNMLRRLRADYVHDYCAVVFDAKGKNFRHEMFPDYKATRPPMPDDLRPQAEALPDLVRLIGWPVLVIPQVEADDVIGTLAAMAGEAGWNVVVSTGDKDMAQLVNERVTLVNTMSGETLDIEGVKAKFGVRPDQIRDYLALMGDKVDNVPGVEKCGPKTAVKWLEAYGSLAGVMEHAAEIKGKVGENLRAALQRLPLSYDLVTIKTDVDLHTELSDGIESLRRTAPKWAQLVVDFKRWGFRTWLKEAESRMHEAADGDLFGSDSIGEQAALNAEVPSEKQPELAPTPEKLDYQAVTTEAQLAALLDKLSQADTIGIDTETTSLDAMNASLVGISIAFQAGEAIYIPVGHSLTAAPEQLDLQDVLGRLKPHLENPALKKIGQNLKYDQHVFANYGIALNGIAGDAMLASYIIESHLGHGLDELSERWLGLETITYESLCGKGAKQIGFADVAIGQATEYAAQDADFALRLEAHLRAQMDAKQLEMYEKMELPVAQVLFEMERNGVQIDRAELARQSAELGAELMKLEQEAYAAAGQPFNLNSPKQLQEILFDKMGIPTKGLKKTAKGGISTNEAVLEQLAPDYPLPKIILQNRSLAKLKSTYTDKLPEMISPKDGRVHTTYAQAVAITGRLASNNPNLQNIPIRTAEGRRVRRAFTAPQGSVIVSADYSQIELRIMAHLSGDKTLIAAFQNGEDVHRRTAAEVFGIAPENVSSEQRRYAKTINFGLIYGMGQYGLAKSLGIDNISAKNFIDRYFARYPGVAEYMQRTKEQAAAQGFVETLFGRRLYLPDIRNKNTNARAGAERAAINAPMQGTASDLIKRAMIDVSRWLSECEASPWDELLQSKLIMQVHDELVLEVVETELDFVKEKLPQIMAKVDGGLLDVPLVAEVGVGENWEEAH

SEQ ID NO: 35908 - protein, 791 aa, Neisseria meningitidis; identical to SEQ ID NO: 19476

SEQ ID NO: 35909 - protein, 469 aa, Neisseria meningitidis
MMKNRVTNIHFVGIGGVGMSGIAEVLHNLGFKVSGSDQARNAATEHLGSLGIQVYPGHTAEHVNGADVVVTSTAVKKENPEVVAALEQQIPVIPRALMLAELMRFRDGIAIAGTHGKTTTTSLTASILGAAGLDPTFVIGGKLNAAGTNARLGKGEYIVAEADESDASFLHLTPIMSVVTNIDEDHMDTYGHSVEKLHQAFIDFIHRMPFYGKAFLCIDSEHVRAILPKVSKPYATYGLDDTADIYATDIENVGAQMKFTVHVQMKGHEQGSFEVVLNMPGRHNVLNALAAIGVALEVGASVEAIQKGLLGFEGVGRRFQKYGDIKLPNGGTALLVDDYGHHPVEMAATLSAARGAYPEKRLVLAFQPHRYTRTRDLFEDFTKVLNTVDALVLTEVYAAGEEPIAAADSRALARAIRVLGKLEPIYCENVADLPEMLLNVLQDGDIVLNMGAGSINRVPAALLELSKQI

SEQ ID NO: 35910 - protein, 193 aa, Neisseria meningitidis; identical to SEQ ID NO: 640

SEQ ID NO: 35911 - protein, 96 aa, Neisseria meningitidis; identical to SEQ ID NO: 4410

SEQ ID NO: 35912 - protein, 66 aa, Neisseria meningitidis; identical to SEQ ID NO: 587

SEQ ID NO: 35913 - protein, 613 aa, Neisseria meningitidis
MQTNYLSETDSIMKKLICLFAVFLMLCGRAFALDANDLLPPEKAFVPELAVADDGVNVRFRIADGYYMYQAKIVGKTNPADLLGQPSFSKGEEKEDEFFGRQTVYHHEAQVAFPYAKAVGEPYKLVLTYQGCAEVGVCYPPVDTEFDISGNGTYHPQTDEPASAKDRFLQPSSQNGSGALPPPKGDEGGDSRFKLSWDTLNANLLAFFLAGLGLSFTACMYPLLPIVSSIVVGDKKAGKARAFVLSVVYVQGLALTYTLVGIVAGLTGALLTVWLQQAWVVLAASALMVVLALSMFGLFNIQLPNAVQSYFQNQSSRLSGGKIVSVFIMGILSALIVGPCVAPPLAFALGYIGQTGDAVLGGLALYTLALGTGVPLIAIGTFGGHILPKAGDWMNAVKYAFGFILLAVAVYLATPHLPYYLVVALYTLLMLVPACMLLVNGRRQKRRPKAVAFALGSILLIGGAWFGWQGANGKTTALHHFLTLNPPAEAGKSSEHGKMFADTAALKAAMDTALKEHPDKPVVLDFYADWCISCKEMAAYTLNQPEVHQAVDMERFFQIDVTANTPEHQALLKEYGLFGPPGVFVVRSDGSRSEPLLGFVKADKFIEWYEQNR

SEQ ID NO: 35914 - protein, 427 aa, Neisseria meningitidis; identical to SEQ ID NO: 2761

SEQ ID NO: 35915 - protein, 94 aa, Neisseria meningitidis; identical to SEQ ID NO: 23891

SEQ ID NO: 35916 - protein, 328 aa, Neisseria meningitidis; identical to SEQ ID NO: 18970

SEQ ID NO: 35917 - protein, 374 aa, Neisseria meningitidis
VCGLCHKTVSDPIAGASGDWKSCLKNVQWRTFLKRGSIMHIGGYFIDNPIALAPMAGITDKPFRRLCRDFGAGWAVCEMLTSDPTLRNTRKTLHRSDFVDEGGIVAVQIAGSDPQQMADAARYNVSLGAQLIDINMGCPAKKVCNVQAGSALMQNEPLVAAILEAVVRAAGVPVTLKTRLGWHEDHQNLPVIAKIAEDCGITALAVHGRTRTQMYKGEARYELIAETKCRLNIPVWVNGDITSPQKAAAVLKQTAADGIMIGRGAQGRPWFFRDLKHYAEHGVLPPALSLAECAAAILNHIRAIHAFYGDSAGVRIARKHIGWYIGEMPDGEQARREINRLDSAAAQYDMLAGYLERLAGKTDRWACGYRTNAF

SEQ ID NO: 35918 - protein, 101 aa, Neisseria meningitidis; identical to SEQ ID NO: 705

SEQ ID NO: 35919 - protein, 121 aa, Neisseria meningitidis
MIAKHIDRFPLLKLDQVIDWQPIEQYLNRQKTRYLRDHRGRPACPLLSMFKAVLLGQWHNLSDPELEHSLITRIDFNLFCRFDELSIPDYSHQPYSGLSEKDAYAVMTGYRPFKRVRPYAV

SEQ ID NO: 35920 - protein, 185 aa, Neisseria meningitidis
MKPKFKTVLTALLLAVSLPSMAATHVLMETDMGNIRLVLDESKAPKTVANFVRYARKGFYDNTIFHRVIGGFVIQGGGLTEDLAQKASDKAVANESGNGLKNTVGTIAMARTADPDSATSQFFINLADNDSLNYKNGQYGYTVFGRVESGMNTVSKIARVKTATRGFYQNVPVQPVKIRRVVVGQ

SEQ ID NO: 35921 - protein, 166 aa, Neisseria meningitidis; identical to SEQ ID NO: 19699

SEQ ID NO: 35922 - protein, 759 aa, Neisseria meningitidis; identical to SEQ ID NO: 18665

SEQ ID NO: 35923 - protein, 113 aa, Neisseria meningitidis; identical to SEQ ID NO: 1729

SEQ ID NO: 35924 - protein, 384 aa, Neisseria meningitidis; identical to SEQ ID NO: 33970

SEQ ID NO: 35925 - protein, 448 aa, Neisseria meningitidis; identical to SEQ ID NO: 693

SEQ ID NO: 35926 - protein, 124 aa, Neisseria meningitidis; identical to SEQ ID NO: 27956

SEQ ID NO: 35927 - protein, 163 aa, Neisseria meningitidis; identical to SEQ ID NO: 3764

SEQ ID NO: 35928 - protein, 293 aa, Neisseria meningitidis; identical to SEQ ID NO: 3714

SEQ ID NO: 35929 - protein, 93 aa, Neisseria meningitidis
MPSEAQKPVSFILYSNDIKVTAKKNVFFGYFASLNRATGTIDIRVHDTDSTKGKNGIFQSIGIKTALSLQKYQIDKPGKEIRPCRLKKRPPVR

SEQ ID NO: 35930 - protein, 120 aa, Neisseria meningitidis; identical to SEQ ID NO: 1496

SEQ ID NO: 35931 - protein, 150 aa, Neisseria meningitidis; identical to SEQ ID NO: 3757

SEQ ID NO: 35932 - protein, 130 aa, Neisseria meningitidis; identical to SEQ ID NO: 1661

SEQ ID NO: 35933 - protein, 41 aa, Neisseria meningitidis; identical to SEQ ID NO: 3182

SEQ ID NO: 35934 - protein, 514 aa, Neisseria meningitidis; identical to SEQ ID NO: 9767

SEQ ID NO: 35935 - protein, 98 aa, Neisseria meningitidis; identical to SEQ ID NO: 33218

SEQ ID NO: 35936 - protein, 131 aa, Neisseria meningitidis; identical to SEQ ID NO: 1281

SEQ ID NO: 35937 - protein, 289 aa, Neisseria meningitidis; identical to SEQ ID NO: 33335

SEQ ID NO: 35938 - protein, 417 aa, Neisseria meningitidis; identical to SEQ ID NO: 18130

SEQ ID NO: 35939 - protein, 301 aa, Neisseria meningitidis
VARDFYKEYNPLFIKTYQSEHPGTSVSIQQSHGGSSKQALSVANGLQADVVTMNQSSDIDLLEKKGLVEKGWQQALPDHAAPYTSTMVFLVRKNNPKQIRDWNDLAKDGVNIVIANPKTSGNGHYAFLGAYGYGLKATNGNEQEAQKLVASILKNTPVFENGGRAATTTFTQRNIGDVLITFENEANYVSKKLTQGQFEIVYPSYTISAESPVAVVNSVVAKKGTQKTARAYLEYLWSEPAQELAASLYLRPRNPEVLARHKADFPDLDTFSPEEKFGGWDNIMKTYFADGGIFDRLTAQK

SEQ ID NO: 35940 - protein, 231 aa, Neisseria meningitidis; identical to SEQ ID NO: 3708

SEQ ID NO: 35941 - protein, 382 aa, Neisseria meningitidis; identical to SEQ ID NO: 9777

SEQ ID NO: 35942 - protein, 369 aa, Neisseria meningitidis
MFSDTDISMMENALRLAALGRFSTSPNPRVGCVIAHGSQIVGQGFHVKAGEPHAEVHALRQAGEMAQGATAFVTLEPCSHYGRTPPCAEALLRSGVTRVVAAMRDPNPLVAGKGLALLESAGIKTECGLLEHQARELNRGFLSRIERRRPFVRLKCAVSLDGKTALSDGSSFWITGEDARADVQVLRAESCAVLTGIGTVLADNPRLNVRAFPTLRQPARIVLDSRLRLPLDSHLLTDGQSPTYIATLERNEDRLHPYREHAHIRILMPSETAGGKIDLNHLMRLLADEGFGEIMVEAGSELTSAFLAEDLADEIVLYRSPKILGSGKDLLSLPENRAALSAPPLWTPVSSEILGHDIKTVFRKNDNAF

SEQ ID NO: 35943 - protein, 480 aa, Neisseria meningitidis; identical to SEQ ID NO: 21583

SEQ ID NO: 35944 - protein, 573 aa, Neisseria meningitidis; identical to SEQ ID NO: 18912

SEQ ID NO: 35945 - protein, 251 aa, Neisseria meningitidis; identical to SEQ ID NO: 9216

SEQ ID NO: 35946 - protein, 489 aa, Neisseria meningitidis; identical to SEQ ID NO: 19167

SEQ ID NO: 35947 - protein, 360 aa, Neisseria meningitidis; identical to SEQ ID NO: 19622

SEQ ID NO: 35948 - protein, 150 aa, Neisseria meningitidis; identical to SEQ ID NO: 7624

SEQ ID NO: 35949 - protein, 431 aa, Neisseria meningitidis; identical to SEQ ID NO: 7311

SEQ ID NO: 35950 - protein, 163 aa, Neisseria meningitidis
MRAVIQKTVGAKVDVVSENGTETCGKIDGGFVVLLGVTHSDIEKDARYVADKIAHLRVFEDGEGKLNLSLKDVGGSVLLVSQFTLYADAASGRRPSFSKAAPAEQAKRLYLHTAELLRGHGIHVETGRFRTHMQVSLCNDGPVTILLDSFMTRISPKMKVVPD

SEQ ID NO: 35951 - protein, 362 aa, Neisseria meningitidis; identical to SEQ ID NO: 9075

SEQ ID NO: 35952 - protein, 455 aa, Neisseria meningitidis
MQHLTERMTQIAKLLNSSANNPDIDIPDFLTEIKDYSEFSVTDENGTYLHWDKFRQIHTEDTRMKWRAVKESRKKIQKPIDFPFEHQFWFCIPDSLQARLHLIDKSCGSSIGTSSLGGFGRSEQNRFLLKSLIMEEAITSAQLEGAATTRKVAKDMLKSQRKPKTKDEIMIVNNYHLMKKAVELKNTPLSVEMILDLHRIATSNAIENKADPGQFRRDDEIFIADNDGNSLYQPPPHGQVHTLMEAVCTFANNTYDGVENPFIHPVVQAIILHFLIGYIHPFGDGNGRIARALFYWFMLKNSYWLFEYISISRLLKNAPAQYAKSYLYAETDDSDLTYFIYYQCDIIKRAVADLEHYISDKQKHQQEFKAAIAQYTEKIGKLNQRQIGILQKAVEESGKIFTALEIANQYGISLNTARSDLSKLGEYRFLVPFKSGNALEYVAPQDLLERLEKKI

SEQ ID NO: 35953 - protein, 242 aa, Neisseria meningitidis; identical to SEQ ID NO: 33510

SEQ ID NO: 35954 - protein, 159 aa, Neisseria meningitidis
MRKSRLSRYKQNKLIELFVAGVTARTAAELVGVNKNTAAYYFHRLRLLIYQNSPHLEMFDGEVEADESYFGGQRKGKRGRGAAGKVAVFGLLKRNGKVYTVTVPNSNRYFISYYPTSETQHCLYGLLSLCIRCARIPFLRNFVFVSITAHILLNDKTIL

SEQ ID NO: 35955 - protein, 348 aa, Neisseria meningitidis
MKMQAVVVNKNVAGDVEIVEREVRPLEYGEALVEVEYCGVCHTDLHVAAGDYGEKPGRVLGHEGIGLVKEVADGVKNLKVGDRVSIAWLFQSCGSCEYCNTGRETLCRSVLNAGYTADGGMATHCIVNADYAVKVPDGLDPAQASSITCAGVTTYKAIKVSGVRPGQWIAIYGAGGLGNLAVQYAKKVFGAHVVAIDINDEKLAFAKESGADLVINAAKEDAAKVIQEKTGGAHVAIVTAVSAAAFNSAVNCVRAGGRVVAIGLPPESMDLSIPRLVLDGIEVVGSLVGTRKDLEEAFQFGAEGLVVPKVQLRALDEAPAIFQEMREGKITGRMVIDMKKECGCGHHH

SEQ ID NO: 35956 - protein, 217 aa, Neisseria meningitidis; identical to SEQ ID NO: 33951

SEQ ID NO: 35957 - protein, 102 aa, Neisseria meningitidis
MFDGKVEADESYFGGQRKGKRGRGAAGKVAVFGLLKRNGKVYTVTVPNSNRYFISYYPTSETQHCLYGLLSLCIRCARIPFLRNFVFVSITAHILLNDKTIL

SEQ ID NO: 35958 - protein, 344 aa, Neisseria meningitidis; identical to SEQ ID NO: 18882

SEQ ID NO: 35959 - protein, 591 aa, Neisseria meningitidis; identical to SEQ ID NO: 18870

SEQ ID NO: 35960 - protein, 182 aa, Neisseria meningitidis; identical to SEQ ID NO: 18498

SEQ ID NO: 35961 - protein, 315 aa, Neisseria meningitidis; identical to SEQ ID NO: 5319

SEQ ID NO: 35962 - protein, 237 aa, Neisseria meningitidis; identical to SEQ ID NO: 5135

SEQ ID NO: 35963 - protein, 221 aa, Neisseria meningitidis; identical to SEQ ID NO: 3662

SEQ ID NO: 35964 - protein, 122 aa, Neisseria meningitidis; identical to SEQ ID NO: 3754

SEQ ID NO: 35965 - protein, 136 aa, Neisseria meningitidis; identical to SEQ ID NO: 19752

SEQ ID NO: 35966 - protein, 182 aa, Neisseria meningitidis; identical to SEQ ID NO: 18240

SEQ ID NO: 35967 - protein, 181 aa, Neisseria meningitidis
MKHYALLISFLALSACSQGSEDLNEWMAQTRREAKAEIIPFQAPTLPVAPVYSPPQLTGPNAFDFRRMETDKKGENAPDTKRIKETLEKFSLENMRYVGILKSGQKVSGFIEAEGYVYTVGVGNYLGQNYGRIESITDDSIVLNELIEDSTGNWVSRKAELLLNSSDKNTEQAAAPATEQN

SEQ ID NO: 35968 - protein, 68 aa, Neisseria meningitidis; identical to SEQ ID NO: 5814

SEQ ID NO: 35969 - protein, 123 aa, Neisseria meningitidis; identical to SEQ ID NO: 616

SEQ ID NO: 35970 - protein, 117 aa, Neisseria meningitidis; identical to SEQ ID NO: 5140

SEQ ID NO: 35971 - protein, 133 aa, Neisseria meningitidis; identical to SEQ ID NO: 6682

SEQ ID NO: 35972 - protein, 307 aa, Neisseria meningitidis; identical to SEQ ID NO: 3745

SEQ ID NO: 35973 - protein, 516 aa, Neisseria meningitidis
MKKPLISVAAALLGVALGTPYYLGVKAEESLTQQQKILQEAGFLTVESHQYERGWFTSTETTVIRLKPELLNNARKYLPDNLKTVLEQPVTLVNHITHGPFAGGFGTQAYIETEFKYAPETEKVLERFFGKQVPVSLANTVYFNGSGKMEVSVPAFDYEELSGIRLHWEGLTGKTVYQKGFKSYRNSYDAPLFKIKLADKGDAAFEKAHFDSETSDGINPLALGSSNLTLEKFSLEWKEGVDYNVKLNELVNLVTDLQIGAFINPNGSIAPSKIEVGKLAFSTKTGESGSFINSEGQFRFDTLVYGNEKYGPLDIHIAAEHLDASALTVLKRKFAQISAKKMTEEQIRNDLIAAVKGEASGLFTNNPVLDIKTFRFTQPSGKIDVGGKIMFKDMKKEDLNQLGLMLKKTEADIRMSIPQKMLEDLAVSQAGNIFSVNAEDEAEGRASLDDINETLRLMVDSTVQSMAREKYLTLNGDQIDTAISLKNNQLKLNGKTLQNEPEPDFDEGGMVSEPQQ

SEQ ID NO: 35974 - protein, 303 aa, Neisseria meningitidis; identical to SEQ ID NO: 7939

SEQ ID NO: 35975 - protein, 129 aa, Neisseria meningitidis; identical to SEQ ID NO: 9668

SEQ ID NO: 35976 - protein, 169 aa, Neisseria meningitidis; identical to SEQ ID NO: 18087

SEQ ID NO: 35977 - protein, 710 aa, Neisseria meningitidis; identical to SEQ ID NO: 32948

SEQ ID NO: 35978 - protein, 292 aa, Neisseria meningitidis; identical to SEQ ID NO: 3715

SEQ ID NO: 35979 - protein, 131 aa, Neisseria meningitidis; identical to SEQ ID NO: 18033

SEQ ID NO: 35980 - protein, 436 aa, Neisseria meningitidis; identical to SEQ ID NO: 1523

SEQ ID NO: 35981 - protein, 478 aa, Neisseria meningitidis; identical to SEQ ID NO: 9742

SEQ ID NO: 35982 - protein, 280 aa, Neisseria meningitidis; identical to SEQ ID NO: 32375

SEQ ID NO: 35983 - protein, 115 aa, Neisseria meningitidis; identical to SEQ ID NO: 25919

SEQ ID NO: 35984 - protein, 187 aa, Neisseria meningitidis; identical to SEQ ID NO: 9755

SEQ ID NO: 35985 - protein, 728 aa, Neisseria meningitidis
LPRCLKQTVRHVMPSETGADAAKLSDGIACPLRPNNNHLWENLMPEQNRILCRELSLLAFNRRVLAQAEDRNVPLLERLRFLCIVSSNLDEFFEVRMAWLKRENKLHPRRRLDNGKMPSETIADVTEAARSLIRHQYDLFNNVLQPELAQEGIHFYRRRNWTGAQKKWIESYFDRELLPILTPIGLDPSHPFPRPLNKSLNFAVELDGTDAFGRPSGMAIVQAPRILPRVVPLPSELCGGGHGFVFLSSILHAHVGKLFPGMNVKGCHQFRLTRDSDLTVDEEDLQNLRAAIQNELHDREYGDGVRLEVADTCPAYIRDFLLAQFKLTAAELYQVKGPVNLVRLNAVPDLVNRPDLKFPTHTPGRLKALGKTASIFDLVRQSPILLHHPYQSFDPVVEMMREAAADPDVLAVKMTIYRTGTRSELVRALMKAALAGKQVTVVVELMARFDEANNVNWAKQLEEAGAHVVYGVFGYKVHAKMALIIRREDGVLKRYAHLGTGNYHQGTSRIYTDFGIITADEQITADVNTLFMEITGLGKPGRLNKLYQSPFTLHKMVIDRIARETEHAKAGKPARITAKMNSLIEPTVIEALYRASAAGVQIDLIVRGMCTLRPGVKGLSENIRVRSIIGRQLEHARVYCFHNNGADDTFISSADWMGRNFFRRIETAAPIAAPELKKRVIREGLEMALDDNTHAWLMQPDGGYIRAAPAEGESEADLQNDLWTLLGG

SEQ ID NO: 35986 - protein, 206 aa, Neisseria meningitidis; identical to SEQ ID NO: 1193

SEQ ID NO: 35987 - protein, 105 aa, Neisseria meningitidis; identical to SEQ ID NO: 1555

SEQ ID NO: 35988 - protein, 216 aa, Neisseria meningitidis; identical to SEQ ID NO: 23898

SEQ ID NO: 35989 - protein, 201 aa, Neisseria meningitidis; identical to SEQ ID NO: 3703

SEQ ID NO: 35990 - protein, 144 aa, Neisseria meningitidis; identical to SEQ ID NO: 6

SEQ ID NO: 35991 - protein, 99 aa, Neisseria meningitidis
MHYFSIHDQSGRHIGFFILLADDESEARPQSGRFAVKLEGGMENHVLSPFGQTEILQYWRVVKDRIELFFDEAPVGTLRNEYLTVSGQTFVLNDLTGNM

SEQ ID NO: 35992 - protein, 180 aa, Neisseria meningitidis; identical to SEQ ID NO: 9654

SEQ ID NO: 35993 - protein, 358 aa, Neisseria meningitidis
MQEWFQNLFAATLGLGDLGITVGLVVSVIVKIVIILIPLILTVAYLTYFERKVIGFMQLRVGPNVTGPWGLIQPFADVFKLLFKEVTRPKLSNKALFYIGPIMSLAPSFAAWAVIPFNEEWVLTNINIGLLYILMITSLSVYGVIIAGWASNSKYSFLGAMRASAQSISYEIAMSAALVCVVMVSGSMNFSDIVAAQAKGIAGGSVFSWNWLPLFPIFIVYLISAVAETNRAPFDVAEGESEIVAGHHVEYSGFAFALFFLAEYIFMILIAALTSLMFLGGWLSPFPQSWGIVGTPSAFWMFVKMAAVLYWYLWIRATFPRYRYDQIMRLGWKVLIPIGFAYIVILGVWMISPLNLWK

SEQ ID NO: 35994 - protein, 436 aa, Neisseria meningitidis; identical to SEQ ID NO: 18485

SEQ ID NO: 35995 - protein, 227 aa, Neisseria meningitidis; identical to SEQ ID NO: 25462

SEQ ID NO: 35996 - protein, 153 aa, Neisseria meningitidis; identical to SEQ ID NO: 7521

SEQ ID NO: 35997 - protein, 57 aa, Neisseria meningitidis; identical to SEQ ID NO: 735

SEQ ID NO: 35998 - protein, 236 aa, Neisseria meningitidis; identical to SEQ ID NO: 2130

SEQ ID NO: 35999 - protein, 122 aa, Neisseria meningitidis
MIQMQTILDVADNSGARRVMCIKVLGGSKCRYASVGDIIKVAVKDAAPRGRVKKGDVYNAVVVRTAKGVRRPDGALIKFDNNAAVLLNNKLEPLGTRIFGPVTRELRTERFMKIVSLAPEVL

SEQ ID NO: 36000 - protein, 92 aa, Neisseria meningitidis; identical to SEQ ID NO: 1005

SEQ ID NO: 36001 - protein, 160 aa, Neisseria meningitidis; identical to SEQ ID NO: 1377

SEQ ID NO: 36002 - protein, 78 aa, Neisseria meningitidis; identical to SEQ ID NO: 3909

SEQ ID NO: 36003 - protein, 63 aa, Neisseria meningitidis
LPKFGECPLPNPPPRGRGQVAADSGVAGRLKKNARNIDSGNVSGSLYRKAGGTNVANVFSDDL

SEQ ID NO: 36004 - protein, 530 aa, Neisseria meningitidis; identical to SEQ ID NO: 6645

SEQ ID NO: 36005 - protein, 467 aa, Neisseria meningitidis; identical to SEQ ID NO: 3712

SEQ ID NO: 36006 - protein, 820 aa, Neisseria meningitidis
MTQKEKHFEEYAALATLPLRDVVVYPHMVLPLFVGRPKSIAALENAITREEPVFLLAQTDAAVEEPIAADLYQTGTVAQVLQVLKLPDGTVKVLVEGLYRGRVLTIEDTGGLFVSHIEAVVEEDTGGNTDLEAVRRTLLAQFEQYAKLNKKIPAEIIGSINGIAENSRLTDTVAAHLQLKLTQRQQILEISEIGKRMEFLLAQLESELDIMQAEKRIRGRVKRQMEKSQREYYLNEQIKAIHKELGEEDENGELDALEAGIKKAGMSKEAEEKCLSELKKLKMMPPMSAESTVVRNYIDTLLELPWKKKSRVSKDIAKAGLVLDADHYGLEKVKERILEYLAVQKRMDKLKGPILCLVGPPGVGKTSLGESIAKATGRKYVRMALGGVRDESEIRGHRRTYIGSMPGKILQNMAKAGVKNPLFLLDEIDKLGSDFRGDPASALLEVLDPEQNNKFADHYAEVDYDLSDVMFIATSNSLNIPTPLLDRMEIIRLSGYTEDEKINIAMQYLVPKQMKRNGVKEGELAIEESAVRDIIRYYTREAGVRSLDREIAKICRKVVMQITLDEDKKRLSETKKTSKAKPKAVKVNEKNLHDYLGVRRFDYGVAESENRIGQVTGLAWTEVGGELLTVEAAALPGKGVIQCTGQLGDVMKESVSAAWSVVRSRAESVGLAPDFYEKKDIHVHVPEGATPKDGPSAGIAMTLAMVSAFTKIPVRADVAMTGEITLRGEVLPIGGLKEKLLAALRGGIKHVLIPKDNLKDLEEIPENVKTGLTIHPVKWIDEVLALGLESQPEPWAEPSGAEAAAESASKPKPRSRATKH

SEQ ID NO: 36007 - protein, 144 aa, Neisseria meningitidis; identical to SEQ ID NO: 29934

SEQ ID NO: 36008 - protein, 255 aa, Neisseria meningitidis
MQEIMQSIVFVAAAILHGITGMGFPMLGTTALAFIMPLSKVVALVALPSLLMSLLVLCSNNKKGFWQEIVYYLKTYKLLAIGSVVGSILGVKLLLILPVSWLLLLMAIITLYYSVNGILNVCAKAKNIQVVANNKNMILFGFLAGIIGGSTNAMSPILLIFLLSETENKNRIAKSSNLCYLLAKIVQIYMLRDQYWLLNKSEYGLIFLLSVLSVIGLYVGIRLRTKISPNFFKMLIFIVLLVLALKIGHSGLIKL

SEQ ID NO: 36009 - protein, 488 aa, Neisseria meningitidis; identical to SEQ ID NO: 23964

SEQ ID NO: 36010 - protein, 144 aa, Neisseria meningitidis; identical to SEQ ID NO: 1668

SEQ ID NO: 36011 - protein, 71 aa, Neisseria meningitidis; identical to SEQ ID NO: 1785

SEQ ID NO: 36012 - protein, 247 aa, Neisseria meningitidis; identical to SEQ ID NO: 18834

SEQ ID NO: 36013 - protein, 326 aa, Neisseria meningitidis; identical to SEQ ID NO: 19879

SEQ ID NO: 36014 - protein, 111 aa, Neisseria meningitidis
MQMHWLFLTVAILSEVCGSSMLKLSGGFSKLWPSIGVIVSFSVCFWALSIALKTMPLGTAYAIWAGMGLVLTALISVVFFGQKPDFIGIVSIGLILLGVVLLNTMSHMSGH

SEQ ID NO: 36015 - protein, 442 aa, Neisseria meningitidis; identical to SEQ ID NO: 3795

SEQ ID NO: 36016 - protein, 124 aa, Neisseria meningitidis; identical to SEQ ID NO: 3797

SEQ ID NO: 36017 - protein, 702 aa, Neisseria meningitidis
MKISFHLALLPTLIIASFPVAAADTQDNGEHYTATLPTVSVVGQSDTSVLKGYINYDEAAVTRNGQLIKETPQTIDTLNIKNKNYGTNDLSSILEGNAGIDAAYDMRGESIFLRGFQADASDIYRDGVRESGQVRRSTANIERVEILKGPSSVLYGRTNGGGVINMVSKYANFKQSRNIGAVYGSWANRSLNMDINEVLNKNVAIRLTGEVGRANSFRSGIDSKNVMVSPSITVKLDNGLKWTGQYTYDNVERTPDRSPTKSVYDRFGLPYRMGFAHRNDFVKDKLQVWRSDLEYAFNDKWRAQWQLAHRTAAQDFDHFYAGSENGSLIKRNYAWQQTDNKTLSSNFTLNGDYTIGRFENHLTVGLDYSREHRNPTLGYNRPFTASINPYDRASWPASGRLQPVFTQNRHKADSYGIFVQNIFSATPDLKFVLGGRYDKYTFNSENKLTGNSRQYSGHSFSPNIGAVWNINPVHTLYASYNKGFAPYGGRGGYLSIDTSSSAVFNADPEYTRQYETGVKSSWLDNRLDTTLSAYQIERFNIRYRPDAENNPYTWAVGGKHRSRGVELSAIGQIIPKKLYLRGSLGVMQAKVVEDKKNPDRVGIHLNNTSNVTGNLFFRYTPTENLYGEIGVTGTGKRYGYNSRNKEVTTLPGFARVDAMLGWNHKNVNVTFAAANLFNQKYWRSDSMPGNPRGYTARVNYRF

SEQ ID NO: 36018 - protein, 391 aa, Neisseria meningitidis; identical to SEQ ID NO: 2276

SEQ ID NO: 36019 - protein, 387 aa, Neisseria meningitidis; identical to SEQ ID NO: 9799

SEQ ID NO: 36020 - protein, 421 aa, Neisseria meningitidis; identical to SEQ ID NO: 19787

SEQ ID NO: 36021 - protein, 185 aa, Neisseria meningitidis; identical to SEQ ID NO: 357

SEQ ID NO: 36022 - protein, 405 aa, Neisseria meningitidis; identical to SEQ ID NO: 19889

SEQ ID NO: 36023 - protein, 308 aa, Neisseria meningitidis; identical to SEQ ID NO: 9802

SEQ ID NO: 36024 - protein, 106 aa, Neisseria meningitidis; identical to SEQ ID NO: 19891

SEQ ID NO: 36025 - protein, 919 aa, Neisseria meningitidis; identical to SEQ ID NO: 19900

SEQ ID NO: 36026 - protein, 145 aa, Neisseria meningitidis; identical to SEQ ID NO: 19905

SEQ ID NO: 36027 - protein, 483 aa, Neisseria meningitidis; identical to SEQ ID NO: 5802

SEQ ID NO: 36028 - protein, 674 aa, Neisseria meningitidis
MNDMTLYLIIALVPLAGSLIAGLFGNKIGRAGAHTVTILGVAVSAVLSAYVLWGFLNGSRAKFDENVYTWLTMGGLDFSVGFLVDTMTAMMMVVVTGVSLMVHIYTIGYMHDEKVGYQRFFSYISLFTFSMLMLIMSNNFIQLFFGWEAVGLVSYLLIGFYFKRPSATFANLKAFLINRVGDFGFLLGIGLVLAYFGGSLRYQDVFAYLPNVQTATIQLFPSVEWSLITVTCLLLFVGAMGKSAQFPLHVWLPDSMEGPTPISALIHAATMVTAGLFMVSRMSPIYEMSSTALSVIMVIGAITALFMGFLGVIQNDIKRVVAYSTLSQLGYMTVALGASAYSVAMFHVMTHAFFKALLFLAAGSAIIGMHHDQDMRHMGNLKKYMPITWLTMLIGNLSLIGTPFFSGFYSKDSIIEAAKYSTLPGSGFAYFAVLASVFVTAFYAFRQYFMVFHGEEKWRSLPEHHSDGHGEEHHGLGKNDNPHESPLFVTLPLILLAIPSVIIGYVAIGPMLYGDFFKDVIFVNTDAHPTMHIMKEEFHGALAMVSHSLHSPVLYLAIAGVLSAWLLYVKLPHLPAKIAQAFRPVYVLFENKYYLDALYFNVFAKGTRALGTFFWKVGDTAIIDNGIVNGSAKLVGAIAAQVRKAQTGFIYTYAAAMVFGVLVLLGMTFWGLFR

SEQ ID NO: 36029 - protein, 339 aa, Neisseria meningitidis
MMKIKALMIAAALLAAADVHAAPQKAKTASAKVAKVAKVAKVAATAQKEAAPAQQQGGIRFSDGIAAVADNEVITRRRLAEAVAEAKANLPKEAQISESELSRQVLMQLVNQSLIVQAGKRRNIQASEAEIDAVVAKNSALKNLSPAQRRDFADNIIAEKVRQQAVMQNSRVSEAEIDAFLEQAQKQGITLPEGAPLRQYRAQHILIKADSENAAVGAESTIRKIYGEARSGTDFSSLARQYSQDASAGNGGDLGWFADGVMVPAFEEAVHALKPGQVGAPVRTQFGWHIIKLNEVRDAGTPQERIRNSVRQYIFQQKAEQATVNLLRDLHSGAYVDIR

SEQ ID NO: 36030 - protein, 792 aa, Neisseria meningitidis
VLALGLCFGTHCAAADAVAAEETDNPTAGGSVRSVSEPIQPTSLSLGSTCLFCSNESGSPERTEAAVRGSGEASIPEDYTRIVADKVEGQSQVQVRAEGNVVVERNRTTLNTDWADYDQSGDTVTAGDRFALQQDGTLIRGETLTYNLEQQTGEAHNVRMETEQGGRRLQSVSRTAEMLGEGHYKLTETQFNTCSAGDAGWYVKAASVEADREKGIGVAKHAAFVFGGVPLFYTPWADFPLDGNRKSGLLVPSLSAGSDGVSLSVPYYFNLAPNLDATFAPGVIGERGAVFDGQVRYLRPDYAGQSDLTWLPHDKKSGRNNRYQAKWQHRHDISDTLQAGVDFNQVSDSGYYRDFYGNKEIAGNVNLNRRVWLDYGGRAAGGSLNAGLSVLKYQTLANQSGYKDKPYALMPRLSADWRKNTGRAQIGVSAQFTRFSHDSRQDGSRLVVYPDIKWDFSNSWGYVRPKLGLHATYYSLNRFGSQEARRVSRTLPIVNIDSGATFERNTRMFGGGVLQTLEPRLFYNYIPAKSQNDLPNFDSSESSFGYGQLFRENLYYGNDRINTANSLSAAVQSRILDGATGEERFRAGIGQKFYFKDDAVMLDGSVGKKPRNRSDWVAFASGSIGSRFILDSSIHYNQNDKRAENYAVGASYRPAQGKVLNARYKYGRNEKIYLKSDGSYFYDKLSQLDLSAQWPLTRNLSAVVRYNYGFEAKKPIEVLAGAEYKSSCGCWGAGVYAQRYVTGENTYKNAVFFSLQLKDLSSVGRNPADRMDVAVPGYIPAHSLSAGRNKRP

SEQ ID NO: 36031 - protein, 149 aa, Neisseria meningitidis; identical to SEQ ID NO: 31964

SEQ ID NO: 36032 - protein, 216 aa, Neisseria meningitidis; identical to SEQ ID NO: 7775

SEQ ID NO: 36033 - protein, 228 aa, Neisseria meningitidis; identical to SEQ ID NO: 380

SEQ ID NO: 36034 - protein, 316 aa, Neisseria meningitidis; identical to SEQ ID NO: 5807

SEQ ID NO: 36035 - protein, 682 aa, Neisseria meningitidis
VIPAYIPLRSFGIRKIPNITQFLPEYSLNKTVFNAQTIIGWGLRPTTHQARAFAQSHGLPFVALEDGFLRSLGLGVAGYPPFALVYDDIGIYYDTTRPSRLEQLILAANMPSEMLNQAQQAIDLILTHRLSKYNHALDFSDGLVQDSKNIVLVIDQTFGDMAIQYGGADEATFRQMFQTALAENPDAEIWVKTHPDVLSGKKQGYLTDLAQQPRVRLLAEDINPISLLQAVDKVYCVTSQMGFEALLCGKPLVTFGLPWYAGWGVSDDRHPKIDSLVQTQRRAPRNLLQLFAAAYLQYSRYLNPNTGEAGSLFDVIDYLATVKRKNDKLRGELYCVGMSLWKRAVAKPFFNVPSCRLKFISSTQKLAGVKLSDDARILAWGNGKEAIVRFAEQHHIPLLRMEDGFIRSVGLGSNLVPPLSLVTDDMSIYFNAETPSRLEYILQNQNFDDQDFQTALKLQKMLTENHISKYNVGSSDFTAPSTDKTVILVPGQVEDDASIRYGSPQIYRNLDLLRTVRERNPNAYIIYKPHPDVVSGNRIGHISPEDAARYADQTAEQTDILTCLQYADEVHTMTSLTGFEALLRGKKVSCYGLPFYAGWGLTQDLLPIPRRSRRLELWQLIAGTLIHYPDYIHPETHQAINAETAAQILIRQKNMQKNNNGLHRGCFAKKLGKIKQLYRSFK

SEQ ID NO: 36036 - protein, 322 aa, Neisseria meningitidis; identical to SEQ ID NO: 25990

SEQ ID NO: 36037 - protein, 171 aa, Neisseria meningitidis
LSEQSEILQKMPIEKQKEKSMVDAVVKTPEFLPFTSVGIFRFGADITEYKNILETFMYEPPDEFRTEYYESPDSNLLISVKKNKIISIFCYQELYFMGVNIIGLNFEDFKQLFHHPKSYGVDKYYLSNESYPTYVYEFDEIGVQAWEAKGKIVTIIAGGKDNYSTEPYYDE

SEQ ID NO: 36038 - protein, 369 aa, Neisseria meningitidis; identical to SEQ ID NO: 19927

SEQ ID NO: 36039 - protein, 460 aa, Neisseria meningitidis
MVSIFDIFKIGIGPSSSHTVGPMKAAAAFAAGLDAQAVRIVIDIYGSLALTGYGHGTFDALMLGLEGSLPHDIPLVGIPERLERIRTQHILRLNGQEIRFIPDRDLNILGNQVLPKHPNGLRFTAYASDGTVLNEQVYYSVGGGFVVTEEDFDRQAETEKAVPYPYTSCAELLARCRLNRLDISEVVLANEAALAGCGEAEIRRRAAAVAEVMEGCIKRGLGADGELPGGLNARRRAPQLAAKLKVLRETEIVNTQLWPMVYAMAVNEENAAGGRVVTAPTNGAAGIIPAVLHYFRKFNPHATQERVENFLLTAGAIGILYKTNASISGADVGCQGEVGVACSMAAGAYAVIGGTPKQVENAAEMAMEHHLGLTCDPVGGLVQIPCIERNGIAAEKALKLGTLALLEDGTDKKVSLDEVIRTMLQTGRDMKATYKETSLAGLAATLRKKAVPVSVRVVEC

SEQ ID NO: 36040 - protein, 143 aa, Neisseria meningitidis; identical to SEQ ID NO: 362

SEQ ID NO: 36041 - protein, 151 aa, Neisseria meningitidis; identical to SEQ ID NO: 9823

SEQ ID NO: 36042 - protein, 104 aa, Neisseria meningitidis; identical to SEQ ID NO: 1772

SEQ ID NO: 36043 - protein, 186 aa, Neisseria meningitidis; identical to SEQ ID NO: 104

SEQ ID NO: 36044 - protein, 273 aa, Neisseria meningitidis; identical to SEQ ID NO: 19931

SEQ ID NO: 36045 - protein, 134 aa, Neisseria meningitidis; identical to SEQ ID NO: 1773

SEQ ID NO: 36046 - protein, 136 aa, Neisseria meningitidis; identical to SEQ ID NO: 1774

SEQ ID NO: 36047 - protein, 145 aa, Neisseria meningitidis; identical to SEQ ID NO: 1775

SEQ ID NO: 36048 - protein, 130 aa, Neisseria meningitidis; identical to SEQ ID NO: 7797

SEQ ID NO: 36049 - protein, 234 aa, Neisseria meningitidis; identical to SEQ ID NO: 19933

SEQ ID NO: 36050 - protein, 106 aa, Neisseria meningitidis; identical to SEQ ID NO: 19934

SEQ ID NO: 36051 - protein, 399 aa, Neisseria meningitidis; identical to SEQ ID NO: 26006

SEQ ID NO: 36052 - protein, 129 aa, Neisseria meningitidis; identical to SEQ ID NO: 7802

SEQ ID NO: 36053 - protein, 132 aa, Neisseria meningitidis; identical to SEQ ID NO: 10765

SEQ ID NO: 36054 - protein, 125 aa, Neisseria meningitidis; identical to SEQ ID NO: 19937

SEQ ID NO: 36055 - protein, 187 aa, Neisseria meningitidis; identical to SEQ ID NO: 26011

SEQ ID NO: 36056 - protein, 154 aa, Neisseria meningitidis; identical to SEQ ID NO: 741

SEQ ID NO: 36057 - protein, 74 aa, Neisseria meningitidis; identical to SEQ ID NO: 24022

SEQ ID NO: 36058 - protein, 87 aa, Neisseria meningitidis; identical to SEQ ID NO: 19939

SEQ ID NO: 36059 - protein, 287 aa, Neisseria meningitidis
MSEIGLVKIYFGKVRDLYEIDDKRMLMVASDRLSAFDVILDDLIPSKGEILTQISNFWFKKLVHIMPNHFTGQTVYDVLPENEAKALEKRAVVAKKLTPVKVEAIVRGYLAGSGWKDYQKTGSVCGIQLPEGMQEAQQLPEVIFTPSTKAAVGDHDENISFEECERIIGKELAAEVRAKAIQLYTEAAEYAKSRGIIICDTKFEFGLDTNGTLTLMDEVLTPDSSRFWPADQYKVGTNPPSFDKQFVRDWLEQSGWNKKAPAPKVPADVIQKTVEKYREALTLLTQD

SEQ ID NO: 36060 - protein, 492 aa, Neisseria meningitidis
  misc_feature 2, 3, 4: 'Xaa' is any amino acid
VXXXPHTLSTLKTADNRPASVYLKKDKPTLIKFWASWCPLCLSELGQTEKWAQDAKFSSANLITVASPGFLHEKKDGDFQKWYAGLNYPKLPVVTDNGGTIAQSLNISVYPSWALIGKNGDVQRIVKGSINEAQALALIRDPNADLGSLKHSFYKPDTQKKDSKIMNTRTIYLAGGCFWGLEAYFQRIDGVVDAVSGYANGNTKNPSYEDVSYRHTGHAETVKVTYDADKLSLDDILQYFFRVVDPTSLNKQGNDTGTQYRSGVYYTDPAEKAVIAAALKREQQKYQLPLVVENEPLKNFYDAEEYHQDYLIKNPNGYCHIDIRKADEPLPGKTKTAPQGKGFDAATYKKPSDAELKRTLTEEQYQVTQNSATEYAFSHEYDHLFKPGIYVDVVSGEPLFSSADKYDSGCGWPSFTRPIDAKSVTEHDDFSYNMRRTEVRSHAADSHLGHVFPDGPRDKGGLRYCINGASLKFIPLEQMDAAGYGALKSKVK

SEQ ID NO: 36061 - protein, 687 aa, Neisseria meningitidis
  misc_feature 2, 3, 4: 'Xaa' is any amino acid
VXXXVGSILGHGAYQAPDWTADWLHRELVAWLDLTAQETYGKKFDEVSPEEQAVLKTRLADEYRNQSRVKEDGSVVVSETRVKAIESILPYYHGVYSDDPKFQTTREHFAMKNNTLPSQEAREKLFNFFFWTSWSASTNRPDENFTYTNNWPHEPLINNVPTTENYMWSFTSVVLLLMGIGLLMWGYSFLTKHEEVEVPSEDPISKIQLTPSQKALGKYVFLTVALFVVQVLLGGLTAHYTVEGQGFYGIDEALGFEMSDWFPYALTRTWHIQSAIFWIATGFLTAGLFLAPIVNGGKDPKFQRAGVNFLYIALFIVVGGSYAGNFFALTHILPPEFNFWFGHQGYEYLDLGRFWQLLLMVGLLLWLFLMLRCTVSAFKEKGVDKNLLAIFVASMVGVGVFYAPGLFYGEKSPIAVMEYWRWWVVHLWVEGFFEVFATAAFAFVFYNMGFVRRSTATASTLAAAAIFMLGGVPGTLHHLYFSGSTSASMAIGACFSALEVVPLVLLGREAYEHWSYQHLSDWAKRLRWPLMCFVAVAFWNMIGAGVFGFLINPPISLFYIQGLNTSAVHAHAALFGVYGFLALGFVLLVARYLKPNVQFDDKLMTWGFWLLNGGLVGMIAISLLPVGVIQAYASITHGLWYARSEEFLQMEILDTLRWVRTAADLIFIGGAICVAIQATKIVFGRDK

SEQ ID NO: 36062 - protein, 121 aa, Neisseria meningitidis
VWGRYEKLRIFYDPTRAIYDSGADYLTREKHRFVVIANSAWGLLLNLSCYYDKVLEKRKIPFGKQEIDDDMDKVSAHKRKFKDISEIKVGDGWEYPFNYEQGMKELDEVLLKYIPFFEEER

SEQ ID NO: 36063 - protein, 71 aa, Neisseria meningitidis; identical to SEQ ID NO: 1238

SEQ ID NO: 36064 - protein, 91 aa, Neisseria meningitidis; identical to SEQ ID NO: 1783

SEQ ID NO: 36065 - protein, 322 aa, Neisseria meningitidis
  misc_feature 3, 4: 'Xaa' is any amino acid
VCXXLTAATPALADITVYNGQHKEAAQAVADAFTRATGIKVKLNSAKGDQLAGQIKEEGSRSPADVFYSEQIPALATLSAANLLEPLPASTINETRGKGVPVAAKKDWVALSGRSRVVVYDTRKLSEKDLEKSVLNYATPKWKNRIGYAPTSGAFLEQVVAIVKLKGEAAALKWLKGLKEYGKPYAKNSVALQAVENGEIDAALINNYYWHAFAREKGVQNVHTRLNFVRHRDPGALITYSGAAVLKSSQNKDEAKKFVAFLAGKEGQRALTAVRAEYPLNPHVVSTFNLEPIAKLEAPQVSATTVSEKEHATRLLEQAGMK

SEQ ID NO: 36066 - protein, 451 aa, Neisseria meningitidis
MSDFFHSDVLSVSELNAFAKSILENHLAGLWIAGEVSNLTRAASGHYYFSLKDSRAQVRCAMFKGAAARLAKPLKEGDHIEVAGKISIYETRGEFQITVNEVRLKGLGQLYEAYERLKAQLQAEGAFAAERKKPLPARPQCIGIVTSLAAAALRDVVTTLKRRAPEIPVIVYPTPVQGTGSEFQIAQAIKTASQRAECDVLIVCRGGGSIEDLWAFNEEPVVRAIEACTVPVVSGVGHETDFTLADFVADVRAPTPTGAAELVSPNRQESLHRLAQAQGRLKTVLEQRYFDASQKLDWLARQIRHPRQKLDEQRASIGKLAQTLSYSMKQNLRAHTARFERQTQALQHYRPDVSVCKNNIVRLQTALPAAFSQLLTHRRQSLTAQAALLEAVSPQHILERGFSVVKDTRGQVIRNADVLKQGQKLHITFADGETDVRVSKEQGQQDLFDCI

SEQ ID NO: 36067 - protein, 117 aa, Neisseria meningitidis; identical to SEQ ID NO: 3854

SEQ ID NO: 36068 - protein, 90 aa, Neisseria meningitidis
VFAVIFFSTLGCILAWIRDIPKIKSKKILARSLYIIGIINVIIGYVLIKNILASVSDEDGIKYVAIYLSNLFFWTVLMYVLVKRLSKKPS

SEQ ID NO: 36069 - protein, 37 aa, Neisseria meningitidis; identical to SEQ ID NO: 970

SEQ ID NO: 36070 - protein, 740 aa, Neisseria meningitidis
LKFAQEKYWRKEISEQELLAVAKDLREKNWKHQVAANADFVAVGDFTFYDHILDLQVATGAIPARFGFDSQNLSLEQFFQLARGNKDQFAIEMTKWFDTNYHYLVPEFHADTGFKANAKHYVQQLQEAQALGLKAKPTVVGPLTFLWVGKEKGAVEFDRLSLLPKLLPVYVEILTALVEAGAEWIQIDEPALAVDLPKEWVEAYKDVYATLSKVNAKILLSTYFGSVAEHAALLKALPVDGLHIDLVRAPEQLDAFADYDKVLSAGVIDGRNIWRANLNKVLETVEPLQAKLGDRLWISSSCSLLHTPFDLSVEEKLKANKPDLYSWLAFTLQKNHELRVLKDALNEGRDYVAEELAASQAAADSRANSSEIHRADVAKRLADLPANADQRKSPFADRIKAQQAWLNLPLLLTTNIGSFPQTTEIRQARSAFKKGELSAADEAAMKKEIALVVEEQEKLDLDVLVHGEAERNDMVEYFGELLSGFAFTQYGWVQSYGSRCVKPPIIFGDVSRPEAMTVAWSTYAQSLTKRPMKGMLTGPVTILQWSFVRNDIPRATVCKQIALALNDEVLDLEKAGIKVIQIDEPAIREGLPLKRADWDAYLNWAGESFRLSSAGCEDSTQIHTHMCYSEFNDILPAIAAMDADVITIETSRSDMELLTAFGEFKYPNDIGPGVYDIHSPRVPTEAEVEHLLRKAIEVVPVERLWVNPDCGLKTRGWKETLEQLQVMMNVTRKLRAELAK

SEQ ID NO: 36071 - protein, 362 aa, Neisseria meningitidis; identical to SEQ ID NO: 26024

SEQ ID NO: 36072 - protein, 137 aa, Neisseria meningitidis; identical to SEQ ID NO: 1900

SEQ ID NO: 36073 - protein, 729 aa, Neisseria meningitidis; identical to SEQ ID NO: 19950

SEQ ID NO: 36074 - protein, 407 aa, Neisseria meningitidis; identical to SEQ ID NO: 5647

SEQ ID NO: 36075 - protein, 135 aa, Neisseria meningitidis; identical to SEQ ID NO: 15867

SEQ ID NO: 36076 - protein, 413 aa, Neisseria meningitidis
MQKWQTELYSTPLWLLQTLLIVSAASAVILFLTRKTRFGREFAYILRLCLTPKSAVKVLLLITEMITLVLTEMRLNVLSTFMSKGLYDSMQDLNASAFWMFAAMNAGVVLIRAFNNVVNDFLNQGLAIKWSERLNEVLTARWLADKNYYRLQMRRHAPDNIDQRIQQDAQDFIASTIEFVRGMVNSVVTSLEFAVVLWGLAGILTVFGFDIPRGIVWFVFIFVILATFIAMWIGNPLIRYNYENEKLNGDYRYSLIRVRDHAESVAFYSGEKHEHDRLADRFKAIIRNRWRIARQSVCLSGFNDMFTNGIKLFPIILQAPRLFAGQIKIGDIQQTVQAFARLQNALSFFRMFYNKFTAYRARLERLYGFLLSTEEKHSTQQPEISEVSDGIALECKAAAAFARIGGSFCTAEA

SEQ ID NO: 36077 - protein, 203 aa, Neisseria meningitidis; identical to SEQ ID NO: 19191

SEQ ID NO: 36078 - protein, 356 aa, Neisseria meningitidis
MKIVLTTSMAGLGGTETATVRLGRLLKRRGHDIILASSDGPFVGEAQASGIRWQPVDFYRGGLAGYLKSTFAYARMLRREQPDIIDCQMARVVPACALAAKIVSPKTKIIYHSHGLDAATYPKIAKLFDKLGVYIIGNCKHEREKLIRHGFPADRIVYAYNALPPPEFPFRKTEKECAVLGTLSRLDTIRAVHLMLDIFKKMVDRDMPVRLNVAGIGEEMDNLKAQAERLGIDGKVTFLGGVRDLTAYFKDVDILVNTPHCIGDHGAGVGNNILEAGLYDTPVVTYDMAGISEMVVNGETGYCIPFGDEEAFIAAVDTLVRQPELREAMGKRLHAHVAALCSDDEIYRTTMAAYTM

SEQ ID NO: 36079 - protein, 330 aa, Neisseria meningitidis; identical to SEQ ID NO: 19957

SEQ ID NO: 36080 - protein, 392 aa, Neisseria meningitidis
MAKEKFERSKPHVNVGTIGHVDHGKTTLTAALTTILAKKFGGAAKAYDQIDNAPEEKARGITINTSHVEYETETRHYAHVDCPGHADYVKNMITGAAQMDGAILVCSAADGPMPQTREHILLARQVGVPYIIVFMNKCDMVDDAELLELVEMEIRDLLSSYDFPGDDCPIVQGSALKALEGDAAYEEKIFELAAALDSYIPTPERAVDKPFLLPIEDVFSISGRGTVVTGRVERGIIHVGDEIEIVGLKETQKTTCTGVEMFRKLLDEGQADNVGVLRGTKREDVERGQVLAKPGTITPHTKFKAEVYVLSKEEGGRHTPFFANYRPQFYFRTTDVTGAVTLEEGVEMVMPGENVTITVELIAPIAMEEGLRFAIREGGRTVGAGVVSSVIA

SEQ ID NO: 36081 - protein, 455 aa, Neisseria meningitidis
MSSPSNTNRQTSSRLTYILTVAGATVGFGATWRFPYLVGENGGGAYVFLFCIAMLVIGIPMILVENVIGRRKGVNALDAFGGPMNGKPVAKIWKLVGWMGLVGAFGIMAYYMVLGGWVISYIVNIISGNLNISSPVNGELTKSFFTEHIENSPWEIAFYTFLFVVVNQWILVKGVIGGIEKAAKYLMPLLFLFLIAMVVRNVTLPGAMEGITFYLKPDFSKITTELFVFVLGQVFFALSLGFGVMITLSSYLDKNENLVQTAVITAITNTIIAVLAGFMIFPSLFSFGVAPNSGPTLVFQSLPIVFSHMWAGPVFAVIFFSLLLIAALTTSLTIYEVLITTIQEKTKIRRTAAITIVLSAIFIFGNIPSILSYGPWKDVSIFGKNIFDAFDYISGNILFMLTALGSALFVGFVMKDEAKDELLYKGNHITVNIWFAYVKYLVPLVILLIFVSNLF

SEQ ID NO: 36082 - protein, 258 aa, Neisseria meningitidis; identical to SEQ ID NO: 19959

SEQ ID NO: 36083 - protein, 300 aa, Neisseria meningitidis; identical to SEQ ID NO: 19961

SEQ ID NO: 36084 - protein, 399 aa, Neisseria meningitidis
MWTGFFSKSGTGIAEERHQNRRACTDVPLLAERNSKHPDRPYGFAKYRQSGLDIYAWHGIYFFPRFPFIDIDRIRWVRVGLKAFKHYIRENGLPDLIHAHRMNYAGILAQKISQKYGIPYVVTKHSSTITRGLIRPHQWQPMKNAAAHAAARLAISRHFAHVLQHKYGCEWQYLPNILGGIFNRPFEQREKNNKPHFVFCTVSHLRRLKGHDVLLTAFARALAQCPQLRLNIGGSGQEEQRLKQQAADLGITHAVTFLGALQPEAVLDLMRNSDAFVLASRTETFGVVYIEALSQGLPVIATRCGGAESIVSDGNGYLVPVDDDDALADALIKMYEHHSDFEPARLRENCLNEFGENAVIGRLIGIFRQAIAEYGKKIPVKYSGLTKIRTRRRSRRQYK

SEQ ID NO: 36085 - protein, 524 aa, Neisseria meningitidis; identical to SEQ ID NO: 19965

SEQ ID NO: 36086 - protein, 728 aa, Neisseria meningitidis
MKTDIQTELTQALLPHEKVWANEEKTILAKNILLDLVEKTDPTIIGLLLNNDELKRHFFVEVNGVLVFKLQDLRFFLDKHSVNNSYTKYANRIGLTDGNRFLKDNSDIVLDFPFKDCVLNGGQSTEEGEEIYFKRSNSQPASQPASQPASQPASQPASQPIYTKLTRKRQEIFFNQTLAFDEIDRLFDAKAFSKFSRYTADGKQAVGEIKRHSDGTPAENLIIKGNNLIALHSLAKQFKGKVKLIYIDPPYYFVKKKQQDSFGYNTNFKLSTWLTFMKNRLSIAKELLTDDGIIVISIDDDGNAYLKILLDEIFGFENFIGNLPTIMNLKGNNDEYAFAGTHEYTLVFAKNKDKSTFYEFPIDEDNFLEKWEEDEIGFYKKGAPMRATGTEDKREDRPEMFYPFLVKNNTVSTITDEEFSQIYNKDLEVFNDDFIQKLKEKYENLGYNFILPIADKQWGRWRWGYSIKNKARLQTDIIVSQSKNGISLYKKQRPELDDLPTKKPKTIFYKPEYSSGNGTEQMKNLFGEKAFKNPKPEELIQDFITITTNESDIVLDYHLGSGTTAAVAHKMNRQYIGIEQMDYIETLAVERLKKVIDGEQGGISKAVNWQGGGEFVYAELAPFNETAKQQILACEDSDGIKTLFEGLCERYFLKYNVSVNEFSQIIQEPEFQSLPLDEQKQMVLEMLDLNQMYVSLSEMDDEQFADCLNDDDKAVSRAFYQAEKKNGE

SEQ ID NO: 36087 - protein, 327 aa, Neisseria meningitidis; identical to SEQ ID NO: 294

SEQ ID NO: 36088 - protein, 508 aa, Neisseria meningitidis
MDYPPLKGAALAWVTLSLGLAVFMEVLDTTIANVAVPVIAGNLGAATTQGTWVITSFAVANAVSVPLTGFLAKRIGEVKLFTAAAVGFVITSWLCGIAPNLQSLVVFRILQGFIAGPLIPLSQSLLMASYPPAKRTLALALWAMTVVVAPVLGPILGGWISGNWHWGWIFFINIPIGIISAWITWKHLKCRETETVKMPTDYVGLTLMVVGIGALQMMLDRGKELDWFASGEIITLGVVALVCLSYFIVWELGEKYPIVDLSLFKDRNFTVGIIATSLGFMVYMGTLTLLPLVLQTNLGYTSTWAGLAAAPVGILPVFLSPLIGRFGNKIDMRLLVTASFLTFAFTFYWRTDFYADMDIGNVIWPQFWQGVGVAMFFLPLTTITLSHMKGGQIAAAGSLSNFLRVLMGGVGVSVVSTLWERREALHHTRFAEHITPYSATLHETAAHLSQHGVSDIQTAGIINNTITQQGFIIGSNEIFMAGSLLFIIMIPVIWLAKPPFHSSGGGGH

SEQ ID NO: 36089 - protein, 507 aa, Neisseria meningitidis; identical to SEQ ID NO: 19972

SEQ ID NO: 36090 - protein, 465 aa, Neisseria meningitidis
MKKIQADVVVIGGGTAGMGAFRNARLHSDNVYLIENNVFGTTCARVGCMPSKLLIAAAEARHHALHTDPFGVHLDKDSIVVNGEIMQRVKSERDLVGFVVADVEEWPADKRIMGSAKFIDEHTVQIDEHTQITAKSFVIATGSRPVILPQWQSLGNRLIINDDVFSWDTLPKRVAVFGPGVIGLELGQALHRLGVKVEIFGLGGIIGGISDPVVSDEAKAVFGEELKLHLDAKTEVKLDADGNVEVHWEQDGEKGVFVAEYMLAAVGRRPNVDNIGLENINIEKDARGVPVADPLTMQTSIPHIFIAGDASNQLPLLHEAADQGKIAGDNAGRYPNIGGGLRRSTIGVVFTSPQIGFVGLKYAQVAAQYQADEFVIGEVSFKNQGRSRVMLVNKGHMRLYAEKATGRFIGAEIVGPAAEHLAHLLAWAHQMKMTVPQMLDMPFYHPVIEEGLRTALRDADAKLKA

SEQ ID NO: 36091 - protein, 209 aa, Neisseria meningitidis; identical to SEQ ID NO: 7848

SEQ ID NO: 36092 - protein, 622 aa, Neisseria meningitidis
MSQALPYRPDIDTLRAAAVLSVIVFHIEKNWLPGGFLGVDIFFVISGFLMTAILLREMSGGGGFSLKAFYIRRIKRILPAFFAVLAATLIGGFFLFTKDDFFLLWKSALTALGFASNLYFARGKDYFAPAQEEKPLLHIWSLSVEEQFYFVFPILLLLVVRKSLRVQAGFLAALCALSLATSFIPSAFDKYYLPHLCACEMLVGSLTAVWMRCRQPAVGRRCAAAGALFAVCILSTCLFSYSEQTAYFPGPAALIPCLAVAALIYFNHYEHPLKKFFQWKITVAAGLISYSLYLWHWPILAFMRYIGPDNLPPYSPAAAIVLTLAFSLISYHCIEKPFKKWQGSFAQSVLWIYALPMLILGAGSFFAMRLPFMAQYDRLGLTRSNTSCHNNTGKQCLWGDTEKQPELLILGDSHADHYKTFFDAVGKKEKWSATMVSADACAYVEGYASRVFQNWAACRAVYRYAEEHLPRYSKVVLAMRWGSQMPENSRSLAYDAGFFQKFDRMLHKLSSEKQAVYLMADNLASSYNVQRAYILSSRIPGYRQTLRPDDESTLKANARIRELAAKYPNVYIIDAAAYIPANFQIGGLPVYSDKDHINPYGGTELAKRFSEKQRFLDTRHNH

SEQ ID NO: 36093 - protein, 174 aa, Neisseria meningitidis
MSRVAKNPVTVPAGVEVKFGTEALVIKGKNGELSFPLHSDVAIEFNDGKLTFVANNSSKQANAMSGTARALVSNMVKGVSEGFEKRLQLIGVGYRAQAQGKILNLSLGFSHPIVYEMPEGVSVQTPSQTEIVLTGSDKQVVGQVAAEIRTFRAPEPYKGKGVRYVAKWKKPRKI

SEQ ID NO: 36094 - protein, 325 aa, Neisseria meningitidis
MQENPTVWLFDLDNTLHNADAGLFTLINRAMTRYMARRLKLSESAASDLRQDYWHRYGATLAGLQIHHPEIDIAEFLRESHPIDAILTRLHGMADTENTLCRLNGRKAVFSNGPSFYVRAVVGALGLENRFDALFGTDDFGLLYKPNPQAYLNVCRLLDVPPECCIMVDDSADNLHQAKALGMKTVRFGAKVHDLPFIDASVSDMAQLARYAETLSEHRQNHYNTHTPPKIRKNVMRKTFLILMTAAALLSGCAWETYQDGNGKTAVRQKYPAGTPVYYQDGSYSKNMNYNQYRPERHAVLPNQTGNNADEEHRQHWQKPKFQNR

SEQ ID NO: 36095 - protein, 92 aa, Neisseria meningitidis; identical to SEQ ID NO: 26044

SEQ ID NO: 36096 - protein, 433 aa, Neisseria meningitidis
MYWERGLHMYKASAVVPTGYVRVGNTAPLVGEDTQRYASFWGDGYDVYRQLRWQQIPEKQRKAFKKAAKSKKTVMFAGREYGISKQNLSDVWDDFEDAMELKAFPCLSSLFLTKWHKNLYEYLEEYPFITRLCLENHGQTVLDFSNTRITDLSVDMTGVESLYLNEGLDSLNLKGEIKENCKVYTAEKGAGLILEVGKSVPKVRGLENLTAVNVMGIADFDMQNLSETYPKLKTIRLWGKPGNIFNFSAVSGFEDLEVFTTVDLFGFGADDIPHPDRLPKLHRLWMSSLPEEAAKAVKKLYKKRKEDGLDLWIEKARKPEWLAQNFDNPFRDWDGAEHIPKSHAKKAAELYRKTRAGVVKLLGNPPENIGEELAEAVKAYTGGFNKMDKKLFIDTVEREDIAEALETILDLIPEGSCADKEKLFEIFDKNRNF

SEQ ID NO: 36097 - protein, 89 aa, Neisseria meningitidis; identical to SEQ ID NO: 3886

SEQ ID NO: 36098 - protein, 170 aa, Neisseria meningitidis; identical to SEQ ID NO: 7849

SEQ ID NO: 36099 - protein, 1010 aa, Neisseria meningitidis
MFWIVLIVILLLALAGLFFVRAQSEREWMREVSAWQEKKGEKQAELPEIKDGMPDFPELALMLFHAVKTAVYWLFVGVVRFCRNYLAHESEPDRPVPPASANRADVPTASDGYSDSGNGTEEAETEEAEAAEEEAADTEDIATAVIDNRRIPFDRSIAEGLMPSESEISPVRPVFKEITLEEATRALNSAALRETKKRYIDAFEKNETAVPKVRVSDTPMEGLQIIGLDDPVLQRTYSRMFDADKEAFSESADYGFEPYFEKQHPSAFSAVKAENARNAPFRRHAGQAEAKSPDVSQGQSVSDGTAVRDACRRVSVNLKEPNKATVSAEARISRLIPESRTVVGKRDVEMPSETENVFTETVSSVGYGGPVYDEAADIYIEEPAAPDAWVVEPPEVPKVPMPAIDIPPPPPVSEIYNRTYEPPTGFEQAQRSRIAETDHLADDVLNGGWQEETAAIADDGSEGAAERSNGQYLSETEAFGHDSQAVCPFENVPSERPSCRVSDTEADEGAFPSEETGAVSEHLPTTDLLLPPLFNPEATQTEEELLENSITIEEKLAEFKVKVKVVDSYSGPVITRYEIEPDVGVRGNSVLNLEKDLARSLGVASIRVVETILGKTCMGLELPNPKRQMIRLSEIFNSPEFAESKSKLTLALGQDITGQPVVTDLGKAPHLLVAGTTGSGKSVGVNAMILSMLFKAAPEDVRMIMIDPKMLELSIYEGIPHLLAPVVTDMKLAANALNWCVNEMEKRYRLMSFMGVRNLAGFNQKIAEAAARGEKIGNPFSLTPDDPEPLEKLPFIVVVVDEFADLMMTAGKKIEELIARLAQKARAAGIHLILATQRPSVDVITGLIKANIPTRIAFQVSSKIDSRTILDQMGAENLLGQGDMLFLPPGTAYPQRVHGAFASDEEVHRVVEYLKQFGEPDYVDDILSGGGSEELPGIGRSGDDETDPMYDEAVSVVLKTRKASISGVQRALRIGYNRAARLIDQMEAEGIVSAPEHNGNRTILVPLDNA

SEQ ID NO: 36100 - protein, 546 aa, Neisseria meningitidis
MKISASDIAKLGIPSLPTDRQGIEYHAKKNNWQHCFEQKGRGRPKKLYEIASLPAEIRAAIMKRQSDELAEKMPKMLPQVRPGTAMSAQALAEAAKLLNEKQRSVADARCAVVAAVLGIKYEYDCSAKAAVAQFLGLLAEGKLDAVTLGNLEKANDRSRSAKVGERTLDGWISAYLKAENAIERLVALAPKTTKAVKPIESYGWLPMFMRFHNIPSAPKLAHSYRRFVQWAEAENMPVNDVPNLSMVRRVWDKLPLIMQERGRKTGAAYKSLLPYVKRDWGALKPNDVWIGDGHSFKAKVAHPVHGRPFKPEVTVIIDGCTRFVVGFSVSLAESCVAVSDALRIGVKHFGLPIIYYSDNGGGQTGKTIDHEITGIIRRRLIGKGWNRTVSRRICCRRKSWRRCLCRRKCERYSAVGWICSATLISQPSWRSITKTRYGSATIAMRRRSMCLIWTASLLLRRRPTAIPARLSRQRVSTNWRKNAEKAKSSGRKMQSSSRMRKSIRHWNRRQLGTSWDIWAETSSRRSMRYCRKRARTTGFSCLRRIC

SEQ ID NO: 36101 - protein, 412 aa, Neisseria meningitidis
MSEQHISTWKSKINALGPGIMMASAAVGGSHLIASTQAGALYGWQIALIIILTNLFKYPFFRFSAHYTLDTGKSLIEGYAEKSRVYLWVFLILCILSATINAGAVAIVTAAIVKMAIPSLMFDVGTVAALIMASCLIILVSGRYRALDRVSKIIIVTLSIATLAAAGHRYVARYADAARFYRADTVDACRFGLPDRADGLDARADNFRHQFFVGNRKTTHQSFRIPRRDFFQRRLYRQCGFGFGFPCTGCVCAIRQRRSSADGGRQIYRAIDQYVRRYHRRLVAPAGGVYRFCLYVRHDDYRCGRLCPCHCRTRAPAARKRQNGQRRILCLEYLGGGQRFGGDFLVRRNGESAQICDDCRFCVRPCVCLAELPFGQRKTQTHIRYECPCIGRLDLSDRLYRFVPIEFGGNVQ

SEQ ID NO: 36102 - protein, 58 aa, Neisseria meningitidis; identical to SEQ ID NO: 1171

SEQ ID NO: 36103 - protein, 97 aa, Neisseria meningitidis; identical to SEQ ID NO: 19990

SEQ ID NO: 36104 - protein, 124 aa, Neisseria meningitidis; identical to SEQ ID NO: 1868

SEQ ID NO: 36105 - protein, 69 aa, Neisseria meningitidis
LIWRHPPPTKKTIRNASDRSGLFSGESAASEHTAHAHIDLPSLAHRVHRRPLRLKIKLPSVVGITTQKK

SEQ ID NO: 36106 - protein, 78 aa, Neisseria meningitidis; identical to SEQ ID NO: 1011

SEQ ID NO: 36107 - protein, 78 aa, Neisseria meningitidis; identical to SEQ ID NO: 1011

SEQ ID NO: 36108 - protein, 63 aa, Neisseria meningitidis; identical to SEQ ID NO: 5865

SEQ ID NO: 36109 - protein, 66 aa, Neisseria meningitidis; identical to SEQ ID NO: 3905

SEQ ID NO: 36110 - protein, 96 aa, Neisseria meningitidis
LRQAFQTAFLKCVYLWCFKRSSESAASAKLKRGINEVKICLNLKGSLHPNPLSRGRGLGRGWQTESLLGRHFQCAGCFYSGLTKIRTRRRSRRQYK

SEQ ID NO: 36111 - protein, 154 aa, Neisseria meningitidis; identical to SEQ ID NO: 19997

SEQ ID NO: 36112 - protein, 171 aa, Neisseria meningitidis
MPDLLTYQYYNMTHISSPRNEFIRGIKESSPILIGLLPWALILGMQGGQKGMSWLEMLLMTSMNFAGGSEFATVNLWAESLPILLIATVTFMINSRHILIGAALAPHLKEIPLKKAVPALFFMCDESWAMAFSEIQKRKAAGLPAFNMPFYSGLTKTSTALPRLSSKRTIL

SEQ ID NO: 36113 - protein, 139 aa, Neisseria meningitidis; identical to SEQ ID NO: 1180

SEQ ID NO: 36114 - protein, 86 aa, Neisseria meningitidis; identical to SEQ ID NO: 19998

SEQ ID NO: 36115 - protein, 81 aa, Neisseria meningitidis
VLLILLIFEYRKFLMATGIVKWFNDAKGFGFITPDEGGEDLFAHFSAINMEGFKTLKEGQRVSFDVTTGPKGKQAANIQAA

SEQ ID NO: 36116 - protein, 69 aa, Neisseria meningitidis; identical to SEQ ID NO: 20002

SEQ ID NO: 36117 - protein, 68 aa, Neisseria meningitidis; identical to SEQ ID NO: 3911

SEQ ID NO: 36118 - protein, 64 aa, Neisseria meningitidis; identical to SEQ ID NO: 631

SEQ ID NO: 36119 - protein, 267 aa, Neisseria meningitidis; identical to SEQ ID NO: 28088

SEQ ID NO: 36120 - protein, 144 aa, Neisseria meningitidis
MKKQITAAVMMLSMIAPAMANGLDNQTFENQVFHTRADAPMQLAELSQKEMKETEGEWIPNAVGGIMGGVGGHFSYMASAIASGSYNRNEHWTAIGGGALIGAMNPINGGRALINGMRGVAVGTVAGGITGYAGSTGKNTDIRR

SEQ ID NO: 36121 - protein, 99 aa, Neisseria meningitidis; identical to SEQ ID NO: 3915

SEQ ID NO: 36122 - protein, 73 aa, Neisseria meningitidis; identical to SEQ ID NO: 3916

SEQ ID NO: 36123 - protein, 72 aa, Neisseria meningitidis; identical to SEQ ID NO: 7897

SEQ ID NO: 36124 - protein, 71 aa, Neisseria meningitidis; identical to SEQ ID NO: 19861

SEQ ID NO: 36125 - protein, 61 aa, Neisseria meningitidis; identical to SEQ ID NO: 5879

SEQ ID NO: 36126 - protein, 219 aa, Neisseria meningitidis; identical to SEQ ID NO: 20022

SEQ ID NO: 36127 - protein, 259 aa, Neisseria meningitidis
MNQKYILSANNNSLIEEIHNTVQSIGYCIVRGLNLNHLDDSRRNKKLFDFLSQLGMLTNHKDDGFKSIFLDIKYRGDDYVINNDITFSEDVGECPLHSDSSFSENPESYLVMYVVKSANDGGNSLFLSSSDIVNQLSKTETGKKHLKTLTGNLYPFKTPASFDKKQGVRWGNILSVNTQMIRFRRDCIYKGIEENRNKVSKEMVLALDYLVNVIKNASDIQEFSAQDDDLIIIDNVNGLHAGTDYTDKNRHYIRARITV

SEQ ID NO: 36128 - protein, 707 aa, Neisseria meningitidis
MGKANAFTAPITVVNYDEQALNNTEARTLVDAVAKKDASVWQFGGESNTLTGLYFRGYQLDARQFSVNGLAGMYGTQGTASVQVGSAQLIKGASTAVNGMNPEGAVSGSVNIETKKAADEGNRKIGLGRFSNNRAQGTFDLGQRFGENKAFGVRANGKLRHGDTPRHGYSEDNKEFAVNADYRGETLRVAFDSIYAKRKTNGGRARMQDIQNAGGRLFGAPDGKTNLLPSWNWQNTAGQTNMLTFEWDAFDNAQITGGIGYNKARYYGTLISPTVCLNATSTCTDMQNTNASGKVTARNYDYNTGTARLTDQYFRTLSMNLSARGEFETGPVTHNWSTAFDRVIRQRKTINGSGNGNSKIEVKANENIANQLASFTADYPNSWENSANLDANIKVNSLALSDTLGFVDNKYRLTLGGRFQAVEYTNKKKSQSGDAKRFSPMLMAAWVPQPDLVVYGNYMEDLEPADIKTDDSGETTMAKPRVSRQFEVGVRKNWGNFVTTLNAFQIKRPGYWRGHTTTKTTKGVTTTLTYGNNSDFARYKAQGGAAGDEQGMERNRGIEFNTYANLLNNTLRPTLGLMYLQSTVKEYPNSRDMLVNGVQVANPRVIAKAGLEWDTPFAKGLTLNGNVSYFGKSYQDTQKQYAFPSYTLIDVGARYKTKLGKNTLTVSSSVENLFNKNYWQVQRGQYDRSFAVVGMPRTYWLKAELDF

SEQ ID NO: 36129 - protein, 239 aa, Neisseria meningitidis; identical to SEQ ID NO: 19973

SEQ ID NO: 36130 - protein, 141 aa, Neisseria meningitidis; identical to SEQ ID NO: 33464

SEQ ID NO: 36131 - protein, 410 aa, Neisseria meningitidis
MPSAHYPEMSEKLMAVLMAMLVTLMPFSIDAYLPAIPEMAQSLGADVHRIEQSLSLFMFGTAFGQVVGGSVSDIKGRKPVALTGLTVYCLAVAAIVFASSAEQLLNLRVVQAFGAGMTVVIVGAMVRDYYSGRKAAQMFALIGIILMVVPLVAPMVGALLQGLGGWQAIFVFLAAYSLVLLGLVQHFLPKPAVGGKIGRDVFGLVAGRFKRVLKTRAAMGYLFFQAFSFGSMFAFLTESSFVYQQLYRVTPHQYAWAFALNIITMMFFNRITAWRLKTGVHPQSILLWGIVVQFAANLSQLAAVLFFGLPPFWLLVACVMFSVGTQGLVGANTQACFMSYFKEEGGSANAVLGVFQSLIGAGVGMAATFLHDGSATVMAATMTASTSCGIALLWLCSHRAWKENGQSEYL

SEQ ID NO: 36132 - protein, 96 aa, Neisseria meningitidis; identical to SEQ ID NO: 20028

SEQ ID NO: 36133 - protein, 68 aa, Neisseria meningitidis; identical to SEQ ID NO: 531

SEQ ID NO: 36134 - protein, 71 aa, Neisseria meningitidis; identical to SEQ ID NO: 3926

SEQ ID NO: 36135 - protein, 46 aa, Neisseria meningitidis
MCAAIMAYFGGFVRTLFDLGVFERGGVKGRGKWFSRFWRRCRRCCA

SEQ ID NO: 36136 - protein, 375 aa, Neisseria meningitidis
MKIVFITTVASSIYGFRAPVIKKLIGKNHQVYAFVSEFSDNELDIIREMGVTPVTYRSNRSGLNPFSDIKSTFLIFKELKKISPDLVFPYFAKPVIFGTFAAKLAGVPRIVGMLEGLGFAFTPQPEGIPLKTKIIKGILIALYRIALPMLESLIVLNPDDKDELTDKYGIKIKNIHILGGIGLDSRQYPYSEADIPDEKEPVKFLFIGRFLKEKGIDDFIRAAEQVKDKYPDTVFTALGAIDKSRGGGDLERLAARDIIRFPGFVNNVSEVIKEHHIFVLPSYYREGVPRSTQEAMAVGRAVITTDVPGYRETVADKVNGFLIEPWNPRILAEKMIYFIENREAVRLMGNASYAIAKDKFDAEKVDLKLLDILKA

SEQ ID NO: 36137 - protein, 337 aa, Neisseria meningitidis
MIFSIIVPIYNVEKYLRCCVDSVLAENFADYEMILVDDGSPDGCGKICDEYAGKYPHIKVIHQENGGLSDARNAGIRAAKGDYLIFLDSDDYWADTNRSKNAGGGGFFDLQQLADKKVDLILHPSSFNYRDIPKGADFSDNDFVRHFETLVEGRYYIANAWTKIVRREIIIKNNLFFPKGYIHEDFPYSLQLARFIKTFAFYDNPFYQYRVLGGSISHNIKYKNFSDVLTHLDRGVDFLVENKNSPIYGGLQKFVFDNIGYLRSILVRLYFSKNIILIYRKYFSFKEKCRKIFGAKTIRPVFIGKTAFIIGLPILRLLVPPMLYPAIKAVYQKFFSE

SEQ ID NO: 36138 - protein, 218 aa, Neisseria meningitidis
MIKNLYKLINYAALIGFAPNIVFAWPMFVDPPPYQNIHVRSWKARRDSGIVKQDLDFSCGAASIATLLNNFYGRHYSEAEILDKMDKTQMRASFDDMQRIMPELGFEAQGYALPFEQLVQLKIPVIVYLKYRKNNHFSVLNGINGETVLLTDPSLGHVSMSKSQFLSAWKTRDGEMEGKILAIVPKNTDFVRNQMFFNKNPVRQTRFTVEQIQMRQKR

SEQ ID NO: 36139 - protein, 203 aa, Neisseria meningitidis; identical to SEQ ID NO: 11924

SEQ ID NO: 36140 - protein, 351 aa, Neisseria meningitidis
MDLSIVVPIYNVESYLEACLSSIESILSNENVELILVNDGSKDGSEDICYKYIDKTTNNKQQTTNNKQQTTNNKQQTTNNKQHRYRTPNIKYIYQDNQGLSEARNTGIKNSNGKYIAFIDSDDFINCQVLLDFLGKDDSDMPDVVFLNAVKYDKGSVSYFGEDYQPEKILNQSKVEVLKGLCRFRKFPGSAWNKIIKRELIIREKLFFERGIYSEDIEWSMRLFNAATTFSYLDGCYYYYRQGRKDSITGTVSEKSIKSLLYILEKNAEMEFNRDISSYLYSFLSYEYLVLLFIMTSKNIECDADIKRRAYHLRFMLLKSNKLIYKLIFPIITLFGVDITGRILKAIRGNI

SEQ ID NO: 36141 - protein, 243 aa, Neisseria meningitidis; identical to SEQ ID NO: 20036

SEQ ID NO: 36142 - protein, 395 aa, Neisseria meningitidis
MDIQSKAKKLIEMIQTAPVEWKPLGEVASIGKGKQLNKSLLREKDKYPVINGGINPSGYWHEYNNEAGTIVISQGGASAGFVNWMDIPFFAGAHAYTIKANEDKLLQRFAYFFKNEANYIHAMSIRSSIPALAKSELQNLLIPIPPLETQQKIVKILDKFTELEATLEATLEAELALRKRQYRYYRDFLLDFDNQIGGVADGYQCRLKDVVWKTLGEIAEYSKNRICSDKLNEHNYVGVDNLLQNREGKKLSGYVPSEGKMTEYIANDILIGNIRPYLKKIWQADCTGGTNGDVLVIRVTDEKVNPKYLYQVLADDKFFAFNMKHAKGAKMPRGSKAAIMQYKIPIPPLPEQEKIVAILDKFDTLTHSVSEGLPYEIALRRKQYEYYREQLLAFR

SEQ ID NO: 36143 - protein, 387 aa, Neisseria meningitidis
MNITIVAPYCSLPSEPYFNRFWYLAERLSQSHDVLLITSRFRHYDKSFRRHEDAAATSNGRLRVKLLDEPGYRKNVSLARVASHRVFVRNLARWLHSPQAAEQDIVYSAYPLMATNLLLGKHKARLGYKLIVDVQDVWPESFSSVVPFLKKVPHKLLPFASRANRAYRCADALVAVSQTYLDRAKEANPNVPGEAVYIGTDFAAIAPPRFRSKTTRLFYLGTLSYSYDVETVCKGVRKLLDDGENVELHIMGGGPDLEKLKQHENRAIKFYGYLPYADMISIAKGCDIAVNAIHSHAMQSVTNKLSDYMALQKPILNSQTNAEVLGLLNLLPHENYRSGDVDSFVQAAKDILKRKNDPVQSDEIVRRFRRDISYRKIVNLIERLAHE

SEQ ID NO: 36144 - protein, 615 aa, Neisseria meningitidis
MHDTRTMMIKPTALLLPALFFFPHAYAPAADLSENKAAGFALFKNKSPDTESVKLKPKFPVRIDTQDSEIKDMVEEHLPLITQQQEEVLDKEQTGFLAEEAPDNVKTMLRSKGYFSSKVSLTEKDGAYTVHITPGPRTKIANVGVAILGDILSDGNLAEYYHNALENWQQPVGSDFDQDSWENSKTSVLGAVTRKGYPLAKLGNTRAAVNPDTATVDLNVVVDSGRPIAFGDFEITGTQRYPEQIVSGLARFQPGTPYDLDLLLDFQQALEQNGHYSGASVQADFDRLQGDRVPVKVSVTEVKRHKLETGIRLDSEYGLGGKIAYDYYNLFNKGYIGSVVWDMDKYETTLAAGISQPRNYRGNYWTSNVSYNRSTTQNLEKRAFSGGIWYVRDRAGIDARLGAEFLAEGRKIPGSDIDLGNSHATMLTASWKRQLLNNVLHPENGHYLDGKIGTTLGTFLSSTALIRTSARAGYFFTPENKKLGTFIIRGQAGYTLARDNADVPSGLMFRSGGASSVRGYELDSIGLAGPNGSVLPERALLVGSLEYQLPFTRTLSGAVFHDMGDAAANFKRMKLKHGSGLGVRWFSPLAPFSFDIAYGHSDKKIRWHISLGTRF

SEQ ID NO: 36145 - protein, 156 aa, Neisseria meningitidis; identical to SEQ ID NO: 18642

SEQ ID NO: 36146 - protein, 118 aa, Neisseria meningitidis; identical to SEQ ID NO: 9922

SEQ ID NO: 36147 - protein, 64 aa, Neisseria meningitidis; identical to SEQ ID NO: 11919

SEQ ID NO: 36148 - protein, 1037 aa, Neisseria meningitidis
NKTWKRQVFRHTALYTAILMFSHTGGGGAMAQTSKYAIIMNEGNQLEVKGNGQYSTIKDKDREREYTHQGTRGGGGGSVSFNNSDELVSRQNGTAVFGTATYLPPYGKVSGFDAGALKERNNAVDWIRTTRIALAGYAYTDAICRSSTGCPKLVYKTQFTFGNSGLAKKANGGELDIYVDKSRDNSPIYKLKDHPWLGVSFNLSAKGTAKDGKTINKFDEKNSNNNLVYTTEGRDISLGDWQREKTAMAYYLNAKLHLLDKKQIQNITDKTVQLGVLKPSIDVRQGNKGIAGILAYWAKWDIKDDGQIPVKLGLQQVKAGRCINKPNPNKNSKALSPALTAPALWFGPVKDGKAEMYSASVSTYPDSSSSQIFLQNLSRKDDTSKPGRYSLKPLSASDIQSKEPTFTGRQTVIRLDGGVQQIKLDKSNEAAGLNGNTNNNTFGIVKDLGVEPDTNEWKKVLLPWTVRGFADDSEFKKFNKEEKNNDNKPKYSQKYRIRENGNNSKRDLGDIVNSPIVAVGGYLATSANDGMVHIFKKGNGDARDYSLKLSYIPGTMPRKDIQSQDSTLAKELRAFAEKGYVGDRYGVDGGFVLRKVERNGKDHVFMFGAMGFGGRGAYALDLTKIDSNNLTGVSMFDVQNDKNNNKNDNNRVELGYTVGTPQIGKTHNGKYAAFLASGYATKDVNSNDNTTALYVYDLESSGNLIKKIEVKDGKGGLSSPTLVDKDLDGIVDIAYAGDRGGSMYRFDLSNNDPTKWSVRTIFKGTPDKPITSAPAISQLKDKRVVIFGTGSDLSEDDVNSQEIQHVYGIFDNDTNTGVAKDGQGNGLLEQVLEKDKDGKTLFLSDYKRSNGSGDKGWVVKLEAGQRVTVKPTVVLRTAFVTIHKYTGNDKCGAETAILGINTADGGKLTKKSARPIVPDANQAVAQYSGHKKGINGKSIPIGCMQKGNEIVCPNGYVYDKPVNVRYLDEKKTDGFSTTADGDAGGSGIDPAGKRSGKNNRCFSQKGVRTLLMNDLDSLDITGPTCGMKRISWREIFY

SEQ ID NO: 36149 - protein, 242 aa, Neisseria meningitidis
MASHNTTHQMKTLCSSCSLRELWPVGLLPNELSQLDAVIRQSRRKKGEYLFCVGEAFTSLFAIRSGFFKTTVASQDGRDQVTGFFMSGELIGMDGICSHVHSCDAVALEDSEVCELPFTHIEELGQNIPSLRTHFFRMMSREIVRDQGVMLLLGNMRAEERIAAFLLNLSQRLYSRGFAANDFILRMSREEIGSYLGLKLETVSRTLSKFHQEGLISVEHKHIKILNLQVLKKMVSGCSHAI

SEQ ID NO: 36150 - protein, 554 aa, Neisseria meningitidis
  misc_feature 23, 24, 33, 34: 'Xaa' is any amino acid
MQLSGAQIIVQSLKAEGVEYVFXXHTLKIKCVXXAADAYARVSGKVGVALVTSGPGVTNALTGIATAYTDSIPMVVISGQVGNSLIGTDAFQEVDTVGITRPCVKHNFLVTDINELAETIKKAFQIAASGRPGPVVVDVPKDVTQAMAKFSYPQEDIFIRSYQPVVQGHIGQIKKAVQMLASAKRPVVYFGGGVVLGNASEELTRFVRMTGAPCTGTLMGLGAYPSGDRQFLGMLGMHGTYEANLAMQNADVVLAVGARFDDRVVSVPSKFFEKAKKVIHIDVDPSSIAKRVKADIPIVGDVKNVLSEMVALWQKQESVPSEDALGKWWKTIEEWRSRDCLWFDNGSEIIKPQYVIQKLAEITGNSAIITSDVGQHQMFAAQYYPFERPRQWLNSGGLGTMGVGLPYAIGAKLAAPDQDVFCITGDGSIQMNIQELSTCFQYRIPVNVITLNNGYLGMVRQWQEIYYGGRESETYFDSLPDFVKLAEAYGHIGIRVDKKSDVEGALLEALNQKDRLVFIDFLTDQKQNVMPMVGNGKGLDEMVLPPHMRADEKA

SEQ ID NO: 36151 - protein, 166 aa, Neisseria meningitidis
MSDPNLIPEIFAAEGQNLQGSFLLEELDERVSSHDYPADRQTKISFTLTGGRDRLQRLFLDLNVKADMPLICQRCIKPMPFMLDESSRIVLFSNEESLDESMLADEELEGILIEKELDVRTLVEDQILMSLPFSPRHEDCGDNGTLEEVNRDKPNPFAVLAGLKSN

SEQ ID NO: 36152 - protein, 169 aa, Neisseria meningitidis
MIAAPAMANSMDNQTFENQVFHTRADAPMQLAELSQKEMKETEGAFLPLAILGGAAIGMWTQHGFSYATTGRPASVRDVAIAGGLGAIPGGVGAAGKVVSFAKYGREIKIGNNMRIAPFGNRTGHPIGKFPHYHRRVTDNTGKTLPGQGIGRHRPWESKSTDRSWKNRF

SEQ ID NO: 36153 - protein, 440 aa, Neisseria meningitidis
MKKYLFRAALYGIAAAILAACQSKSIQTFPQPDTSVINGPDRPVGIPDPAGTTVGGGGAVYTVVPHLSLPHWAAQDFAKSLQSFRLGCANLKNRQGWQDVCAQAFQTPVHSFQAKQFFERYFTPWQVAGNGSLAGTVTGYYEPVLKGDDRRTAQARFPIYGIPDDFISVPLPAGLRSGKALVRITQTGNSGTIDNTGGTHTADLSRFPITARTTAIKGRLKEAASSPYHTRNQINGGALDGKAPILGYAEDPVELFFMHIQGSGRLKTPSGKYIRIGYADKNEHPYVSIGKYMADKGYLKLGQTSMQGIKSYMRQNPQRLAEVLGQNPSYIFFRELAGSSNDGPVGALGTPLMGEYAGAVDRHYITLGAPLFVATAHPVTRKALNRLIMAQDTGSAIKGAVRVDYFWGYGDEAGELAGKQKTTGYVWQLLPNGMKPEYRP

SEQ ID NO: 36154 - protein, 219 aa, Neisseria meningitidis
MIHAVLFDLDGTLADTALDLGGALNTLLARHGLPAKSMDEIRTQASHGAAGLIKLGAGITPDHPYARWRTEYLEEYDRRYAQDTELFDGVNELIAELNQRGIKWGIITNKPMRFTDKLVPKLGFIIPPAVVVSGDTCGEPKPSIKPMLYACGQIHADPQHTLYVGDAERDIQAGRNAGMKTVLAEWGYISDEDDTDSWQADFHIRTPLDLLECLDKIQP

SEQ ID NO: 36155 - protein, 415 aa, Neisseria meningitidis
MFSLEAWIGLRYLRAKKRNGFMSFITMVSIAGIALGVTALIVVLSVMNGFQKEIRGQLLNVAPHAEIGYIDNTDTDWRNLLRFTENRKGILAAAPYVSNQALLANAGEIRGVQMRGILPSEERKVVEYGDKMPAGKFEDLIPGEFDIILGVGLAEALGAEVGNKVTVITPEGNVTPAGVVPRLKQFTVVGLVKTGVYEVDNSLAMTHIQDARVLYRLDKEVAGLRLKLADPQNAPALTATLIPEAQRDTVWVRDWTFSNRSYFEAVELEKRMMFIILTLIIAVAAFNLVSSLVMAVTEKQADIAILRTLGLSPAGVMKIFMVQGAFSGFFGTLAGVVCGVLLGWNVGRVVAFFENLLGVHLINSQVYFIDYLPSDVDMGDVALIACISLGLSFVATLYPSRRASKTQPAEALRYE

SEQ ID NO: 36156 - protein, 192 aa, Neisseria meningitidis
MNNMFAAKLSKLVYTASDHPDPCRKWGEFDRLILLIRKLYQILDGNIPSRVTVCFTTEAARLMLDKAAAGCDAAMLRAQRWRIYTQIAERLAGSDGGFTVTAESVSAACPELEGRYLELVRRAAVSFGFTQGWENPAGGQEKTQAVPDAASGHSVRKPIKINIEAKVECYPAYRPTAALKVTRRRFFRLRNR

SEQ ID NO: 36157 - protein, 679 aa, Neisseria meningitidis
MMSPETQKQLKITDVSAKKLDKLNLHTAWDLVLHLPLRYEDETHIMPIKDAPIGVPCQVEGEVIHQEVTFKPRKQLIVQIADGSGSVLFLRFIHFYASHQKQTAVGKRIRAVGEIKHGFYGDEMIHPKIRDAEGGGLAESLTPVYPTVNGLNQPTLRRIIQTALDVTPLHDTLPDALLCRLKLPHLAESLRLLHSPPPSFTIHQLSDGTLPAWQRLKFDELLAQQLSMRLARQKRIGGTAAALGGDGTLTQALRQALPFALTDAQEKVVSEICRDMAQTYPMHRLLQDVGSGKTIVAALSALTAIESGAQVAVMAPTEILAEQHFIKFKQWLEPLGIEVVRLFGSLRKKAKDEAKAKLADGSVKIAIGTHALFSDGVTFHNLGLTIVDEQHRFGVAQRLALKNKGREVHQLMMSATPIPRTLAMSFFADLDVSVIDKLPPGRTPIKTRLVNNVRRAEVEGFVLNTCRKGRQAYWVCPLIEESETLQLQTAAETLARLQTALPELNIGLVHGRMKAAEKAEVMARFSSGELNVLVATTVIEVGVDVPNAALMVIEHAERMGLAQLHQLRGRVGRGAAESVCVLLFAEPLGELAKARLKVIYEHTDGFEIARQDLNIRGPGEFLGARQSGVPMLRFAKLEEDLHLLEQAREIAPILIEQNPEIVEAHLARWLSGREGYLGV

SEQ ID NO: 36158 - protein, 374 aa, Neisseria meningitidis
MSNWKPDIPYNDLPPLPPKQDIESKTILKRCIAARASLARLKQPELIPNQAMLINTLPVMEARASSEIENIVTTTDKLFQSLQMDTERQDPATKEALQYRTALFAGYESLTSRPLCTQTAIMVCNAIKHPYEMAIRKTGGTALKGGNSGNVVYTPPEGEETIRGKLANWERFIHESGDLDPLIIMAAAHYQFEAIHPFTDGNGRTGRILNSLLLIEKGLLDLPILYLSRYIIENRADYYRLLLGVTERQDWESWIIYILDGVADTADWTVSKIDAIRRLFEQTRQHIRTHAQGIYTHELVNLLFEQPYTRIANLEAAGIAKRQTASKYLKELSDIGVLQEIAIGRDKLFIHPRLMELLRGEGNSFTSFQSLVKA

SEQ ID NO: 36159 - protein, 1991 aa, Neisseria meningitidis
MNKGLHRIIFSKKHSTMVAVAETANSQGKGKQAGSSVSVSLKTSGDLCGKLKTTLKTLVCSLVSLSMVLPAHAQITTDKSAPKNQQVVILKTNTGAPLVNIQTPNGRGLSHNRYTQFDVDNKGAVLNNDRNNNPFLVKGSAQLILNEVRGTASKLNGIVTVGGQKADVIIANPNGITVNGGGFKNVGRGILTIGAPQIGKDGALTGFDVRQGTLTVGAAGWNDKGGADYTGVLARAVALQGKLQGKNLAVSTGPQKVDYASGEISAGTAAGTKPTIALDTAALGGMYADSITLIANEKGVGVKNAGTLEAAKQLIVTSSGRIENSGRIATTADGTEASPTYLSIETTEKGAAGTFISNGGRIESKGLLVIETGEDISLRNGAVVQNNGSRPATTVLNAGHNLVIESKTNVNNAKGSANLSAGGRTTINDATIQAGSSVYSSTKGDTELGENTRIIAENVTVLSNGSIGSAAVIEAKDTAHIESGKPLSLETSTVASNIRLNNGNIKGGKQLALLADDNITAKTTNLNTPGNLYVHTGKDLNLNVDKDLSAASIHLKSDNAAHITGTSKTLTASKDMGVEAGLLNVTNTNLRTNSGNLHIQAAKGNIQLRNTKLNAAQALETTALQANRFRRLHAVSADGHVSLLANGNADFTGHNTLTAKADVNAGSVGKGRLKADNTNITSSSGDITLVAGNGIQLGDGKQRNSINGKHISIKNNGGNADLKNLNVHAKSGALNIHSDRALSIENTKLESTHNTHLNAQHERVTLNQVDAYAHRHLSITGSQIWQNDKLPSANKLVANGVLALNARYSQIADNTTLRAGAINLTAGTALVKRGNINWSTVSTKTLEDNAELKPLAGRLNIEAGSGTLTIEPANRISAHTDLSIKTGGKLLLSAKGGNAGAPSAQVSSLEAKGNIRLVTGETDLRGSKITAGKNLVVATTKGKLNIEAVNNSFSNYFPTQKAAELNQKSKELEQQIAQLKKSSPKSKLIPTLQEERDRLAFYIQAINKEVKGKKPKGKEYLQAKLSAQNIDLISAQGIEISGSDITASKKLNLHAAGVLPKAADSEAAAILIDGITDQYEIGKPTYKSHYDKAALNKPSRLTGRTGVSIHAAAALDDARIIIGASEIKAPSGSIDIKAHSDIVLEAGQNDAYTFLKTKGKSGKIIRKTKFTSTRDHLIMPAPVELTANGITLQAGGNIEANTTRFNAPAGKVTLVAGEELQLLAEEGIHKHELDVQKSRRFIGIKVGKSNYSKNELNETKLPVRVVAQTAATRSGWDTVLEGTEFKTTLAGADIQAGVGEKARVDAKIILKGIVNRIQSEEKLETNSTVWQKQAGRGSTIETLKLPSFESPTPPKLSAPGGYIVDIPKGNLKTEIEKLAKQPEYAYLKQLQTAKNVDWKQVQLAYDKWDYKQEGLTGAGAAIVVIIVTALTYGYGAAAAGSVTAAGSSTAAAATTTAAATTTVSTAAAMQTAALASLYSQAAVAIINNKGDVGKALKDLGTSDTVKQIVTSALTAGALNQMGADIAQLNSKVRTELFSSTGNQTIANLGGRLATNLSNAGISAGINTAVNGGSLKDNLGNAALGALVNSFQGEAASKIKTTFSDDYVAKQFAHALAGCVSGLVQGKCKDGAIGAAVGEIVAESILGGRNPATLSDAEKHKVISYSKIIAGSVAALNGGDVNTAANAAEVAVVNNALNFDSTPTNAKKHQPQKPDKTALEKIIQSIMPAHAAGAMTNPQDKDAAIWISNIRNGITGPIVITSYGVYAAGWTAPLIGTAGKLAISTCMANPSGCTVMVTQAAEAGAGIATGAVTVGNAWEAPVGALSKAKAAKQAAPKETINNLANLAKAEQQILFRIAQRDTQLDAWKTGFNNRVRKGAGLLDASNIPITINGKTIKPVQAISLKGAPVYSGVSEQEIFALYRQMTGQNPNFRVLPDGRLANGIISTGEWAGTKIALRNFSKTENSTQARWTLDLQNPPSFIKGTKLELKFQ

SEQ ID NO: 36160 - protein, 404 aa, Neisseria meningitidis
MEIILGIVMFTVIVLALALMILFAKSKLVSEGDITIKVNGEKELTMPAGGKLLGALANEGIFIPSACGGGGSCGQCRVVVKSGGGDILPTELSHINKREAREGCRLSCQVNVKTDMEIEVPEEVFGVKKWECTVISNDNKATFIKELKLAIPEGEEVPFRAGGYIQIEAPPHTVAYKDFDIPEKYHEDWDKYNLWQYVSKVDEPILRAYSMASYPEEKGIIMLNVRIATPPPRVPDAPPGQMSSYIWSLKPGDKVTISGPFGEFFAKDTDAEMVIGGGAGMAPMRSHIFDQLKRLNSKRKITFWYGARSKREMFYVEDFDRLAAEFPNFTWHVALSDPLPKDNWDGYTGFIHNVVYENHLKNHEAPEDCEFYMCGPPIMNQSVIKMLKDLGVEDENILLDDFGG

SEQ ID NO: 36161 - protein, 231 aa, Neisseria meningitidis
MTEPAAEGGKAAKALKKYLITGILVWLPIAVTVWVVSYIVSASDQLVNLLPKQWRPQYVLGFNIPGLGVIVAIAVFVTGLFAANVLAADSCAWDSLLGRIPVVKSIYSSVKKVSESLLSDSSRSFKTPVLVPFPQSGIWTIAFVSGQVSNAVKAALPKDGDYLSVYVPTTPNPTGGYYIMVKKSDVRELDMSVDEALKYVISLGMVIPDDLPVKTLAGPMPPEKADLPEQQ

SEQ ID NO: 36162 - protein, 346 aa, Neisseria meningitidis; identical to SEQ ID NO: 9873

SEQ ID NO: 36163 - protein, 149 aa, Neisseria meningitidis
MQIILLEKIGGLGNLGDIVTVKNGYARNFLIPAGKAKRATEANMKEFEARRAELEAKQAEILADAQARQEKLDGQTITVAQNGVDGRLFGSVTNADIAAAIVATGIEAVKANVRLPNGPLKAVGEYEVEVALHTDAVAKITVAVVAATE

SEQ ID NO: 36164 - protein, 332 aa, Neisseria meningitidis
MLAEEVFGFGIYKESKGSGGRFYERCWLMGSEDVLYGRVHFGGQNNTILFELTGTGCGVAKEGWESRLFAFLTNAIRPKITRVDIAKDFFNGEYSPNQAREDRNKGMFTCHHVKPKGECLGSDWEEDDEAKMTKGKTYGIGSRESSKYVRVYEKGKQLGDKTSTWTRFEIEFKAKDIVIPFEVLQNPGEYFGGAYPICERFVQKATRIHAVKEDKVISADRYLEWEKQFGRAANGLKFIFPELDKAKLFELIEPSHHKLPKSLAPEAYDCAFLKAQAIHEQPAFKPYNDPYYMYEYYENLEKQLEQQKHVNNEESYNNFIYDKFARLPISWA

SEQ ID NO: 36165 - protein, 332 aa, Neisseria meningitidis
MLAEEVFGFGIYKESKGSGGRFYERCWLMGSEDVLYGRVHFGGQNNTILFELTGTGCGVAKEGWESRLFAFLTNAIRPKITRVDIAKDFFNGEYSPNQAREDRNKGMFTCHHVKPKGECLGSDWEEDDEAKMTKGKTYGIGSRESSKYVRVYEKGKQLGDKTSTWTRFEIEFKAKDIVIPFEVLQNPGEYFGGAYPICERFVQKATRIHAVKEDKVISADRYLECKKQFGRAANGLKFIFPELDKAKLFELIEPSHHKLPKSLAPEAYDCAFLKAQAIHEQPAFKPYNDPYYMYEYYENLEKQLEQQKHVNNEESYNNFIYDKFARLPISWA

SEQ ID NO: 36166 - protein, 272 aa, Neisseria meningitidis
MSSPRHVFYISDRTGLTAENIGEALLNQFGNLSFKRHTHPFVDTPEKARAVVEKVNRSRQENGQRPIAFVSVVDDEIRRIIKGADAFQINFFETFLGLLEKELNTEATASEQGHHSIGNTKRYDARMEAVNFSLNHDDGVSDKNLQEADVILMGVSRSGKTPTCLYLALQYGIRAANYPLIHDLESADLPRMVKPYRDKLFGLTIQPERLQAIRQERRPNSTYAKIDTCRSEVADAQSMFRRHGIPFANTTDKSVEELAVHILQACKLKRRF

SEQ ID NO: 36167 - protein, 1396 aa, Neisseria meningitidis
  misc_feature 1390, 1391: 'Xaa' is any amino acid
MNKGLHRIIFSKKHSTMVAVAETANSQGKGKQAGSSVSVSLKTSGDLCGKLKTTLKTLVCSLVSLSMVLPAHAQITTDKSAPKNQQVVILKTNTGAPLVNIQTPNGRGLSHNRYTQFDVDNKGAVLNNDRNNNPFLVKGSAQLILNEVRGTASKLNGIVTVGGQKADVIIANPNGITVNGGGFKNVGRGILTIGAPQIGKDGALTGFDVRQGTLTVGAAGWNDKGGADYTGVLARAVALQGKLQGKNLAVSTGPQKVDYASGEISAGTAAGTKPTIALDTAALGGMYADSITLIANEKGVGVKNAGTLEAAKQLIVTSSGRIENSGRIATTADGTEASPTYLSIETTEKGAAGTFISNGGRIESKGLLVIETGEDISLRNGAVVQNNGSRPATTVLNAGHNLVIESKTNVNNAKGSANLSAGGRTTINDATIQAGSSVYSSTKGDTELGENTRIIAENVTVLSNGSIGSAAVIEAKDTAHIESGKPLSLETSTVASNIRLNNGNIKGGKQLALLADDNITAKTTNLNTPGNLYVHTGKDLNLNVDKDLSAASIHLKSDNAAHITGTSKTLTASKDMGVEAGLLNVTNTNLRTNSGNLHIQAAKGNIQLRNTKLNAAKALETTALQGNIVSDGLHAVSADGHVSLLANGNADFTGHNTLTAKADVNAGSVGKGRLKADNTNITSSSGDITLVAGNGIQLGDGKQRNSINGKHISIKNNGGNADLKNLNVHAKSGALNIHSDRALSIENTKLESTHNTHLNAQHERVTLNQVDAYAHRHLSITGSQIWQNDKLPSANKLVANGVLALNARYSQIADNTTLRAGAINLTAGTALVKRGNINWSTVSTKTLEDNAELKPLAGRLNIEAGSGTLTIEPANRISAHTDLSIKTGGKLLLSAKGGNAGAPSAQVSSLEAKGNIRLVTGETDLRGSKITAGKNLVVATTKGKLNIEAVNNSFSNYFPTQKAAELNQKSKELEQQIAQLKKSSPKSKLIPTLQEERDRLAFYIQAINKEVKGKKPKGKEYLQAKLSAQNIDLISAQGIEISGSDITASKKLNLHAAGVLPKAADSEAAAILIDGITDQYEIGKPNKSHYDKAALNKLSRLTGRTGVSIHAAAALDDARIIIGASEIKAPSGSIDIKAHSDIVLEAGQNDAYTFLKTKGKSGKIIRKTKFTSTRDHLIMPAPVELTANGITLQAGGNIEANTTRFNAPAGKVTLVAGEELQLLAEEGIHKHELDVQKSRRFIGIKVGKSNYSKNELNETKLPVRVVAQTAATRSGWDTVLEGTEFKTTLAGADIQAGVGEKARVDAKIILKGIVNRIQSEEKLETNSTVWQKQAGRGSTIETLKLPSFESPTPPKLSAPGGYIVDIPKGNLKTEIEKLSKQPEYAYLKQXXTHLIN

SEQ ID NO: 36168 - protein, 679 aa, Neisseria meningitidis
MKLEASKQASKQQKFKKSFIVSLFFSILYTSPLLAVDYVYDNSKLTNEQIERLKKLRDRDSEYWKEETYLITEDNPKVPPFPALYPRTYQFENINNSKKISFYDQKYTEGYLVGFARGLGVAKRNGDTEEQIRKYFKECFNSNTKIRDYSTCQAEKFGSHPLIVKSHIFSLGPKIKNSHINSEILSVGNYTEWANQVIHHIENYVSFAAHLYSGLDPFHYIEVTDNSHVIGQTISLDEFRLENSLWEPRWDSNVGKLKTTNADIRFNTKSESLLVKEDYAGGARFRFAYDPKEAKNTALIFEKNVTGTSDIIFENPIDDLKSLDGHQIIKVNGTADKHAFRLSGKHQKGIYTLSLQQRPEGFFTKVQERDDIAIYAQQAQAANTLFNLRLNNKNNDIFDRTLPRKGLWLRVIDGHSNQWVQGKTAPVESYRKGVQLGGEVFTWQNESNQLSIGLMGGQAEQRSTFRNPDTDNLTTGNVKGFGAGVYATWHQLQDKQTGAYADSWVQYQRFRHSINTEDATERFTSKGITASIEAGYNALLAEHFTEKGNRVRFYLQPQAQLTYLGVNGKFSDSENAQVNLLGFRQLQSRVGVQAKAQFAFTNGVTFQPFVAVNSIYQQKPFGLEMDGERRVINNKTAIESQLGVAVKIKSHLTLQATFNRQTGKHHQAKQGALNLQWTF

SEQ ID NO: 36169 - protein, 689 aa, Neisseria meningitidis
MTLKASKQASKQASKQASKQQASGRVNLLTLSVLSLFCTPYVGSDAYDPVKEAEIKNKFILEAAEDRNSHVWRGPCSVSFDCFGAFSYQPGSDTRSTNIGDAADFSFSDKPANGVSHYFSSGKTDPNSSEALYDEINITGKNYNSGILAVDNMPVVKKYVTENYGADLKQAVKDQLKDLYKTRPEDWEKNKKIVEEAIIKQYGIPRNKINKFRKVIDPIIEEAVLTPHSNTTPTNLDNIFNKKLHVKIENKSHVAGQVLELTKMTLKDSLWEPRRHSDIHTLETSDNARIRLNTKDEKLTVHKDYAGGADFLFGYDVRESDEPALTFEDKVSGQSGVVLERRPENLKTLDGRKLIAAKTADSGSFAFKQNYRQGLYELLLKQCEGGFCLGVQRLAIPEAEAVLYAQQAYAANTLFGLRAADRGDDVYAADPSRQNIRGGAAADGRRKGVQIGGEVFVRQNEGSRLAIGVMGGRVGQHASVNSKGGAAGSDLHGYGGGVYAAWHQLRDKQTGAYLDGWLQYQRFKHRINDENRAERYKTKGWTASVEGGYNTLVAEGVVGKGNNVRFYLQPQAQFTYLGVNGGFTDSEGTGVGLLGSGQWQSRAGIRAKNRFALRNGVNLQPFAAFNVLHRSKSFGVEMDGEKQTLAGRTALEGRFGIEAGWKGHMSARIGYGKRTDGDKEAALSLKWLF

SEQ ID NO: 36170 - protein, 547 aa, Neisseria meningitidis; identical to SEQ ID NO: 35329

SEQ ID NO: 36171 - protein, 265 aa, Neisseria meningitidis
MQAFQISPAVATRDFALYCSSFSKNLRFDTKSKFYLSTEDFEPQFPHSFENAIKILNGSLIFDIDSQHQPLLPFDLPPVLINPDVLIFSKISKALSLKKPLKISYHSISSGLSEKVIVPLALVNDGFRWHLRAFDRTKNRFADFVLTRIIQANILLAENIEENETINNDIDWNRIVKIELVPHPNHDEAKKVIEMDFGMTNGKLELALRASNIGYVLQQWRVDCSSDHHIDDPAFRLWLLDNLVLYGINNAEHLAPAFDKKRSKP

SEQ ID NO: 36172 - protein, 421 aa, Neisseria meningitidis
MFSFFRRKKKQETPALEEAQIQETAAKAESETDQVIENIKEDAESLAESVKGQVESAVETVSGAVEQVKETVAEMLSEAEEAAEKAAEQVEAAKEAVAETVGEAVGQVQEAVATTEEHKLGWAARLKQGLTKSRDKMAKSLAGVFGGGQIDEDLYEELETVLITSDMGMEATEYLMKDVRNRVSLKGLKDGNELRGALKEALYDLIKPLEKPLVLPETKEPFVIMLAGINGAGKTTSIGKLAKYFQAQGKSVLLAAGDTFRAAAREQLQAWGERNNVTVISQTTGDSAAVCFDAVQAAKARGIDIVLADTAGRLPTQLHLMEEIKKVKRVLQKAMPDAPHEIIVVLDANIGQNAVNQVKAFDDALGLTGLIVTKLDGTAKGGILAALASDRPVPVRYIGVGEGIDDLRPFDARAFVDALLD

SEQ ID NO: 36173 - protein, 280 aa, Neisseria meningitidis
  misc_feature 275, 276: 'Xaa' is any amino acid
LSENPSCKVSASQTSNHANRPHRKLKMKHRTFFSLCAKFGCLLALGACSPKIVDAGAATVPHTLSTLKTADNRPASVYLKKDKPTLIKFWASWCPLCLSELGQTEKWAQDAKFSSANLITVASPGFLHEKKDGDFQKWYAGLNYPKLPVVTDNGGTIAQSLNISVYPSWALIGKNGDVQRIVKGSINEAQALALIRDPNADLGSLKHSFYKPDTQKKDSKIMNTRTIYLAGGCFWGLEAYFQRIDAWLTRYPGYANGNTKNPSYEDVSYRHTGHXXHTLN

SEQ ID NO: 36174 - protein, 1061 aa, Neisseria meningitidis
  misc_feature 1058, 1059: 'Xaa' is any amino acid
MNKGLHRIIFSKKHSTMVAVAETANSQGKGKQAGSSVSVSLKTSGDLCGKLKTTLKTLVCSLVSLSMVLPAHAQITTDKSAPKNQQVVILKTNTGAPLVNIQTPNGRGLSHNRYTQFDVDNKGAVLNNDRNNNPFLVKGSAQLILNEVRGTASKLNGIVTVGGQKADVIIANPNGITVNGGGFKNVGRGILTIGAPQIGKDGALTGFDVRQGTLTVGAAGWNDKGGADYTGVLARAVALQGKLQGKNLAVSTGPQKVDYASGEISAGTAAGTKPTIALDTAALGGMYADSITLIANEKGVGVKNAGTLEAAKQLIVTSSGRIENSGRIATTADGTEASPTYLSIETTEKGAAGTFISNGGRIESKGLLVIETGEDISLRNGAVVQNNGSRPATTVLNAGHNLVIESKTNVNNAKGSANLSAGGRTTINDATIQAGSSVYSSTKGDTELGENTRIIAENVTVLSNGSIGSAAVIEAKDTAHIESGKPLSLETSTVASNIRLNNGNIKGGKQLALLADDNITAKTTNLNTPGNLYVHTGKDLNLNVDKDLSAASIHLKSDNAAHITGTSKTLTASKDMGVEAGLLNVTNTNLRTNSGNLHIQAAKGNIQLRNTKLNAAKALETTALQGNIVSDGLHAVSADGHVSLLANGNADFTGHNTLTAKADVNAGSVGKGRLKADNTNITSSSGDITLVAGNGIQLGDGKQRNSINGKHISIKNNGGNADLKNLNVHAKSGALNIHSDRALSIENTKLESTHNTHLNAQHERVTLNQVDAYAHRHLSITGSQIWQNDKLPSANKLVANGVLALNARYSQIADNTTLRAGAINLTAGTALVKRGNINWSTVSTKTLEDNAELKPLAGRLNIEAGSGTLTIEPANRISAHTDLSIKTGGKLLLSAKGGNAGAPSAQVSSLEAKGNIRLVTGETDLRGSKITAGKNLVVATTKGKLNIEAVNNSFSNYFPTQKAAELNQKSKELEQQIAQLKKSSPKSKLIPTLQEERDRLAFYIQAINKEVKGKKPKGKEYLQAKLSAQNIDLISAQGIEISGSDITASKKLNLHAAXXHT

SEQ ID NO: 36175 - protein, 55 aa, Neisseria meningitidis; identical to SEQ ID NO: 3213

SEQ ID NO: 36176 - protein, 170 aa, Neisseria meningitidis
MIQSIEKPQESIRKNRNPHRVIPAQAGIQKRNATGIYRKKQKPPPRHSRAGGNPETQRGRTLSEKTETPPTVIPAKAGIQKRNATGIHRKKQKPPPPSFPRRRESSNTTRQDFIGKNRNPTDRHSRKSGNLETQRGRTLSEKTETPPPSFPQKRESRPVGTESYRIKQFP

SEQ ID NO: 36177 - protein, 192 aa, Neisseria meningitidis
MIESIEKPQESIRKNRTPTAVIPAQAGIQRRNATGIYRKKQNPPTAVIPAKAGIQQPKNHRNLSAKTETPPPSFPQKRESSNRKTTGIYQQKQKPHRRHSRKSGNPKTQRNRNPSEKTETPPTVIPAKAGIQQPKNHRNLSAKTETPTASFPQKLESKNATQQEFIGKNRNPTDRHSRKSGNPDPSARNLTG

SEQ ID NO: 36178 - protein, 158 aa, Neisseria meningitidis
MRKLSISSDEGLVPIRTIQQFAEDVGVVFPASYVSLLSKHDHLYPKENIFNFVNQYGENDERDISFLGYKQDLGYEDIYSYSCIDDEYGYAKKVIAFGISANGDYICFDYRKCNENPCIILMYHDDFYEDENGDTKMVTSHIADSFDAFLDMLYELSD

SEQ ID NO: 36179 - DNA, 747 bp, Neisseria meningitidis
gtgcagcctgaaatctccgcccaataccaacaccgtttcgcccaagccatacgcgagggtgaagccgccgacggactgccgcaagagcgcctgaacgtctatatccgcctgatacgcaacaatatccacagctttatcgaccgctgctataccgaaacgcggcaatactttgacagcgaagaatggagccgtctgaaagaaggtttcgtccgcgacgcgcacgcccaaacgccctattttcaagaaatccccggcgagttcctacaatattgccaaagcctgccgcttttagacggcattttggcactgatggattttgaatatacccaattgctggcagaagttgctcaaattccggatattcccgacattcattattcaaatgacagcaaatacacaccctcccctgcggcctttatccggcaatatcgatatgatgttaccgatgatttgcatgaagcggaaacagccttgttaatatggcgaaacgccgaagatgatgtgatgtaccaaacattggacggcttcgatatgatgctgctggagataatgggttcctccgcgctttcgtttgacaccctcgcccaaacccttgtcgaatttatgcctgaggacgataattggaaaaatattttgcttgggaaatggtcaggctggactgaacaaaggattatcatcccctccttgtccgccatatccgaaaatatggaaggcaattccccgggccaaaaccatctatccgcataa

SEQ ID NO: 36180 - DNA, 735 bp, Neisseria meningitidis
gtgttgcagggcgatgtcgaagtccgcacgcaggacggggcggcggaggtttggtcggcagaaagcggcgattgcgtgtttgcgccgcagcaggtgttttcggtcaaactgaaaacggacgatgccgaaatccgtttgtcgctgtattgcgcggcggcagactattttcacaaaaaatacggcatgagtgccacgcattctgcggttgcggcggctcaggataccgtaccggcgggcagggcgttggatatgggctgcggacaggggcgcaacgcactgtttctcggtttgaagggatttgaagttactgcagtcgatcacaatcccgccgccttggcaaacgtggcggagctggcagaggcggagggtttgaacgtccgcacgctggaatatgatttgaacgccgccgccttgcagggtgagtttgattatattgtggcaacagtggtgctgatgttcctgatgccgcagcgcgtgcctgacgtgattgccgatatgcaggcgcatacggcggcgggcgggtacaacttaatcgtatcggcaatggatacggcggatttcccttgtccgatgccgttcccttttaaatttaaagagggagagctgaaggattattatcgggattgggagctggacgaatataaagaagaattgggcgcgatgcacgccaaagacgaaaacggcaatccgatacggtttaaatttgtaacgatgctggcgaaaaagcctgaataa

SEQ ID NO: 36181 - DNA, 1311 bp, Neisseria meningitidis
atgagcgtaactgttgaaactttagaaaatctggaacgcaaagtagtgttgtccctgccttggtccgaaatcaacgcagaaaccgataaaaaactgaaacaaacccaacgccgtgcaaaaatcgacggtttccgtccgggtaaagcacctttaaaaatgattgcccaaatgtacggtgcgagcgcgcaaaacgacgtgatcaacgagctggtgcaacgccgcttccacgatgttgccgttgcccaagagttgaaagtggcaggcttcccccgttttgaaggcgttgaagaacaagacgataaagaatctttcaaagttgccgccatttttgaagtgttccccgaagtcgttatcggcgatttgtctgcacaagaagttgaaaaagtaaccgcttccgtcggtgatgccgaagtggaccaaactgtagaaatcctgcgtaaacaacgcacccgcttcaaccatgtcgaacgcgaagcccgaaacggcgaccgcgtcatcattgactttgaaggcaaaatcgacggcgaaccttttgccggcggcgcatccaaaaactacgccttcgtattgggcgcaagtcaaatgctgcctgaatttgaagccggcgtagtcggcatgaaggctggcgaaagtaaagacgttaccgtcaatttccctgaagactaccacggtaaagacgttgccggtaaaactgccgtgttcaccattacgctgaacaacgtttccgaagcgactctgcctgaagtcgatgcagattttgcaaaagctttgggtattgcggatggcgacgttgccaaaatgcgcgaagaagtgcagaaaaacgtaagccgcgaagtggaacgccgcgtaaacgaacaaaccaaagaatccgtaatgaacgcgctgctcaaagccgtagagctgaaagcacctgttgctttggtcaatgaagaagccgcacgcttggcaaacgaaatgaaacaaaattttgttaaccaaggtatggctgatgctgccaacttggatctgcctttggatatgttcaaagaacaagccgaacgccgcgtatctttgggtctgattttggccaaactggttgacgaaaacaaactggaaccgactgaagagcaaatcaaagccgttgttgccaactttgcagaaagctacgaagatcctcaagaagtgattgactggtactacgcagatccttcccgcctgcaagccccgacttctttggcggtagaaagcaacgtcgttgatttcgttttgggtaaagccaaagtaaacgaaaaagctttgtcttttgacgaagtgatgggcgcgcaagcctga

SEQ ID NO: 36182 - DNA, 423 bp, Neisseria meningitidis
atgaaaatcaccaaaatcttcaccttcgactcctcgcatatgctcgacgggcatgacggcaaatgccaaaacctgcacgggcatacctacaaactcgaaatcaccgtttcagacgaccccgtcagaggcgggccgaaagacggtatggtgatggactttaccgacttgaaagccattgtcaaacaacacattaccgaccccttcgaccacgccttcatctaccacggcggcaacgggcgcgaatctcaaatcgccgcacttttggaaggctggaacatgaaaaccctgcgcctgccctgccgcaccactgccgaaaatatggcggtcgaaatgtacgaccgtctgaaaaacgcggggctgaacgtgtgccgcgtcaaattgtgggaaacgccgacatcgtgtgcggagtatgaaggggggtag

SEQ ID NO: 36183 - DNA, 528 bp, Neisseria meningitidis
atgaaacagaaaatctggtacacctacgatgacatccaccgcgtcatcaaagcattggcagaaaaaatccggaacgccgacatcaaatacgatgccatgattgccatcggcggcggcggctttattccggcacgtatgctgcgctgttttctggaaattccgatttatgccgtaaccaccgcctattacgacagcgacaacgaaggacaggttacagaagaagtcaaaaaagtccaatggctcgaccccgttcccgaagccctgcggggcaaaaacgtactcgtcgtcgatgaagtggacgacagccgcgtaaccatggaattttgcctgacagagctgctcaaagaagacttcggtacgatcggcgtcgccgtactgcacgaaaaaatcaaagccaaagcaggcaaaatccccgaaggcattccctatttcagcggcatcaccgtagaagactggtggatcaactatccgtgggacgcactcgacatcgacgaacacaaccgccttgccgaggccggccgaggctga

SEQ ID NO: 36184 - DNA, 435 bp, Neisseria meningitidis
atgtttttgaatacaattcaacctgctgttggtgctacgcatgctggtcgtcgtgttggacgcggtattggtagtggtcttggcaaaacgggtggtcgtggtcataaaggtcaaaagagccggtctggtgggtttcataaggtgggtttcgagggtggtcaaatgcccttgcaacgacgcctccctaaaagaggttttaaatctttaacagcatcagctaatgcacagcttcgtttaagtgaactggaatcaattgctgttaatgagattgatattttggtcttaaagcaagcgggtctgattgcatctacagtctctaatgttaaagttattgcttctggtgaaatttctaaggcagttgctttgaagggtattaaagttaccaaaggtgcgagagctgctatcgaggctgttggtggtaagattgaaatgtaa

SEQ ID NO: 36185 - DNA, 426 bp, Neisseria meningitidis
atgacacaagaaaccgctttgggtgcggcactgaaatccgccgtccaaactatgagcaaaaagaaacagaccgaaatgatcgccgaccacatctacggcaaatacgatgtgttcaaacgcttcaaaccgttggcactcggcatcgatcaggatttgattgccgctttgccgcaatacgatgccgcactgattgcacgcgtcctcgccaaccactgccgccgtccgcgctatctgaaagccttggcgcgcggcggcaaacgtttcgatttgaacaaccgtttcaaaggcgaagttacccccgaagaacaggcgatcgcgcaaaaccatcctttcgtgcagcaggctttgcaacagcagtccgcccaagctgccgccgaaacgccgtctgttgaagccgaagcagccgaatcttccgcagcagaataa

SEQ ID NO: 36186 - DNA, 402 bp, Neisseria meningitidis
atgaaagacaagcacgattcttccgccatgcggctggacaaatggctttgggcggcacgttttttcaagacccgttcccttgcgcaaaagcacatcgaactgggtagggttcaagtaaacggctcgaaggtcaaaaacagtaaaaccatagacatcggcgatattatcgacctgacgctcaattcccttccctataaaatcaaggttaaaggtttgaaccaccaacgccgcccggcatccgaggcgcggcttctgtatgaagaggacgcgaaaacggcaacattgagggaagagcgcaaacagctcgaccaattcagccgcatcacttccgcctatcccgacggcagaccgaccaagcgcgaccgccgccaactggacaggctgaaaaaaggagactggtaa

SEQ ID NO: 36187 - DNA, 1407 bp, Neisseria meningitidis
atgctcaagagccagtttgccggaaaaatagaagcggtgagggaagagttggctgccggccgttccgccttcgtattcaaaccgggagaaggcgtgcgttatgagatggcggcggttgaaggtgctgtcgaacctgccgagccgtccttgcacgcggggtcggaggagatgcctgtgcaggaggttctgttggatgagctgccgtctgaagagcctgtcaaacccgctgcgtcgaaaacggcggcggatattttggcggaacgtatgagaaacctgccgcacgagccgcgccatactgccgaacctgcttcccgtccggaatcggaggtgcttgcgaaagcgcggacggatgcgcagcgcgatgcggaagaggcgcgttacgagcagaccaatctgtcgccggattatacgttcgatacattggtcgaaggcaagggcaaccgccttgcggcggctgccgcgcaggcgattgcggaaagcccggggcagagctacaacccgtttttcctctatggcagtacgggtttgggtaaaacccacttggttcaggccatcggcaacgagcttttgaaaaaccgtcccgacgcgaaagtacgctatatgcattcggacgattatatccgcagcttcatgaaagccgtgcgcaacaacacttacgacgtgttcaaacagcaatacaagcaatacgacctgctgattatcgacgacatccagttcatcaaaggcaaagaccgtacgatggaagagtttttctatctgtacaaccatttccacaacgagaaaaaacagctcatcctcacttgcgatgttttacccgccaaaatcgaaggtatggacgaccgcctcaaatcccgtttttcatggggactgactttggaactcgagccgcccgaattggaaatgcgtatcgccattttgcagaaaaaggcggaagcggcgggcatcagtatcgaagacgaagccgcgctgttcattgccaatctgatccgttccaacgtgcgcgagcttgaaggcgcgttcaaccgtgtcggagcgagcagccgctttatgaaccgtcccgtcatcgacatcgatttggcgcgtaccgctttgcaggacattattgccgagaagcataaggtcattaccgccgatatcattattgatgccgttgccaaatattaccgtatcaaaatcagcgatgtgctcggtaagaaacggacacgaaacattgcccgtccgcgccaggtggcgatgagcctgaccaaagaactgaccactttgagcctgccgtctatcggcgattcgttcggtgggcgcgaccatacgaccgttatgcacggcatcagggcagtggcgaaactgcgcgaagaagatccggaattggctcaggattatgaaaagctgctgattctgattcaaaactga

SEQ ID NO: 36188 - DNA, 813 bp, Neisseria meningitidis
atggacaaaatcagagttgccgccgtgcagatggtgtcgggcgtgtcgccggaaaccaacgtcgccgccatgaaacgcctggtcgcacgggcggcggagcagggtgcggattgggtgctgctgcccgaatattgggtgctgatgggcgcaaacgataccgacaaactcgcgcttgccgagcctttgggcggcggacgctttcagacggcattgagcgaaacggcgaaagaatgcggcgtggtgctgttcggcggaaccgtgccgctgcaaagccccgaggcgggcaaggtcatgaatactttattggtgtacgggcgcgacggcaaacggacggggctgtaccacaaaatgcacctcttcggcttttccggtttgggcgaacgctatgccgaagccgataccatccgcgcgggcggggaagtgccgcacttgtcggcagagggcgtgccggtggcggcgggcatttgttacgatgtccgcttttccgaatttttccgccgccagctgccgtttgacgtattgatgctgcccgctgcgtttacgcacacgacgggcaaggcgcattgggagctgctgctgcgcgcgcgtgccgtcgaaaaccaatgttacgtcgtggcggcggcacagggcggtttgcacgaaaacggacggcgcacgttcggacacagcatgattgtcgatccgtggggcgacgtattggacgtattgcccgaaggcgaaggcgttgttacggcagacatcgatgccaaccgcctgaacagcgtccgcaaccgcctgcccgccttgaaataccgggttttggatgccgtctga

SEQ ID NO: 36189 - DNA, 1098 bp, Neisseria meningitidis
atgaaatccgtccgctccttcatccgcgacgacatacaagctatgtcggcatatcagattgccgacgttccgcccggctttgccaaactcgattcgatggaaagtcccgtccacccttttgccggacatgaaacgctgttgcaggaatggcaggcacggcttgccgccgcgcccatccatctttaccccaatccctccggcagcggtttacaggaagcattacgttcggcgttcgacattcccgactgcgccgacatcgcgctgggcaacggctcggacgagctgatacagttcatcacgatgctgaccgccaaaccgggcgcggcaatgttggcagccgaacccagtttcgtcatgtaccgccacaacgccgcgctgtacggcatggattatgtcggcgttccactgaacggagatttcaccctcaacctgcccgccgtcctcgaagccgtcaggaagcaccgccctgccctgacctttatcgcctaccccaacaaccccaccggcgtatgtttcacgcgtgccgaaatcgaagccgtcatcgaagcttcagacggcatcgtcgtcgtcgacgaagcctacggcgcattcaacggcgacagcttcctgccgcaggcgggcagcattcccaacctcatcgtcatgcgtaccgtcagcaaaatcggttttgccggactgcgtatcggctatgcggcaggctgtcccgaagtcatcggcgaactgcaaaaaatcctgccgccctacaatatgaaccaactgagcctgaccaccgccaaactcgccctgcaacactacggcatcatctctgccaacatcgacagcctgaaaaacgaacgcgaacggatgttcgccgaattgggcaaaatatgccgtctgaacacctttccaagtcaggcaaacttcattaccatacgcgtacccgatgccgatttgttgtttgacacgctcaaacaaaaccgcatcttggttaaaaaactgcatggcgcgcacccgcttttggaacactgcctgcgcattaccgtaggcagccccgcacaaaacgatgccgttctcaacatcattcgccaactttactgccaaccaacggatttcctatga

SEQ ID NO: 36190 - DNA, 273 bp, Neisseria meningitidis
atgaaacagacagtcaaatggcttgccgccgccctgattgccttgggcttgaaccaagcggtgtgggcggatgacgtatcggattttcgggaaaacttgcaggcggcagcacagggaaatgcagcagcccaatacaatttgggcgcaatgtattacaaaggacgcggcgtgcgccaagaccgcgcccttgcccaagaatggtacggtaaggcttgtcaaaacagagaccaagacggctgcggccattaccaacgcctgaaagcgggttattga

SEQ ID NO: 36191 - DNA, 696 bp, Neisseria meningitidis
atggccaaagtatctaaacgcttgaaagctcttcgctcttctgtggaagccaataaattatatgcaattgatgaagcaattgctttggtaaaaaaagcagcgactgctaaatttgacgagtctgttgacgtatctttcaacttgggcgttgatccgcgtaaatctgaccaagttatccgtggttcggtcgttctgcctaaaggcaccggtaagacaacccgtgtggctgtatttactcaaggtgcaaatgcagaagctgctaaagaagctggtgcagatatcgtcggtttcgaagatttggctgctgaaatcaaagcaggcaatctaaactttgatgttgttattgcttctcccgatgcaatgcgtattgttggtcagttgggtactattttgggtcctcgaggcttgatgccaaaccctaaagtaggtacggttacccctaatgttgccgaagcagtaaaaaatgcaaaagcaggtcaagtgcagtaccgtaccgacaaggcaggtattgttcatgcaacgattggtcgtgcttcattcgctgaagctgatttgaaagagaactttgatgcgttgctggatgctatcgttaaagccaagcctgctgccgctaaaggtcagtatctgaaaaaagttgctgtgtctagcaccatgggtttgggtattcgcgttgatacatcaagcgtaaataactaa

SEQ ID NO: 36192 - DNA, 1509 bp, Neisseria meningitidis
atgaccaccacccccgcaaacatcctcgcctccgtcgatttgggttccaacagtttccgcctccagatttgcgaaaacaacaacggacaattaaaagtcatcgattcgttcaaacagatggtgcgcttcgccgccggtctggacgaacagaaaaacctgagtgccgcttcccaagaacaggctttggactgtctggcaaaattcggcgaacgcctgcgcggcttccgccctgaacaggtacgcgccgtggcaaccaatacattccgcgtcgccaaaaacatcgcagatttccttcccaaggccgaagcggcactgggtttccccatagaaatcatcgccgggcgcgaagaggcgcggctgatttataccggcgtgatccacaccctccccccggtcggcggcaaaatgctggttatcgacatcggcggcggttcgacagaatttgtcatcggttcgacgctgaatcccgacattaccgaaagcctgcccttgggctgcgtaacctacagcctgcgcttcttccaaaacaaaatcaccgccaaagacttccaatctgccatttccgccgcccgcaacgaaatccagcgcatcagcaaaaatatgaggcgcgaaggttgggattccgccgtcggcacatcgggttcggcaaaatccatccgcgacgtgcttgccgccgaaatgccccaagaggcggacattacctacaaaggcatgcgcgccctcgccgaacgcatcatcgaagccggttcggtcaaaaaagccaaatttgaaaacctgaaaccggaacgcatcgaagtttttgccggcggacttgccgtgatgatggcggcgtttgaggaaatgaaactcgacaggatgaccgtaaccgaagccgccctgcgcgacggcgtgttttacgatttgatcgggcgcggtttaaacgaagatatgcgcggacaaacggttgccgagttccaacaccgctaccacgtcagcctcaatcaggcgaaacgcaccgccgagaccgcgcaaacctttatggacagcctctgccacgctaaaaatgttacggttcaagagcttgccttgtggcaacagtatctcggacgcgccgccgcgttgcacgaaatcggtttggacatcgcccacaccggctatcacaagcattccgcctacatcctcgaaaacgccgatatgccgggcttttcacgcaaggaacaaaccatacttgcccaactggtcatcggtcatcgcggcgatatgaaaaaaatgagcggcatcatcggcaccaacgaaatgttgtggtatgccgttttgtccctgcgccttgccgcactgttctgccgttcgcgccaagacctgtctttcccgaaaaacatgcagttgcgcacggatacggaaagctgcggcttcatcctgcgtattgacagggaatggctggaacgccatcccctgattgccgacgcattggaatatgaaagcgtccaatggcaaaaaatcaatatgccgtttaaagtcgaggccgtctga

SEQ ID NO: 36193 - DNA, 1065 bp, Neisseria meningitidis
atgactcttttaaaaaacgataccttcctccgcgccctgcttaaacagcccgtcgaatacacgccgatttggatgatgcgtcaggcggggcgttatctgcccgaatacaaagccacacgcgcgaaagcgggcagcttcctcgatttgtgcaaaaacaccgaattggcgaccgaagttaccatccaacctttggaacgtttcgatttggacgcggcgattttgttttccgacatcctgaccgtccccgacgcaatgggcttgggactgtattttgccgaaggcgaaggcccgaaattcaaacgcgccctgcaacacgaggacgacattgccaaattgcacgtccccgatatggaaaaactgcaatacgttttcgacgcggtaacttccatccgtaaagcattggacggccgcgtaccgcttatcggcttctccggcagtccgttcacgctcgcctgttacatggtcgaaggcggcagcagcaaagaattccgcaccatcaaaaccatgatgtactcgcgccccgatttgctgcacaaaatcctcgataccaacgcccaagccgttaccgcctacctcaacgcccaaatcgacgcgggagcgcaggctgtgcagattttcgacacttggggcggcgtcttgagcgatgcggcgtttaaagaattcagcctcaaatacatccgccaaattgttgccggactgaaacgcgaaagcgaaggcaggcgcgtgcctgtcatcgtgtttgccaaaggcggcgggctgtggctggaaagcatggcagaaatcggcgcagacgcattgggcttggactggacgtgcaacatcggcgaagcacgccgccgcgtcggcaagcaagtcgccctgcaaggcaacttcgacccgtttgctctctttggcacacccgaatccatccgcaccgaagtcgcgcgcatcctagccgactacggacacggcagcggccacgtcttcaatctcggacacggcatcaaccaacacgccgaccccgaacacgccaaaatcttagtcgataccgtacacgagttgtcgcggcagtatcacggcgggtaa

SEQ ID NO: 36194 - DNA, 618 bp, Neisseria meningitidis
ttggaacaggatttcttcgggcggtatctggattcataccgtttttcgggaatgtgtgcggttcaggtgggcggtccgtggctgagcctgtctgaagatgttgtctgtgtgccgcgagatatgtcgatgtcggcggagaatatggctttggcggatgtttctgcggatatgctgctttttccgcatacgcttgaaggcggtatcccttcgcaaatcctgtccgaggcgcaccggatattgaaaccgtgcggacgcttgatgctgacgggtttcaatccgtattcgctctggggattcagccgttggtttgacggcgaacgcctgccggaaaaacggttttgtctgccgctgcccgagttgaaaaggcagcttgcggatgtcggtttcgatattgaatttgggaaatttatggtgtatctgccgcccgtttcgtcgatcgggcaaatacgcttttggcggtttatggaaaaggcgggcgaccgttggtggccgcaatgtgccgcagtgtacggtttggttttggtcaaaagggcggcgggcgtaacgcccctgcccgagtgggacgggtatttgggcggcaaagcccttgcggcgggtgcggcaagggttgcggattag

SEQ ID NO: 36195 - DNA, 702 bp, Neisseria meningitidis
gtgcaggcggatttagcttacgccgccgaacgcattacccacaattatccggaaccaaccggtgcagacaaagacaaaataagcacagtaagcgattatttcagaaacatccgtgcgcattccatccacccccgggtgtcggtcggctacgatttcggcggctggaggatagcggcagattatgccagttacagaaaatggaacaacaataaatattccgtcaacacaaaagaggtatcaagaaacaatagcaatggcaatgacacctggcaagaactgaagacggaaaatcaggaaaacggcagcttccacgccgtttcttctctcggcttatccgccatttacgatttcaaactcaacgataaattcgataaattcaaaccctatatcggcgcgcgcgtcgcctacggacacgttaaacatcaggttcattcggtgagaaaagaaaccacgactgttttcagtaaaccaagtggtagcgctacaaagccaggccagatcccaagtttggttaccaaacctgcctatcacgaaagccacagcatcagcagcttgggtcttggtgtcatcgccggtgtcggtttcgacatcacgcccaagctgaccttggataccggataccgctaccacaactggggacgcttggaaaacacccgattcaaaacccacgaagtctcattgggcgtgcgctaccgcttctga

SEQ ID NO: 36196 - DNA, 1299 bp, Neisseria meningitidis
atggctaaaaatgttgtagtaatcggcgcacagtggggcgacgagggtaaaggtaaaatcgttgactggctggcggaagaagccggcggcgtggtgcgcttccaaggcggccacaatgcgggccataccttggttgtcggcggcaaaaaaaccattttgcgcctgattccgagcggcatcctgcatgaaagtttggactgcttcatcggttcgggcgttgtcgtctcccccgaagccctgttgggcgaaatcgacgagttgaacgcggcaggcgtgaaaaacgtcgaaggccgtctgaaaatcgcgccgacctgcccgctgatcctgccttatcacatcgcgctcgaccaagcccgcgaagcatcgcgcggcaaaggcaaaatcggcacgaccggccgcggcatcggccctgcctacgaagacaaagtggcacgccgcgccattcgcgccgccgatttgctgcatcctgaaaaactgcgtgaaaaactggatgccgtccttgcctattacaatgtccaactgcaacatctgcacaatgccgagccggttaaagcggaagacgtgatggcggttatcgaaaaagtcgcgccgcgcattgcgccgatgattaccgacgtgtcccgcgtgttgaacgagaaaaacaaaaacggcgaaaaactgctgtttgaaggcgcgcaaggtgcgttgttggacatcgactacggcacttatcccttcgttacctcgtccaactgtctggcgggagccgcttccgcaggcgcgggcgtaggtcctcaaatgctggattatgttttgggcatcgtcaaagcctataccacgcgcgtcggttcaggcccgttcccgaccgaattgttcgacgaagtaggcgcaggtttggcggaacgcggacacgaattcggctcggtaaccggccgcgcacgccgctgcggctggtttgatgccgccgccctgaaacgctccatccaaatcaacggcatttccggtatgtgcattaccaaactcgatgtaatggacggcgttgaaaccatcaatatctgcgtcggctacgaattgcccgacggcggcaaaaccgatatcctgccttgcggttcggatgcggtggaaacctgcaaaccgatttacgaaacaatggagggttggaaagaatcgactttcggcatcaaaaattatgaggaactgcccgataatgccaaagcatatttgaaacggattgaagaagtctgcggcgcgccggtcgccatcgtctccaccggccccgaccgcgaagaaacgattgtgctgcatcatccgttcgcataa

SEQ ID NO: 36197 - DNA, 501 bp, Neisseria meningitidis
atgctgtggctgggcatatcggttttgggggcaaagctgatgcccggcatatggggaatgacccgcgccgcgcccttgttcatcccccatttttacctgactttgggcagcatattttttttcatcgggcattggaaccggaaaacagatggaaacggatggcaggcagactccgaacatccgctgctcgggctttttgccgtcagtaatgtatcgatgacgcttgcttttgtcggaatatgtgcgttggtgcattattgcttttcgggaacggttcaagtgtttgtgtttgcggcactgctcaaactttatgcgctgaagccggtttattggttcgtgttgcagtttgtgctgatggcggttgcctatgtccaccgctgcggtatagaccggcagccgccgtcaacgttcggcggctcgcagctgcgactcggcgggttgacggcagcgttgatgcaggtctcggtactggtgctgctgctttcagaaattggaagataa

SEQ ID NO: 36198 - DNA, 1647 bp, Neisseria meningitidis
atgaaacactttcacgacttacccgcatggtcgaaattgtggaaccactttgacgacagcaaaacattgcatatgcgcgaaatgttcgagcaagacccgcagcgtgcggaacgctactggctgcaagtcggcggactgacgctggactactccaaaaaccgcatcaacgacgaaaccatgtcgcttttgttcgagcttgcccgagaagcaggcgtgccggagcggatgcggcagatgttccacggcgaaaaaatcaataccaccgaaaaccgcgccgtcctgcatgtcgcccttcgcaatcgcaccaattcgccgattgtggttgacggtgaagatgtgatgcccaaagtcaaccgcgttttgcaacgtatgggcgaatttgcacacgaagtccgcagcggaagctggctgggctataccaaccaagtcattaccgacgttgtcaacatcggcatcggcggatcggatttgggtccgctgatgatgtgtaccgcgctcaaacctttcggtcatccgcgcctcaatatgcacttcgtctccaacgtggacggctcgcaactgcgcgacgtattgtccaaagtccaccccgaaaccacgttgttcatcatcgcctccaaaacatttaccacgcaggaaacgctgaccaacgcgctgaccgcgcgcgaatggtttttgaatcatgcgggcgacgaagaagccgttgccaaacacttcgccgccgtttccaccaatcaaaaagccgtcgccgaattcggcatcgacaccgccaatatgtttgaattttgggattgggtcggcggtcggtacagcctgtggtccgccatcggattgccgattatgctgtatctcggcgaagaaaacttcatcgaaatgctcaacggcgcgcacctgatggaccaacacttcatcaacacaccgctcgagcgcaacctgcccgtcattctcgccctcatcggcatctggtatatcaactactacggcggcggcagccacgtcatcgcgccttacgaccaacatttgcaccgcctgcccaaattcatccagcagctcgatatggaaagcaacggcaaacaggttacgttggacggcaaagcagtcggacacgaaacctcgccgattatctggggcgaaacgggcattaacggccagcacgccttcttccaactgctgcaccaaggcacgcacattacccccatcgacctgattgcctcgcttgaaaaacgcagcaacctgcccggacaccacgaaatcctgcttgccaacgtcttcgcccaagcagaagcctttatgcgcggcaaaacccccgacgaagtccgcgccgaactcaaagcgcagggtatggatgaggcgcgcatcgaagagctggtcccgcacaaaaccttctccggcaaccgcccgaccaacctcattctcatggacaaggtcaacccgcgcaatatgggcagcctgattgccatgtacgaacacaaaaccttcgtacaaggcatcatttggggcatcaacagcttcgaccagtggggcgtggaactcggcaaacaactggctaaaaccattttgggcgaactgaccggcgaaaccgggccgcaaaagcacgacagttcgaccgaacgcctgatcaacctctacctgcagaccaaccgcaaataa

SEQ ID NO: 36199 - DNA, 174 bp, Neisseria meningitidis
atgaaaaagtctttgattgctttggctctgtctgtcttgaaaccgcagatgcctgaatttgagattaagcctgccagtattggctatttgaaacaacatccgtctatgcgcctgggcaagtcgggcgtagcggctgcgaaacgcgcggcgcgtaaacgcaagaatcgtcgttaa

SEQ ID NO: 36200 - DNA, 807 bp, Neisseria meningitidis
atgaaaagctcttttgtgcaaacgcttaccatcgccggttcggattcgggcggcggtgcgggcattcaggcggatttgaaaacgtttcagatgcgcggcgtgttcggaacgtgcgtcatcaccgccgttaccgcgcaaaataccttgggcgtgtcggcggttcatctcgtcccgaccgaaaccatcaccgcacaaatccaagcaatcagggaagactttgacatccgcgcctacaaaataggaatgctcggcacggcggaaatcatcgaatgcgttgccgacaagctgaaacactgcgacttcggcaggcgcgtactcgaccctgtgatgattgccaaaggcggtgcgccgctgttgcaggattccgccgttgcggcactgacgcgcctgctgcttcccgatacggatgtattgacccccaacctgcccgaggcggaagccctgaccggcgtgcatatcgaaaaccgtaaagatgcggaacgtgcggcaaaaatcctgcttgattacggtgtcaaaaatgtcgtcatcaaaggcggacatttgaatggcagcagcagcggacgctgcacggattggctgtttacgcaaaacgaaacgctggaattggacagcccgcgctttccgaccgcccacacgcacggcacgggctgcacgttttctgcctgcattaccgccgagttggcaaaaggcttagacgtttgcaaagccgtacggactgccaagtcctacatcacggcggcaatctcaagccctttggaaatcggcgcgggacacggcccggtcaatcattgggcctatcgggactaa

SEQ ID NO: 36201 - DNA, 987 bp, Neisseria meningitidis
atgccggcaagtcaacgatatgcctgcccctcatccaccttgattaacaatcactcccgcctattcaagcataatttacagaccaaacgttatacagtatcatatcagccatataacgataaacgctttaccgccttccctttcaaaaccgcaaatcatcatgacaccttcccttttactatcaggattgactttccgcctcatccttgccctgattgccgtatcccttttatggggcgtttacttttgggcagtatccgcatgagcatcattgtcgaaaacctgaccgtcagctaccgccgccgacctgccgtgcaccatgtggacattacttttgaagaacatagtatgtgggcggttttcggtcccaacggcgcagggaaatccacctttctcaaatccttaatgggattgcagcctatcgatacgggcagcatccggctggacggattgacccgtcagaacattgcctaccttccccagcagtccgacatcgaccgctcgcagcccatgaccgttttcgacttggcggcaatggggctatggtatgaaatcggttttttcagaggaataaatgccgttcaaaaacaacgcgttcacgaatctttggaacgcgtcgggatgcggcagtttgccggccgccaaatcgcccacctctcaaacggacaattccagcgtgtcctttttgcccgaatgctggttcaaaacgccaaattcctacttctagacgaacctttcaacgctgttgatgcacggacgacctacgaacttctcgacgtattgcagaaatgccattgcggcggacacgccatcatcgccgtactgcacgattacgaacaagtccgtgcctactttcccaataccctgctgctcgcccgcgaaaaaattgcggcaggcgcaaccgagaccattctgacagaaccctacctcgcccaagccaacgccaaaatgcagcaacaggaaagccccgagtggtgcgcctcataa

SEQ ID NO: 36202 - DNA, 966 bp, Neisseria meningitidis
atgagctacacgcaactgacccaaggcgaacgataccacatccaatacctgtcccgccactgcaccgtcaccgaaatcgccaaacagctgaaccgccacaaaagcaccatcagccgcgaaatcagacggcaccgcacccaagggcagcaatacagcgccgaaaaagcccagcggcaaagccggactatcaaacagcgtaagcgacaaccctataagctcgattcgcagctgattcagcacatcgacccccttatccgccgcaaactcagtcccgaacaagtatgcgcctacctgtgcaaacaccaccagatcacgctccaccacagcaccatttaccgctaccttcgccaagacaaaagcaacggcagcacgttgtggcaacatctcagaatatgcagcaaaccctaccgcaaacgctacggcagcacatggaccagaggcaaagtacccaaccgtgtcagcatagaaaaccgacccgctatcgtcgaccagaaatcccgtatcggcgattgggaagccgacaccattgtcggcaaaggacagaaaagcgcattattgaccttggtcgaacgcgttacccgctacaccatcatctgcaaattggatagcctcaaagccgaagacactgcccgggcagctgttaggacattaaaggcacataaagacagggtgcacaccatcaccatggataacggcaaagagttctaccaacacaccaaaataaccaaagcattgaaagcggagacttatttttgtcgcccttaccattcttgggagaaagggctgaatgagaacaccaacggactcatccggcaatacttccccaaacaaaccgatttccgtaacatcagtgatcgggagatacgcagggttcaagatgagttgaaccaccgaccaagaaaaacacttggctacgaaacgccaagtgttttattcttgaatctgttccaaccactaatacactag

SEQ ID NO: 36203 - DNA, 1047 bp, Neisseria meningitidis
atgattccggccacctacaccctgtcccaaatcaccgcacagctcggcggcgaatggcgcggcgaggacatttccgttaccgccgtgcgcccgctcgcagacgcgcaggcggaacacatcagcttccttgccaatccgaaatacaaagccgaagtccacgacagcagcgcgggcgcggtcatcgtttccgccaaagcggcagacggatttgaagggcgcaacctgattgtcgccgacgacccctatctctatttcgccaaagtcgcccgcctgttttcacccgtcgtcaaagcgcgcggcggcatccatccgaccgccgtcgtcgaaccgagtgccaccgttcccgcaagctgcgaaatcggcgcgaacgcctacatcggcgcaaacaccgtgctcggcgaaggctgccgcatcttggcaaacgccgtcgtccaacacgattgcaaactgggcgacgaagtcgtcctgcatcccaacgccgtcgtttattacggctgcacactgggcagacgcgtcgaaatccacagcggcgcggtcatcggcgcggacggtttcggactcgcttttgccggcgattcatggtttaaaatcccgcaaaccggcgcggtaacgctgggcgacgacgtggaaatcggctcgaacaccaacatcgaccgcggcgcgatgagcgacaccaccgtcggcaacggcaccaaaatcgacaaccaagtccaaatcggacacaactgcaaaatcggttcgcacaccgtcatcgccgccaaaaccggcatctcaggcagcgtaaccataggcagctactgcatcatcggcggcggcgtcggtacggtcggacacatcgaaatcgccgacaaaaccaccatcggcggcggcacgtccgtcacccacagcattaccgaaagcggcaaacacctcgccggcatcttcccgatgtccacccataaagaatgggcgcgcaacgctgtttacatccaccgcttaagcgaaatgaacaaacggctcaaaacactggagcagcagctttcagatgccggtcaagacagcaaataa

SEQ ID NO: 36204 - DNA, 426 bp, Neisseria meningitidis
atgaaaacagcccgccgccgttcccgcgagcttgccgtacaagccgtttaccaatcccttatcaaccgcaccgccgcgcccgaaattgctaaaaacatccgcgaaatgcccgactttgccaaagcggacgaagaattgttcaacaaacttttcttcggtacgcaaaccaacgcagcggactacatccaaaaaatccgccccctgctcgaccgcgacgaaaaagacctcaatcccatcgaacgcgccgtcctgctgaccgcctgccacgagctgtccgccatgcccgaaacgccctaccccgtcattatcaacgaagccatcgaagttaccaaaaccttcggcggcacggacgggcacaaattcgtcaacggcatcctcgacaaactcgctgcccaaatccgccccgacgagcccaaacgccgttga

SEQ ID NO: 36205 - DNA, 2559 bp, Neisseria meningitidis
atgcctgcaaacctgtcttcagcactggaaaccttcaaacggcagcgcgatgccgccgaagcgcattatttgaaagccaaccgcgtgtcggtatttttcagggaatatacggcggcagtcgaaaccttactggcggcattgtgggtagaacattttcaaaacagcgcgttatgcctgatggcggtgggcggcttcgggcgcggcgaactgtatccctgttcggatgtggatttggcggttgtctcccctgccccgctttcagacggcattcaggaacagattgcccggtttgtccaaaccctgtgggactgcaaactgatgccgtctgtaaaaagcggcagcgttggcgaactgtgcgaaagcgtgcgcgacgatattacgggggacacggcgtttttagaggcccgttttttgttcggcaaccgccaaacggcggacgaactggcgaaaaaaatgaacgcgcagcgcaatgtggcggcgtttgtcgaggcaaaactggtggagatggaacaccgccacgccaaatcgcaaggttcgggggcagtattggagccgaatatcaaaagctgtccgggcggtctgcgcgacatccacaccctgctttggatagcgaaggcgcaaggcttggcgaccgacctgcccgacctgctcaaacagcggattttgacgcgtgccgaagccggtatgctttcgcacggctaccgccgcctcgcccacatccgcatccatctgcatttaaacgccaagcgcgccgaagaccgcctgctgttcgatttgcagccgcaagtcgccgaaagcatgggttatgaaggcttgaacctccgccgccaaagcgaagaactgatgcgcgtgttttaccgcgcgattaaaaccgtcaaacaactgggcggcatcctcacgcctatgctgcaaagccgcgtttcctccaccccgttgcgcgttaccctgcggattgacgacgactacatccaagtcaacaaccaaattgccgcgcggcacaccgatatttttttcagacggcccgaacacattttcaaaatcgtcgaaatcatgcagcagcgcaacgatattaccgcgctcgaaccgcaaaccctgcgcgcatggtggggcgcgacgcgcaaaatcaaccgcagcttctaccaaaattctgaaaaccgccaccgcttcgccggctttttccgcaacggcaacggactgacccaaaccctgcgcttcctcaacctctacggcgtattgggacgctacctgcccgcgtgggaaaaaatcgtcggcctgctccagcacgacctgttccacatctatcccgtggacgaccacatcctcaccgtcgtccgcaacgtccgccgccttgccttggatatgcacagccacgagctgccctacgcctctgcactgatgcagtcctttgaaaaacaagacatcctctaccttgccgcctttttccatgacatcgccaaaggacgcggcggcgaccatgccatacaaggcatcgcagacgcgcgccaatttgccgccgaccacttcctgaccgaagaagaaagcgacctgctcgcctggctggttgaaaaccatcttcttatgtccaccgtcgcccaaaaagaagacatccaagaccccagcgtactcgatgccttctgcaaacgcgtccaaacccacgaacgcctcagcgcgctctaccttctgaccatttccgacatacgcggcaccaatcccaagctgtggaacgcatggcgcgccagcctgctggaaagcctcttccatgccgccggacgctaccttacaggcaacggcggcaacccgcacaccctcttcggccgccgccggcaggaagccgccgacttactcacccgcgccgccgtccccgaaaaacagcagaaaaaactatggaacgcgctcggttccgcctacttcgcccgccaccagtcccgcgaaatcctgtggcacgccgccaacctagtccacgactttgaaacccccatcgtccgcagccgcatcctgccccaaagcgacagctttcaagtcatggttttcatgcccaacggcccgcgcctgttcgcccgcctctgccgcattttcagccgccacggcttcgatatcctcgccgcccgcgcctttatcaccgaacacgactacatcctcgacaccttcatcgtgcaaatcccctcgcagcacgctcccgaagactaccccgacatccaaagcgcgctcgaagccgaactcaacagctttatccacggacacaccgttgccgaaatctccagccatagccgccgcatcagccgccgcagccgctacatgccgatcgcaccgagcatcaccatcacccccgaagaagactatcccgactggtattccgtcgaaatcaccgccgtcaaccgccccttcctgctcgccgatatggcggaagtctttttcgcccacaacgtcagcctgcgctacgccaaaatctccacgttggacgaacgcgccgaagacagttttaccgttttcagccccgatttgaacaaccccaaaatccagtcctcattgaagcagacgctgctggaacaattatcataa

SEQ ID NO: 36206 - DNA, 432 bp, Neisseria meningitidis
atgaaaaccttttcagcgaaaccccacgaggtgaagcgcgaatggttcgtcatcgatgcccaagacaaagtcttgggtcgcgttgcggccgaagtcgccagccgtctgcgtggcaaacacaaacctgaatacaccccccacgtcgataccggcgattacatcattgttatcaatgcggacaaactgcgtgtaaccggtgccaaattcgaagataaaaaatacttccgccattccggtttcccaggcggtatctacgaacgcactttccgcgaaatgcaagagcaattcccgggccgcgctttggaacaagctgtaaaaggtatgctgcccaaaggtcctttgggttacgccatgattaaaaaactgaaagtgtatgcgggtgcggaacacgcccatgctgcgcaacaacccaaagttttggaactgaaataa

SEQ ID NO: 36207 - DNA, 1407 bp, Neisseria meningitidis
atgaaactgttccaacgcatcttcgccacattttgcgcggttatcgtctgtgcaatctttgtggcgagtttttctttttggctggtgcagaacacccttgccgaaaaccagttcaaccaacgccgcaccatcgaaaccactttgatgggcagcatcatttccgcattccgggcacgcggggacgcgggcgcgcgcgaaatcctgacggaatggaaagacagccccgtctcatcgggcgtgtacgttatacagggcgacgagaaaaaagatatcctgaaccggtatatcgacagctacaccatcgaacgcgcccggcttttcgccgccggacacccgcattccaacctcgtccatatcgaatacgaccgcttcggcgaagaatacctgttcttcaccaaagactgggacaaactccaagcccgccgcctgcccagccccctgttgatccccggtctgccgctcgccccgatttggcacgaactcatcatattgtccttcatcatcatcgtcggactgctgatggcgtacatcctcgccggcaacattgccaaacccatcagaatcttaggcaacggcatggacagggtggcaaacggagaacttgaaacccgtatctcccaacaggtcgacgaccgcgacgacgaattgtcccatcttgccatccaattcgacaaaatggtggaaaaactcgaaaaactcgttgccaaagaacgccacctgctccatcacgtctcccatgaaatgcgttctccccttgcgcgcatgcaggcaattgtcggactgattcaggcgcagccccaaaaacaggagcaatatctcaaacggctggaaggcgaactgacccgcatggatacgctggccggggaactgttaaccctgtcccgtctcgaaacttccaatatggctttggaaaaagaaagcctgaaactcctgcccttcctgggcaacctggtagaagacaatcaaagcattgcccagaaaaacggacaaacggttaccctgtctgccgacggaaaaatccccgaaaacacaaccatccttgccaacgaaagctacctgtaccgcgccttcgacaacgtcatccgcaacgccgtcaactacagtcccgaaggcagcaccatcctgatcaacatcggacaagaccacaaacactggataatcgacgttaccgacaacggccccggcgtggacgaaatgcagctcccgcacatcttcaccgctttctaccgtgcagactccagtgcgaacaaacccggaacaggactggggcttgcattgacccaacatattattgaacagcactgcggaaaaatcatcgccgaaaacatcaaaccaaacggtctgcggatgcgcttcatcctgcccaagaaaaaaaccggttccaaaacagaaaaaagtgcgaactga

SEQ ID NO: 36208 - DNA, 1164 bp, Neisseria meningitidis
atgtctgagcaacttcctgtggcagttgccactgaaaccaaagccgagcgtaaaaagccgaaaaagaaaagttggattaaaaagctaagccctttattttgggtaacggtgattatccctacggtaatttcgttggtgtatttcggcttcttcgcttccgatcgttttacgtcgcaatcgagctttgtggtgcgctcgcctaaaagccaatcttctctcaatggcctgggtgccattttgcagggcacaggttttgcccgtgcgcaagatgatatttacacggttggggagtatatgcgttcgcgctcgtctttggatgaactgcgtaaaatcttgccggtgcgtgagttttatgaaaccaaaggtgatgcgttcagccgctttaatgggtttgggttccgtggcgaggaagaggctttttatcaatactataaaaatcaggtgatgatcaattttgatacggtttcgggtatttccacgttgaatgtaacttcctttgatgcgctggaatctaagaaaatcaatgaggctttgttaaaacaaggtgaagcattgattaaccagttgaacgatcgtgcacgtgctgatacggtgcgctatgcggaagaagtagtgaaaacggcggcagagcgggtaaaggaagcctctcagaatctgacggattaccggattgccaatggcgtttttgatttgaaagcgcaatcggaagtgcaaatggggttggtttccaagctgcaagatgaattgattgtgattcaaacccagctggatcaggtgaaagcagtcactccggagaatccgcagattccgggtttgcaggcgcgtgagcagagcttgcgtaaagaaattgaccaacagttacgtgccatttcgggcggtgggcattcttcgttgtctaatcaggctgccgagtatcagcgtgtgtatttggaaaaccagttggcagagcagcagttggcagccgccatgacttctttggaaagtgccaaggttgaagcagaccgtcagcagctttatttggaagtgatctcgcaaccgagcctgccggatttggcacatgagcctaaacggttatacaacattgttgccactctgattatcggcttgatggtttatggtattttgagcctgttgactgccagcattcgtgagcataaaaactga

SEQ ID NO: 36209 - DNA, 486 bp, Neisseria meningitidis
atgtttgtgaacgagaaatatccctatgcggctttgtttgcggggctagtgtttttgacgctgccgttcgcactgtcggtgcatgatgccttggcatttgcgttcggacgggcggggctgctggtgtcggtgtcggacggcggattcggctggcgtggcggttgggacggcactgtttggtttgtgttcggtgtgtttgcgtttttgaatgtggttgtatcggcgggtctgacgaaactggcgtacaaaaagatgatgcggcggcattcccgttacgcgctgtttctgtcgggcgtggcggcttgcgcggcagcagcggtggcttggattttcgagctgttgttgggcagtgaggctttgggcgggctgcgcggggaggcggtgtcggaatatgcgtttgccgtgtggctggtggcgatgctgacgctgcccaaacgcctgacgcgcgcgccggtgcagccggtggtgtttcacaggaaaaaatag

SEQ ID NO: 36210 - DNA, 279 bp, Neisseria meningitidis
atgcttgaaattgagattgtgtacgggctgcccgaccgacaggttttgaaaaccatgcagcttgccgagggaacaaccgtccgcgccgccgcactgcaaagcggtttggacggcatatttgaagatttaaacctgcattccgcgcctttgggcattttcggcaaagccgtcaaagacgacacgccgctgcgcgacggcgaccgcatcgaagtgtaccgcccgctgttgatcgaccccaaagaagcgcgccgcaaacgcgttcaaaatcaagaagaataa

SEQ ID NO: 36211 - DNA, 1215 bp, Neisseria meningitidis
atgagtgaagttgaatatttctcacactttatatcggacggaaaagggaagcttttagaaattccgcagcgaagaggtaagcaagacggggtttttgttgattggatttcattcacattccatgaagatactttactgaaagtttccggttgccctttattttctgatgctgaatacatgtatgtattaagcagaaagctggaagaaattctaggttttggcataacgcgcaaatgcaaatcaaggggcaacaaattctatgaatccatgtataggttaggttcggatgatgttgattatggagaggtgcatttcggaggtcagcgcaatactgttttagttgagttgaaaggtactggttgcagcgttgcaagtccgggttgggagttgaggctaaagcagtttctcgatgattcgataaggacaagaataacgcgaattgacctagcacttgatttttttgatggagagtacacgccggatcaggcgttgttagatcacgataatggtttttttgataacagcaatcaaaggccgaaatctgaaacgatcggtacggcttggcggaatgaggacgggagcggcaagacattttatgtaggtcgcaagaaaaattctcgttttgttcgtgtttatgagaaaggcaggcagcttggagataaagaaagcaaatgggtaaggttcgagatccagtttaattatggagatatagaaatacccttggatattttaataaatcagggttcgtatttctgtggagcttttccaatttgtagaaaatttaaaaatatgccggttcccgaaaggtttgatcagagaaagaaaacgcttaatttaactttcgagcataaattgcattacgcgaaaaacgcggttggaaaactggtcaatttcatgattgaaatgggttttgataatagcgaaattgtggaatctttaaaggcagattcgggatttcccaaaggattagaacctgaaaaatatgctctggaaatgttaagggacggtttgaaacacggttttattcatgaacagccggatattgatttggaaattgaacttgatgaattgggggttattgcttttaaaaattctgacaaattcgatagggaaaaaaggctttttagtcctgattatgatgtcgagaaagaaaggaaatatcaggaatatttaagtaaagtttatcatcaaaatgtagattatgattatttttaa

SEQ ID NO: 36212 - DNA, 1980 bp, Neisseria meningitidis
atgtctcaactggcaaacgcaatccgcttcctctcggccgatgccgttcaaaaagccaattccggccaccccggcgcgcctatgggtatggcggaaatggcggaaacattgtggacgaaattcctcaatcacaatcccgccaaccccaaattctacaaccgcgaccgcttcgtcctctccaacggccacgcgtctatgctgttgtacagcctgctgcacctgaccggctacaacctaagcattgaagacttgaaaaacttccgccaactgcacagcaaaacccccggccaccccgaatacggctacaccgacggcgtggaaaccacgaccggcccgttggggcaagggattgccaacgcggtgggtatggcattggcagaaaaaatccttgccgccgaatttaataaagacggtttgaacatcgtcgatcattacacctacgtctttatgggcgacggctgtctgatggaaggcgtatcgcacgaagcctgttcgctcgccggcaccttgggcttgggcaaactgattgttttgtatgatgacaacaatatttccattgatggtaaagtggacggctggtttaccgaaaacatcccgcaacgctttgaaagctacggctggcacgtcgttcccaatgtaaacggtcatgacaccgccgccattcaagccgccatcgaagccgcacgtgccgaaaccggcaaaccgtccatcatctgctgcaaaaccttaatcggcaaaggcagtgccaacaaagaaggcagccacaaaacccacggcgcacctttgggcgcggacgaaatcgaagccacgcgcaaacatttgggctggacttaccccgcctttgaaatcccgcaagaaatttacgatgcgtggaatgccaaagaacaaggcgcgaaactggaagccgactggaacgaactgttcgcgcaatatcaagccaaatatcctgccgaagccgcagaatttgtgcgccgtatggataaaaaactgccggaaaactttgacgagtacgttcagacggcattgaaagaagtgtgcgccaaagccgaaaccatcgctacccgcaaagccagccaaaacagcatcgaaatcttggcaaaagagctgcccgaactggtgggcggttcggccgacctgaccccgtccaacctgaccgactggtcaaacagcgtctccgttacccgcgacaaaggcggcaactacatccactacggcgtgcgcgagttcggtatgggtgcgattatgaacggtcttgccctgcacggcggcgtaaaaccctttggcgcgaccttcctgatgtttagcgaatacgaacgcaacgccttgcgcatggcggcactgatgaaaatcaaccctgtatttgtgttcacccacgattccatcggtttgggcgaagacggcccgacccaccagccgattgagcaaaccgccaccctgcgcctgattccgaacatggacgtatggcgtccgtgcgacaccgccgaatctctggtggcttgggcagaagccgtcaaagccgccgatcatccgtcctgcctgattttcagccgtcaaaacctgaaattccaagcgcgcagcgaacaacaactgaacgacatcaaacgcggcggctacatcatcagcgaagcccaaggcaacgcgcaagccgtcatcattgccaccggttccgaagttgagctggctttggaagcgcaaaaagccctcgccgcgcaaaacatcgccgtacgcgtcgtttccatgccgtccaccaacgtattcgaccgccaagacgccgcctatcaagccaccgtcctgcccgaaggtctgccgcgcgttgccgtagaagccggacacgccgacggctggtacaaatacgtcggtctgaacggcgcagtcgtcggcatcaaccgcttcggcgaatccgcccctgccgacttactcttcaaagcattcggctttaccgtggacaatgtggtcgatacagtgaaatcagtgctgtaa

SEQ ID NO: 36213 - DNA, 1887 bp, Neisseria meningitidis
atgccgtctgaaaccgtttttcaagtaattgatatgaataaagaaacccgttttccggaacacttcgacatcccacttttcctcaaaaacctgcccaagctgccgggcgtgtaccgtttttttgacgaaggcggcaaagtcttatacgtcggcaaagcggtcaacctcaagcggcgcgtgtccggctatttccaaaaaaacgaccattcgccgcgcatcgcattgatggtaaaacaggttcatcatatcgaaaccaccatcacgcgttccgaagccgaagccctgattctcgaaaacaacctcatcaaagccttgtcgccgaaatacaatatccttttccgcgacgacaaaagctatccttatttgatgctcagcggccatcaatatccgcagatggcgtattaccgcggcacgctgaaaaagccaaaccaatacttcggcccgtatcccaacagcaacgccgtgcgcgacagcattcaagtgttgcaaaaagtctttatgctgcgtacctgcgaagacagcgtattcgagcatcgtgaccgcccttgcctgctgtatcaaatcaaacgctgcaccgcgccctgcgtcggacacatcagcgaagaagactaccgcgacagcgtgcgtcaagccgccacttttctcaacggcaaaaccgacgaactgacccgcaccctgcaacacaaaatgcaaactgccgccgcgaatctgcaatttgaagaagccgcccgctaccgcgaccaaatccaagcactcggcattatgcagagcaaccagttcatcgacagcaaaaacccgaacaaccccaacgatatcgatttgctcgcgctggcggtttcagacggcatcgtctgcgtacactgggtcagcatacgcggtgggcggcacgtcggagacaaaagtttcttccccgacaccaaaaacgatcccgagccaaacgggcaagactatgccgaagccttcgtcgcccaacactatctgggcaaaagcaaacccgacattatcatcaacaacttccccgtccccgatgcgctgaaagaggctttggaaggcgaacacggcaaacaaatgcagttcgtaaccaaaaccataggcgaacgcaaagtctggttgaaaatggcggagcaaaacgcacaaatggcgattgcacaacgccgcctgcaacaaagcagccagcaacaccgcatcgacgaactcgccaaaatcctcggtatggattcagacggcctcaaccgcctcgaatgtttcgacatcagccacacccaaggcgaggccactattgcgtcctgcgttgtgtacgatgagcaaaacatccagccctcgcaataccgccgctacaacatcacgaccgccaaacccggcgacgactacgccgccatgcgcgaagtgttgacgcgccgttacggcaaaatgcaggaggccgaagccaacggcgagaccgtcaaatggcccgatgtcgtattgattgacggcggcaaagggcaaatcggcgtagccgtatcggtatgggaagaactcgggctgcacattcctttggtcggtatcgccaaaggcccggagcgcaaagccggtatggaagaactcatactgccttttaccggcgaagtcttccgcctgcccccacacagcccggccttgcatctattgcaaaccgtacgcgatgaatcgcaccgctttgccatcacaggccaccgcaaaaaacgcgacaaagcgcgcgttacctcatccctcggcgacattcccggcgtaggcagcaaacgccgccaagccctgcttacccgcttcggcggtctgcgcggcgtgattgccgccagccgcgaggacttggaaaaagtggaaggcatcagcaaggcattggcggaaaccatttataatcatctgcattag

SEQ ID NO: 36214 - DNA, 1131 bp, Neisseria meningitidis
atgtttaccgatgaaaatatgaccgcaaaggaagaactgttcgcatggctgcgccatatgaaccaaaacaaaggttccgacctgttcgtgacgacccatttcccgcccgcgatgaagttggacggcaaaatcacccgcatcacggacgagccgctgacggcggaaaaatgtatggaaatcgccttttcgattatgagtgcgaagcaggcggaagaattttcatcgaccaacgagtgcaacttcgccatcagtctgccggacaccagccgcttccgcgtcaatgcgatgatacagcgcggcgcgacggcgttggtattccgtgcgattaccagcaagattcccaagtttgaaagcctgaacctgccgccggtcttgaaggatgtcgcgctgaaaaaacgcgggctggttatttttgtcggcggcaccggctcgggcaaatcgacttcgcttgcctcgcttatcgactaccgcaatgaaaattcgttcggacacatcatcaccatcgaagacccgatcgagtttgtccacgaacacaaaaactgcatcatcacccagcgcgaggtcggcgtggatacggaaaactggatggcggcgttgaaaaacacgctgcgtcaggcgccggatgtcatccttatcggcgaaatccgcgaccgcgaaacgatggactacgccattgcctttgccgaaacggggcatttgtgtatggcgacgctgcacgccaacagcaccaatcaggcactcgaccgcatcatcaactttttccccgaggagcggcgcgaacaattgctgacggatttgtcgctcaaccttcaggcgtttatttcgcaacgcctcgttccgcgagacggcggcaagggcagggtggcggcagtcgaggtgctgctcaattcgcccctgatttcggagttgattcacaacggcaacatccatgaaatcaaagaagtgatgaaaaaatccactaccttgggtatgcagaccttcgaccaacacctttaccaattgtatgaaaaaggcgagatttccttgcaggatgccttgaaaaatgccgattccgcacacgatttgcgtttggcggtgcagttgcgcagccgccgcgcgcaaagttccagccccgatttggaactgctctga

SEQ ID NO: 36215 - DNA, 774 bp, Neisseria meningitidis
atgccggacaacgggcggcataaggcgggaaaaatggaaacgacactgttcaaacccgccctgtggcagataccgcatatcggatccggcggcgaaaccgcccttgcggaaaaaacggaaaccctcaaacaacgcctgcaccggattgtcggcagccaccgggatgcacggtttgccagcagccttgcggcagaagatatggtgattaccgaccttatcgccggcgaaaacctcaatatcggcatttttaccttggatacggggctgctccacacggaaaccctaaacctgctggacaggctcggacgcgcatatccccatttgcggataaagcgtttccggccggttcgagaagatgccgaccgttatgtggaaagcaaaggcaggtttgccttttacgacagcgttgaagcgcgccgcgaatgctgccgcatccgaaaaatcgaaccgctcaaccgcgccattgcaggcgcggacgcctggcttaccgggcaacgccgcgaacaatccgccacacgcacggaactgccgtttgccgaatacgatgccggacggggcatcggcaaatacaacccgattttcgactggtcggaacacgacgtgtgggcatacatcctcgccaacaatgtgccttacaacgatttgtaccggcaaggatttcccagcataggctgcgacccctgcacccgccccgtcaaggcgggcgaagacatccgcgccgggcggtggtggtgggaaggcagaaacagcaaagaatgcgggctgcacaaataa

SEQ ID NO: 36216 - DNA, 480 bp, Neisseria meningitidis
atgaacaaactgtttcttactgccgcagtgctgatgctgggcgcgtgcggtttccacctgaaaggtgcagacggcatttctccgccgctgacctaccggagctggcacatcgaaggcggacaggcattgcggtttcctttggaaacagcgctgtatcaggcttcgggcagggtggacgatgctgccggcgcgcagatgaccctgcgtatagacagcgtttcccaaaacaaggaaacctacaccgttacccgtgcggcagtcatcaacgaatatcttttgatattgacggttgaagcgcaggtattgaaacgcggcgagccggtcggcaaaccgatgaccgtgtccgtccgccgcgtccttgcttatgccgacaacgagatcttgggcaaacaggaagaggaagcggcattgtgggcggaaatgcggcaggatgccgccgaacagattgtccgccgcctgacctttctgaaggcggaatga

SEQ ID NO: 36217 - DNA, 828 bp, Neisseria meningitidis
atgttgaaaaaattcgtactcggcggcattgccgcattggttttggcagcctgcggcggagagggcggcagcgcgtcttcttctgctccggcccaatctgccggcgcgtccggtgattctttaatcgagcgcatcaacaataaaggtacggttaccgtcggcacggaaggcacttacgcaccgtttacctaccacgacaaagacggcaagctgaccggctacgatgtggaagttacccgcgccgttgcggaaaaattaggcgtaaaagtcgaatttaaagaaacgcaatgggattcgatgatggcgggtttgaaggcggggcgtttcgacgtggtggcaaaccaagtcggtctgaccagccccgaacgccaagcgacattcgacaaatccgatccttacagctggagcggtgccgtattggttgcccgtaacgacagcaacatcaaatctatcgacgacatcaaaggcgtgaaaaccgcacaatccctgaccagcaactacggcgaaaaagccaaagctgcaggcgcagatttggtggctgttgacggtttggcgcaatcgctgaccctgattgaacaaaaacgtgccgatgcaaccctgaacgacgaattggcggttttggactatctgaagaaaaacccgaatgcgggcgtgaaaatcgtttggtccgcacctgccgatgaaaaagtcggttccggcctgattgtcaacaagggcaatgacgaagccgtggcgaaattcagtacggcaatcaacgagctgaaagccgacggtacgctgaaaaaactgggcgaacaattcttcggaaaagacatcagtgttcaataa

SEQ ID NO: 36218 - DNA, 192 bp, Neisseria meningitidis
atgaataccgtcaaagaatatacggcagtccgcgaacggctgctcaatgctgccgattatttggaagaagtccgtaaagaccgtaagacgggcaatattgcgtccgtggaatttgtgccgccgaaaataggggctcggggttacggcaaattcaaagtccgttacaaaaccttagtggcggttgatttatga

SEQ ID NO: 36219 - DNA, 978 bp, Neisseria meningitidis
atgtgcgtattattgcaattattcagttgtgtttctcgtttaatcatctcattttatggttcaaaaagatttatggacattctagacaaactggtcgatttcgcccaattgacgggcagtgtggatgtgcagtgccttttgggcggacaatggtcggtacggcatgaaaccttgcaacgcgaaggactggtacacattgttacatcgggcaacggctatctctgcatcgacggcgaaacttccccgcgtccggtcagtacaggggatattgtatttttcccgcgcggcttgggtcatgtgttgagccacgacggaaaatgcggagaaagtttacaaccggatatgcggcagcacggtgcgtttacggtcaaacagtgcggcaacggacaggatatgagcctgttttgcgcccgtttccgctacgacacccacgccgatttgatgaacgggctgcctgaaaccgtttttctgaacattgcccatccgagtttacagtatgtggtttcaatgctgcaactggaaagcgaaaaacctttgacggggacggtttccgtggtcaacgcattgtcgtccgtcctgctggtgcttatcctgcgcgcctatctcgaacaggataaggatgtcgaactctcgggcgtattgaaaggttggcaggacaaacgtttgggacatttaatccaaaaggtgatagacaaaccggaagacgaatggaatgtcgacaaaatggtggcggctgccaatatgtcgcgcgcgcaactgatgcgccgtttcaaaagccgggtcggactcagcccgcacgcctttgtgaaccatatccgcctgcaaaaaggcgcgttgctgctgaaaaaaaacccggattcggttttgtcggtcgcactgtcggtaggctttcagtcggaaacgcacttcggcaaggcgttcaaacggcaatatcacgtttcgccgggtcaataccggaaagaaggcgggcaaaaataa

SEQ ID NO: 36220 - DNA, 1263 bp, Neisseria meningitidis
gtgcaggcgacggaggctttgcgccgcgtggacggcagtacggaggaaaaaatcatccgtcgggcggagatgatcgacaggaaccgtatgctgcgggacacgttggaacgtgtgcgtgcggggtcgttctggttgtgggtggcggcggcgacgtttgcgttttttaccggtttttcaggtacttatcttctaatggacaatcagggtctgaatttctttttggttttggcgggcgtgttgggcatgaatacgctgatgctggcagtatggttggcaatgttgttcctgcgcgtgaaagtggggcgttttttcagcagtccggcgacgtggtttcggggcaaagaccctgtaaatcaggcggtgttgcggctgtatgcggacgagtggcggcaaccttcggtacgttggaaaataggcgcaacgtcgcacagcctgtggctctgcacgctgctcggaatgctggtgtcggtattgttgctgcttttggtgcggcaatatacgttcaactgggaaagcacgctgttgggcgattcgtcttcggtacggctggtggaaatgttggcatggctgcctgcgaaactgggttttcccgtgcctgatgcgcgggcggtcatcgaaggccgtctgaacggcaacatcgccgatgcgcgggcttggtcggggctgctggtcggcagtatcgtctgctacggcatcctgccgcgcctcttggcttgggtagtgtgtaaaatccttttgaaaacaagcgaaaacggcttggatttggaaaagccctattatcaggcggtcatccgccgctggcagaacaaaatcaccgatgcggatacgcgtcgggaaaccgtgtccgccgtttcgccgaaaatcgtcttgaacgatgcgccgaaatgggcggtcatgctggagaccgaatggcaggacggcgaatggttcgagggcaggctggcgcaggaatggctggataagggcgttgccgccaatcgggaacaggttgccgcgctggagacagagctgaagcagaaaccggcgcaactgcttatcggcgtgcgcgcccaaactgtgcccgaccgcggcgtgttgcggcagatcgtccgactttcggaagcggcgcagggcggcgcggtggtgcagcttttggcggaacaggggctttcagacgacctttcggaaaagctggaacattggcgtaacgcgctggccgaatgcggcgcggcgtggcttgagcctgacagggcggcgcaggaagggcgtttgaaagaccaataa

SEQ ID NO: 36221 - DNA, 618 bp, Neisseria meningitidis
gtggtggctgtcgatattgtatgtggtccgctgctgactttaattttggcaagcccgaagaaaaagacaaaggcacgcatggtcgatttttccatggtcggcatcatccagctggcggctttggtgtacggtctgcacagcgtttctttggcgcgccctgtgatagaggcgtttgaaaaagacaggattaatgttgtgaccgccgccgaagtggcggttgaagatttgcacaaagcgccggaagggctgcaaagcctgtcgtggttcggcatccgccgcattgcattgaaagaacctgaggatgcggatgagaagaacaagacgctggatttgtccctgaaaggtatcgagccgagtatgcgtcccgaccggtggctgccgtattccgacaaggaagcagaagaaatccgcaaacatctgaaaccgctgaaagtcttggcggatgcgagaaaaacgacggttgcggacattctgaaacaggcaggtctcgccgaaggggaggagctgtattacctgccgtttaccagcagcaggcagaaagagtggatagtcattaccgataaagagggcaacaccaaaggctacgcgccgatagacggcttcatcatcaccccttaa

SEQ ID NO: 36222 - DNA, 1128 bp, Neisseria meningitidis
atgacccatatcaaacccgtcattgccgcgctcgcactcatcgggcttgccgcctgctccggcagcaaaaccgaacagcccaagctcgactaccaaagccggtcgcaccgcctgatcaaactcgaagtcccacctgatttgaacaaccccgaccaaggcaacctctaccgcctgcctgccggttcgggagccgtccgcgccagcgatttggaaaaacgccgcacacccgccgtccaacagcctgccgatgccgaagtattgaaaagcgtcaaaggtgtccgcctcgagcgcgacggcagccaacgttggcttgtcgttgacggcaaatcccctgccgaaatctggccgcttctgaaagccttttggcaggaaaacggcttcgacatcaaatccgaagaacccgccatcggacaaatggaaaccgagtgggcggaaaaccgtgccaaaatcccccaagacagcttgcgccgcctattcgacacagtcggtttgggcggcatctactccaccggcgagcgcgacaaattcatcgtccgtatcgaacagggcaaaaacggcgtttccgacatcttcttcgcccacaaagccatgaaagaagtgtacggcggcaaagacaaagacacgaccgtatggcagccctccccgtccgatcccaacctcgaagccgctttcctgacgcgctttatgcaatatttgggcgttgacggacagcaggcggaaaacgcatcggcaaaaaacccgaccctgcccgccgccaacgaaatggcgcgtatcgaaggcaaaagcctgattgtctttggcgactacggcagaaactggcggcgcaccgcgctcgccctcgaccgcatcgggctgaccgtcgtcggtcaaaacaccgaacgccacgctttcctggttcaaaaagccccgaacgaaagcaatgcagttaccgaacaaaaacccggcctgttcaaacgcctgctgggcaaaggcaaagcggagaaacctgccgaacagccggaactgattgtctatgccgagcctgtcgccaacggctcgcgcatcgtcctgctcaacaaagacggcagcgcatatgccggcaaagacgcatccgcattattgggcaaactccattccgaactgcgttaa

SEQ ID NO: 36223 - DNA, 1008 bp, Neisseria meningitidis
atgagcaccttcttccagcaaaccgcccaagccatgattgccaaacacatcgaccgtttcccgctattgaagttggaccaggtgattgattggcagccgatcgagcagtacctgaaccgtcaaaaaacccgttacctccgagaccaccgcggtcgtcccgcctgtcccctgttgtccatgttcaaagccgtcctgctcggacaatggcacagtctctccgatcccgaactcgaacacagcctcatcacccgcatcgatttcaacctgttttgccgttttgacgaactaagcatccccgattacagcaccttatgccgctaccgcaattggctggcgcaagacgacaccctgtccgaactgttggaactgattaactgccaactgaccgaaaaaggcttaaaagtagagaaagcatccgccgccgtcattgacgccaccattattcagaccgccggcagcaaacagcgtcaggccatagaagttgacgaagaaggacaagtcagcggccaaaccacaccgagtaaggacagcgatgcccgttggatcaagaaaaacggcctctacaaactcggttacaaacaacatacacgtaccgatgcagaaggctatatcgagaaactgcacattacccccgccaatgcccatgagtgcaaccacctgtcgcctttgctggaagggatagccgacggtacgaccgtctatgccgacaaaggctacgacagtgcggaaaaccggcaacatctgaaagaacatcagttgcaggacggcattatgcgcaaagcccgccgcaaccgtccgctgtcggaagcgcaaaccaaacgcaaccggtatttgtcgaagacccgttatgtggttgaacagagcttcggtacgctgcaccgtaaattccgctacgcccgggcagcctatttcggactgattaaagtgagtgcgcaaagccatctgaaggcgatgtgtttgaacctgttgaaagccgccaacaggctaagtgtgcctgttgccgcctaa

SEQ ID NO: 36224 - DNA, 957 bp, Neisseria meningitidis
atgaacaccgccgccatctaccgccagtaccaaacctatgtccgctccgataaatccggctgggcgttggacggctgttccgacagcgcgctcattgcgcaggcaaaacagcccggtttgcatctggaaatgtgcatcaaccgcttcgactcgggcatcaccttgtcgcggatgcgcggcggcggaacgggcgcgtttcccaccgaaatccacaatttcagccacaactgcgccttgttcgtcatggtgtcggggcagaaccggttacaaatgggcggcagggaataccgcccatctgccggcgaaatctggctggtacgcggcgagttggcggacgtatccgaaaccctgctgcccgacaacagcggcatgtgcgcgctgcatttggatttttcgctggaaaaactgcgccgctggcacgacgaaggcttgctggacgaacgcctgttttcgccgcaaacgataggccgattcgccctgcaacggctggcgcaaaacgcagcggcactgacggcggcggcctgcccactgctgcaacgcccgttcgaatcggacggcttcggcctgcttgccgacgaagccgccgcgctggaactctccgcccgattattgcgcttcaccttccgccgccacgacaacggttaccgccgtcggcgcatagacgaagccgccgacatcctgcaacacgaattcgcccgtccgctgaccatcgccgaaatcgcccgccgcgtcggactgaacgaatgctacctgaaacgctatttcaaagcgcaaaccggcgaaaccgtcgccggatgcctgcgccgcctgcggctggaacacgcgctcgccctcatcgaatccggcagcaccgtccaagccgccatgcacttttgcggctaccgccacgcgggacggttcaacgaagcgttcagacggcattacggatttttgccttcggatgtgaagaagtgctga

SEQ ID NO: 36225 - DNA, 807 bp, Neisseria meningitidis
atgaagaaaacattgacactgctcgccgtttccgccctatttgccgcatccgcccacgcccaccgcgtctgggtcgaaaccgcccacacgcacggcggcgaataccttaaagccgacttgggctacggcgaatttcccgaactcgaacccatcgccaaagaccgcctgcacatcttcagcaaaccgatgcagctggttaccgaaaaaggcaaggaaaacatgattcaacgcggcacatacaactaccagtaccgaagcaaccgtcccgttaaggacggcagttacctcgtcatcgccgaatatcagcctactttctggtcaaaaaacaaagcaggctggaaacaggcgggcatcaaagaaatgcctgacgcaagctattgcgaacaaacccgaatgttcggcaaaaacatcgtcaacgtcggacacgaaagcgcggacaccgccatcatcaccaaaccggtcggacaaaacttggaaatcgtcccgctggacaatcccgccaacattcacgtaggcgaacgcttcaaagtccgcgttctgttccgtggcgaaccgctgcccaatgccaccgttaccgccacctttgacggcttcgacaccagcgaccgcagcaaaacgcacaaaaccgaagcacaggctttctccgacagcacagacgacaaaggcgaagtggacatcatccccttgcgccaaggcttctggaaagccaatgtcgaacacaaagccgacttccccgatcaaagcgtgtgccaaaaacaggcgaactactcgactttaaccttccaaatcggccattcgcaccattaa

SEQ ID NO: 36226 - DNA, 633 bp, Neisseria meningitidis
atgagaaaaaccaaaaccgaagccttgaaaaccaaagaacacctgatgcttgccgccttggaaaccttttaccgcaaagggattgcgcgcacctcgctcaacgaaatcgcccaagccgccggcgtaacgcgcggcgcgctctattggcatttcaaaaataaggaagacttgttcgacgcgctgttccaacgtatctgcgacgacatcgaaaactgcatcgcgcaagatgccgaagatgccgaaggagggtcttgggcggtattccgccacacgctgctgcactttttcgagcggctgcaaagcaacgacatctactacaaattccacaacatcctgtttttaaaatgcgaacacacggaacaaaacgccgccgttatcgccattgcccgcaagcatcaggcaatctggcgcgagaaaattaccgccgttttgaccgaagcggtggaaaatcaggatttggctgacgatttggacaaggaaacagcggtcatcttcatcaaatcaaccttggacgggctgatttggcggtggttctcttcctgcgaacgtttcgatttgggcaaaaccgccccgcgcatcatcgggataatgatggacaacttggaaaaccatcccgacctgcgccggaaataa

SEQ ID NO: 36227 - DNA, 846 bp, Neisseria meningitidis
atgaaaaacaaaacctcatcacttctcttatggcttgccgcaatcatgctgaccgcgtgttccccgaacaaagaagataaaaccaaagaaaccggcgcatctgccgcttcgtccccggcatccgccgcttcgtcttccgcgccccaaaccgatttgcaaccggccgcatccgcccctgataacgtcaagcaggcagaaagcgcgccgccgtcaaattgcaccgacctgcaccccgccaccggcattgacgatctcatgcagcaaatcgccgaacacatcgactcggactgtctgtttgccctttcccatcacgaactggaaacccgtttcggcttacccgacagtggctatgacaacatacagcggctgctgtttcccgacatccgccctgaagatcccgactaccatcagaaaatcatactggcaattgaagacttgcgttacggaaagcgcacgatcagccggcaggcacaagatgccttgatggaacaggaacgccgcctccgagaagcgacgctgttgctgacacagggcagcgaagaaacccgcgggcaaggcgaggagccgaaacgcacgcgttattttgaagtttcggcaacccctgcctattcgagccggcacaacaacggacttggcggcaatttccaatacatcggccaattgcccggctatctgaaaatacacggagaaatgcttgaaaaccaatcactcttccggctgtccaaccgtgaacgcaatcccgacaaaccgtttttagacatccattttgacgaaaatggcaaaatcacgcgtattgtcgtttacgaaaaaaacatctacttcaatccaaacttggggcgaagataa

SEQ ID NO: 36228 - DNA, 1353 bp, Neisseria meningitidis
atgggcgcgtttcgcaatgcccgtttgcattcgaacaatgtttacctgattgaaaacaatgtgttcggcacgacctgcgcgcgggtgggttgtatgccttccaaactcttgattgccgccgcagaagcgcgccaccacgcactgcataccgacccgttcggcgtgcatttggacaaagacagcatcgtcgtcaacggtgaagaggtcatgcagcgcgttaaatccgagcgtgaccgttttgtcggctttgtcgttgccgatgtggaagagtggcctgccgacaagcgcattatgggttcggctaaatttatcgacgagcataccgtccaaatcgacgagcatactcaaattacggcaaaaagtttcgtgattgctaccggttcgcgtcccgtcatcctgccgcaatggcagtctttgggcaatcgtttgattatcaacgatgacgttttctcatgggatacgctgcctaagcgcgttgccgtgttcgggccgggtgttatcggtttggaactgggtcaggcattgcaccgtttgggcgtgaaagttgaaattttcggtttgggcggaatcatcggcggcatttccgaccccgtcgtttcagacgaggcgaacgccgtgttcggcgaagaattgaaactgcatctggatgctaaaaccgaggtcaaactcgatgcagacggcaatgtagaagtccattgggagcaggatggcgaaaaaggcgtatttgttgccgaatatatgctggcagccgtgggccgccgtccgaacgttgacaatatcggtttggaaaatatcaatatcgaaaaagatgcgcgcggcgtacctgttgccgacccgctgaccatgcagaccagtattccgcatatcttcatcgcaggcgatgcgtccaaccaactgcctctgctgcatgaagctgccgaccaaggcaagattgccggcgataacgcgggccgctacccgaatatcggcggcggtttgcggcgcagcaccatcggcgtggtgtttaccagtccgcaaatcggctttgtcggtctgaaatacgcgcaggttgccgcgcaataccaagccgacgaatttgtcatcggcgaagtatcgttcaaaaaccaaggccgcagccgcgtgatgctggtgaacaaaggccatatgcgcctgtatgccgaaaaagccaccggccgctttatcggcgcggaaatcgtaggccctgccgccgaacatttggcgcacctgttggcttgggcacatcaaatgaagatgaccgttccgcaaatgctggatatgccgttctaccatcccgttatcgaggaaggtctgcgtaccgcgttgcgcgatgccgatgcgaaattgaaagcctga

SEQ ID NO: 36229 - DNA, 102 bp, Neisseria meningitidis
gtggcagaacaccgcgcccctttcgccaacctttctgcaagccattttactacaacgattttaaaaatcaaggattgcctatgcctgatgaaaaaacgctaa

SEQ ID NO: 36230 - DNA, 936 bp, Neisseria meningitidis
atgagcgtattgattattgccgaacacgacaacaaacagttgaatcctgccactttgcatgctgttaccgctgccgcaaaactaggcaaagtcgatttattggttgccggaaacggcgcatcgtccgtcgtggagttcgcgaagcaagtagcgggagtggaaaaagttttggttgcagatgctgcccattatgctgaaggtttggctgaagagttggctccgctggttgtcaaattggcggcggattaccgctatgttgcagcaacggcaaccacattcggtaaaaaccttttgccccgcgtagccgccttattagacgtaccgcaaatttctgatttgaccgagattgtagataacacgacttttgtacgtccgatttatgcaggtaatgcatttgaaaccgtgcaagccaatgcggaaaaattggtgctgaccttccgtgcgacggcttttgacgcagtggcggcgcaaggtggtaatgctgaggtaattaatgttgaagcaacccctgcccaaaacctgagtcgttttgttaaccgtcagctttcccattccgatcgtcctgaactgactcaggcaaaagtgattgtttccggtggtcgtgcgttgggtagtgcggaaaaattcaatgaagtgctgacaccgttggcggatgttttaggtgcggcaatcggtgcatcccgtgcagcagttgatgccgaatatgcgccaaacgatgctcaagtcggacaaaccggtaaagtggttgcgccgcaactctattttgcaatcggtatttcaggtgcgattcaacacgttgccggtatgcaagacagtaaggtgattgttgcaatcaataaagatgctgatgcgccgattttcaatgtagccgattacggattggttggcgatttatttgaaatcgttccacaattaacagaagcattgaaaaattga

SEQ ID NO: 36231 - DNA, 345 bp, Neisseria meningitidis
atgataatcgaacacaatggaaatatacataaaatagccagaatgactggaaataaaaataattttttagaaataatcctatcagatattcatgaaaacataaaaatcaaaccattaactataaaagtaaaaggagagaatgttataaatatccttcctgaggaagttagtttttatgtaaaacaaggtgttgatttaatttatgaaaaatataaacggaaattctttatctccgaaatttctttttgccaatcagatagccggccttcaagtatctacgcttttcttacatttcacttgcttgaagatattattaaaaatgaatccccatccaactacacctga

SEQ ID NO: 36232 - DNA, 441 bp, Neisseria meningitidis
atgattaaggaaaccctaatgcgcccaatcttcctatctttcgttttactccctattttgataaccgcctgcagcacaccggacaagtctgcccgatgggaaaatatcggcacaatctcaaacggcaatattcatacatatatcaataaagacagcgtgagaaaaaacggaaatctgatgattttccaagataaaaaagttgttaccaatctaaaacaagaacgttttgccaacacccccgcatacaagactgccattgccgagtgggaaatccactgcaacaacaaaacataccgcttaagttcgctacagttgtttgatacaaaaaacacggaaatttccacacaaagctacacagcctcttccctccgcccgatgagcatcctgtccgggacattaaccgaaaaacaatatgaaaccgtatgcggaaaaaaactctga

SEQ ID NO: 36233 - DNA, 726 bp, Neisseria meningitidis
atgcgtattccgctgcttgcccctgacaattatgcctttcccgatcctgcctatgctttggcctggtgcgacgggctggtcggcgtgagcggcgatttggatgcggggcggctgctcgaggcgtatcggaacggcgtgtttccgtggttttctcgggacggttggtttttttggtatgcggtcggcccgcgtgcggtgattgttcccgaacgtctgcacgttccgcgctcgctggcgaaaacgctgcgcaacggcagctatcgggttgcggtcaacggctgttttgcggaagtggtcgcgcattgtgcggcagcggcgcgcccgaatcaggacggaacttggattgcgcccgagtttcagacggcatatttgaagctgcacgaaatgggacacgcgcattctttcgagtgccattatcccgatgaaagcggtgaaacgaggttggcgggcggcttttacggcgtgcaaatcggcagggtgttttacggcgaatcgatgttcgcattacaaccggatgcgtcgaaaatcgcgtttgcctgcgccgtgccgtttttggcggatttgggtgtggaactgatagactgccagcaggacacggaacatatgcgccgtttcggttcggagctgctgccgtttgcggattttgccgaacgtctgcggatgttgaacgccgtgccgttgaaagaggaaatcgggcggcgcgaagtggtgtgcaaggggctttga

SEQ ID NO: 36234 - DNA, 1281 bp, Neisseria meningitidis
atgtatctatttgtcgctagcatgatttttatatttgtaaatcaatatattgatgttgtttcccgtgttcgggcggcatggaatcgggcggaggacaggtatttcccatccttgcacaaagcctgctgcaagcctaaaatcgggcgggttattgttcagaatcaaggctgcattatgtctctttatccgatttacaatttttccgccggccctgccgtattgcccgaagccgtgttggaaacggcgcggcaggaaatgttggactacaacggtacgggttttcctgtgatggcgatgagccaccgttcggaaatgtttttgagcatcctgcatcatgcggaacaggatttgaggcagcttttgaaagtgcctgacaactataagatattgtttctgcagggtggagcaacaacccaatttaatatggcagccatgaatctggcacacggtttccgcactgccgacgcggtggtaacgggcaactggagccgtatcgcttatgaacagatgagccgtttgaccgatacggaaatccgtttggcggcgcatggcggcgagcagttcgactatctcgacctgccgcctgtggaaacgtgggatgttgcacccgattcggcgtttgtccattttgccgtcaatgaaacggtcaacgggctgcaataccgtgaagtgccgcgcctttcagaaggcatgccgccgctggtgtgcgatatgtccagcgagattttgtcgcgcgagtttgatgttgccgactacggactgatttacgcaggcgcacagaaaaacatcgggccggcaggggttacggtggtgattgtgcgtgaggatttgctcgagcgttgtccgaacgatattcccgatgtgttcaactaccgttcgcatttgaaccgcgaaggtatgtacaacacgccgtcaacttacgcgatttatatgtcggggctggtgttccgctggctgcaggcgcagggcggtgtgaaaaaaattgaagcggtcaatcggctgaaggcgcaaaccttgtatgagacgatagacggcagcggcggtttctatatcaaccgtatccgtccgaatgcgcgttctaaaatgaatgtcgtgttccaaacgggggatgaggagcttgaccgccgttttgtgctggaagccgaattgcagggcttgtgcctgcttaagggctataaaaccgtcggcggtatgcgtgccagcatttataatgcgatgccgcttgaaggcgtgcgggctttggcagattttatgcgcgatttccaacggcgttacggttga

SEQ ID NO: 36235 - DNA, 1116 bp, Neisseria meningitidis
atgcttaaatttactttacacaaaaaagacggatacgcccgacgcggcacgctggagttgaaccacggcaaaattgaaacgccggtatttatgcctgtcggtacttacggctcggttaaggcgatgaacccgcaaaacctgcacgacatcaaggcgcaaattattttgggcaacacttatcatttgtggctgcgtccgggtttggaagttatcgggcaattcggcggcctgcacggttttatcggctgggacaaaccgattttgaccgactcgggcggttttcaggttttttctttgtcggatatgcgcaagctgacggaagaaggctgtacgttcaaaagcccgattaacggcgacaagctgtttttatcgcctgaaatttctatgaaaatccaaacggttttgaactcggacatcgcgatgcagttggacgaatgcacgccgggcgaggcgacgcgcgaacaggcgcgaaaatcgctgcaaatgagcctgcgctgggcggaacggagcaaaaaagcctttgaagatttgaaaaacccgaacgcactgttcggcatcgtgcaaggcgcgatgtatgaggatttgcgcgaagaatcgctgcgcggtttggaacagtttgattttcccggccttgccgtcggcggtttgtccgtcggcgaacccaagcccgaaatgtaccgtatgctgcgcgccgtcggtccgattctgccggaacacaagccgcattacctgatgggcgtaggcacgccggaagacctcgtgtacggcgtggcacacggcatcgatatgttcgactgcgtgatgcccacccgcaatgcacgcaacggctggctgttcacccgtttcggcgatttgaaaatcaaaaacgccaaacacaagctcgacaagcgtccgatagacgaaagctgcacctgctacgcctgccaaaacttcagccgcgcctacctgcaccatctgcaccgcgccggcgaaatcttgggcgcacagctcaacaccatccacaacctgcatttctaccaagtcattatggcggaaatgcgcgatgccatagaacaaggcaaatttgccgactggcaggcacaattccacgaaaaccgcgcacgcggcacagactga

SEQ ID NO: 36236 - DNA, 1545 bp, Neisseria meningitidis
atgatgcatgattgctgtcctaaatgtggcatatatattgcttttcaccgacaagatttaggtaaacctaatttgcagcgctttacagagttgaaatattgttggaattgtcactatgacttgagcaacagtccttgtgagaatgttattttctttaatgatgaaatcaggctgcaatggcaaaattggttaaaccaaattgctaatcttgattatctttctaataccattcgttctcgaatcaaaaatattgcgcctcaaattaaaattgctaaacgactaagccataaagcagcagaaatgaaattttctcctttacaaggtagctttccaaatgccgattatccgctttcagtggtacaaatagatcatacaaagttagacattattttagttgacgatatatatcgtaagcctattggtaggccgtggattacgctggcgattgatgtgttcagtcgaatggttacgggattttatgtgtcattcgatccaccaagtgcattatctacaggtttgtgtttagcacatagtattttgtctaaggaaagctggttggcaaaacatggagtgaaagggcggtggcctgtgtggggtttgccacgcaaaattcatttggataatgcaaaagaattccgtggcaaagtgctggaaaaggcgtgtaaacaatacggtattgaaattgagtggaggcctgtggcacgtcctcatttcggaggacacattgagcgtttactaggtacgattttggatgaagtccacggtttaactggtactacttttgcaaatacacaacagagaaaagattatgcttccgaaagcaaggcggcattaacgctaactgaatttgaaacgtggttaacactatttatttgtgatgtttatcatcagcgtactcattctggattggggatctcaccgttagccaaatggaaatcaggtgtattaggagatgatgtttctttaggaacaggattacctgataaagtggttgatgagacactattgcgcttgacctttatgccgtttgaaatgcgaacggtgcagcaatatggggtagttatccataaaatcacttattggcatgacgttttacgaccatggattgcagcaactaatccgactaatcctagacaggctcgccagttcatttttcgcatagatccacgtgatttaagcgtgatttggttttatgacccagatttatcgatgtattttccaataccttatcggaacagttcgaatccagttatcagcatttgggagttacgagagattcagagacaattaaaaaatgagcagaaacagaatattgatgagaacatgatttttacagcatacggacgaatgcgagaattggaacagcaagctcaaggtaagactaaagctatccgtcgcgctcaacaacgtcgccaattagatcaacgtactcgagcatctttacctatgtctcaaattgattcgaggaatattatatcgtctgaaaatgaggaaaatatgtttgatgatattcagccttttgatgatttggacgatttatcatga

SEQ ID NO: 36237 - DNA, 597 bp, Neisseria meningitidis
atgaagataacgcactgcaaattaaagaaaaaagtacagaaagaactgctccgtttttttgtactcgaagttaccgcccgttctgccgccgatattttgggtatccatcccaattcggcagcactgttctaccgtaaaatccgcacggttatcaaccatcatttggccttggctgccgatgaggtttttgagggccctgtcgagccggacgaaagcgatttcggcggacggcgtaaaggcagacgtggtcgcggtgcggcaggaaaagtggttgtcttcggcattctgaaacgcaacggacgggtctataccgttgtggtggataatgccaagtctgaaacgttactccctgtcatcaaaaagaaaatcatgccggacagcattgtttataccgatagtctgagcagctgcgacaagttggacgtgagcggttttatccattaccgcatcaaccattccaaggagtttgcagaccgtcagaaccacattaacggcattgagaacttttggaatcaggcaaaacgcgtcttgcgaaaatatagtggattggcacgaacgtttccccgaattggaagcgcaactgggtgcgccgattga

SEQ ID NO: 36238 - DNA, 246 bp, Neisseria meningitidis
atggcggcaccccccccgacaaaaaaaacaatccggaacgcatctgaccgttccggcttattttcaggcgaatccgccgcatcagaacatactgcgcacgcccatattgacctgccaagtctggcgcatcgtgtgcatcgaagacctttgcgcctcaaaataaagctgccttccgttgtcggcattaccacgcaaaaaaatgaattgcttgatattccaatgtttttatatgtttttatatggtga

SEQ ID NO: 36239 - DNA, 1455 bp, Neisseria meningitidis
ttgcggtacaatccaccatttcatcactcggcgacccacaccgtgaaaatcctcattttaggcaacggacaggtaggttctaccgtcgcacaaaaccttgccgccatacccaacaacgacgtaaccgttatcgacatcgacgaaaaagcattgcaggaaacaggcagccgcctcgatgtccaaaccgttttcggcaacggcgcatcccccttcacattagaacgcgccggcgcggaagatgccgacttgctgctcgcgctctcccgcagcgacgaaaccaacatcgtcgcctgcaaagttgccgccgacctgttcaacatccccggccgcatcgcgcgcgtccgttccagcgaatacctcgaatacctcagccccaagctcgaaaacaacgaaaacggcagcctttccatattcggcataaccgaaaccatcagccccgaacagctcgttaccgaacagcttgccggcctgatagactgcccgggcgcattgcaggttttacgttttgcagacgaccgcgtgcggatggtcatcatacaggcgcggcgcggcggactgcttgtcggacgcagcattgccgacatcgcccaagatttgcccgacggggccgactgccaaatctgcgccgtttaccgcaacaaccgcctcatcgtccccgcgccgcaaaccgtcatcatcgaaggcgacgaaatcctatttgccgccgccgccgaaaacatcggcgcggtcatacccgaattgcgccccaaagaaaccagcacccgccgcatcatgattgccggcggcggcaacatcggctaccgcctcgccaaacagctcgaacacgcatacaacgtcaaaatcatcgaatgtcggccgcgccgtgccgaatggatagccgaaaacctcgacaacaccctcgtcctgcaaggttcggcaaccgacgaaaccctgctcgacaacgaatacatcgacgaaatcgacgtattttgcgccctgaccaacgacgacgaaagcaacattatgtccgcccttttggcgaaaaacctcggcgcgaagcgcgtcatcggcatcgtcaaccgctcaagctacgtcgatttgctcgaaggcaacaaaatcgacatcgtcgtctccccccacctcatcaccatcggctcgatactcgcccacatccggcgcggcgacatcgttgccgtccaccccatccggcgcggcacggcggaagccatcgaagtcgtcgcacacggcgacaaaaaaacttccgccatcatcggcaggcgcatcagcggcatcaaatggcccgaaggctgccacattgccgccgtcgtccgcgccggaaccggcgaaaccattatgggacaccataccgaaaccgtcatccaagacggcgatcacatcatctttttcgtctcgcgccggcgcatcctgaacgaactggaaaaactcatccaagtcaaaatgggctttttcggataa

SEQ ID NO: 36240 - DNA, 909 bp, Neisseria meningitidis
ttgacgctttatgtgtcatcctgtgtgttgaaacattcaaactcggctataatcccgtttttccgaccttatcgacagcgaagatccatcatgaacaccattttcaaaatcagcgcactgaccctttccgccgctttggcactttccgcctgcggcaaaaaagaagccgcccccgcatctgcatccgaacctgccgccgcttcttccgcgcaggacgacacctcttcgatcggcagcacgatgcagcaggcaagctatgcgatgggcgtggacatcggacgctccctgaagcaaatgaaggaacagggcgcggaaatcgatttgaaagtctttaccgaagccatgcaggcagtgtatgacggcaaagaaatcaaaatgactgaagagcaggctcaggaagtcatgatgaaattccttcaggaacaacaggctaaagccgtagaaaaacacaaggcggacgcgaaggccaataaagaaaaaggcgaagcctttctgaaagaaaatgccgccaaagacggcgtgaagaccactgcttccggcctgcaatacaaaatcaccaaacagggtgaaggcaaacagccgaccaaagacgacatcgttaccgtggaatacgaaggccgcctgattgacggtacggtattcgacagcagcaaagccaacggcggcccggtcaccttccctttgagccaagtgattccgggttggaccgaaggcgtacagcttctgaaagaaggcggcgaagccacgttctacatcccgtccaaccttgcttaccgcgaacagggtgcgggcgacaaaatcggcccgaacgccactttggtatttgatgtgaaactggtcaaaatcggcgcacccgaaaacgcgcccgccaagcagccggctcaagtcgacatcaaaaaagtaaattaa

SEQ ID NO: 36241 - DNA, 702 bp, Neisseria meningitidis
atgagcgcgcgtgaaaatattttggcaaaactgaaaaaagccgatgccttgccgatggaagagcctgcggttttcgattattaccgcgaaaagggcgtttcttgggacagcgaagccgagcgtctgaaacattgggctgccgcaatgcgcgcggtcaaaaccgaaatttattgggtgacgaaaagcaattggatgcaggttttccgcgaagcggcagaaggcaagggtttgaaaaacatcctgctgcccttggcgaccgaacacggacaaattgcccgtgccgcattggcggacagcaatatcgaaccgattgccttcgagcgcgaaatcgatacttggaaaaccgagtttttcacgaacatcagtgcgggcttcagcggcgcgcaatgcggcatcgcccgcaccggcacgctgatgctgttttccagccccgaagaaccgcgtactttgagtctcgttccgcccgtgcatttctgcctgttcgatacgtccaagatgtacaacgagtttcataatgccgtcgaaggcgaaaaactggtggaaaacggtatgccgaccaatgtattcctgatttccggcccgtccaaaaccgcagacatccaactgacgcttgcttacggcgcgcacggcccgcgcgatttggtcatcctcgccatcctgcccgaccacatttcccctgccgatttggaggaaaacgcatga

SEQ ID NO: 36242 - DNA, 891 bp, Neisseria meningitidis
atgagcgtattgattaataaagacaccaaagtattggttcaaggtttcaccggtaaaaacggtactttccactccgaacaagctctggcttacggcactaaagttgtcggcggcgttaccccaggcaaaggcggtcaaacccacctgaacctgcctgtattcaacaccatgaaagaagccgttaaagaaaccggcgcggacgcatctgtcatttacgttccagctccgtttgttttggactctatcgttgaagccgttgattcaggcgtaggcttggtcgttgtgattaccgaaggcgtgcccactttggacatgctcaaagccaaacgttacttggaaactaacggcaacggtacccgcttggtcggccctaactgcccgggcgtgattactccgggtgagtgcaaaatcggtattatgccgggccacatccacactccgggccgcatcggtattatttcccgttccggtacattgacttacgaagctgtggcacaaaccaccaaactgggcttgggtcaatcaacctgtatcggtatcggcggcgacccgattcctggtatgaatcaaatcgacgcactgaaactcttccaagaagacccggataccgacgccatcatcatgatcggtgaaatcggcggtactgcggaagaagaagcagccgaatacatccaatccaacgtaaccaaacctgttgtaggttacattgctggtgttaccgctcctaaaggcaaacgcatgggccacgctggtgcgattatttccggcggcaaaggtactgccgaggaaaaattcgccgcgtttgaaaaagccggtatcgcctatactcgcagccctgccgagttgggcacgacgatgctggaagtgttgaaagcaaaaggtttggcataa

SEQ ID NO: 36243 - DNA, 606 bp, Neisseria meningitidis
atgaccatctatttcaaaaacggcttttacgacgacacattgggcggcatctccgaaggcgcggttgccgtccgcgccgaagaatacgccgcccttttggcaggacaggcgcagggcgggcagattgccgcagattccgacggtcgccccgttttaaccccgccgcgcccgtctgaataccacgaatgggacggcaagaaatgggaaatcggcgaagccgctgccgccgcccgtttcgccgaacaaaaaaccgccacggcattccgcctcgcggcaaaggcggacgaactcaaaaacagcctcttggcgggctatccccaagtggaaatcgacagcttttacaggcaggaaaaagaagccctcgcgcggcaggcggacaacaacgccccgaccccgatgctggcgcaaatcgccgccacaaggggcgtggaattggacgttttgattgaaaaagttatcgaaaaatccgcccgcctggctgttgccgccggcgcgattatcggaaagcgtcagcagctcgaagacaaattgaacaccatcgaaaccgcgcccggattggacgcgctggaaaaggaaatcgaagaatggacgctaaacatcggctga

SEQ ID NO: 36244 - DNA, 369 bp, Neisseria meningitidis
atgcgtcattacgagatcgtgtttatcgttcatcctgatcaaagcgagcaagtgcctgctatggttgaacgttacaaaaccatgattgccgaagcaaacggtaagattcaccgtctggaagattggggtcgccgccaactggcttacccgattaacaaaatccataaagcccattacgttttgatgaacatcgaaaccactcccgaagtggtcgaagagttggaaaccgcgttccgtttcaatgatgcggtattgcgtcatctgaccatcaaaaccaaacacgccgttaccgaagcatcccctatgttgggtggcgaaaaggctaagaacctgctgagcggtgcgtctgaagaagcggttgcccaataa

SEQ ID NO: 36245 - DNA, 828 bp, Neisseria meningitidis
atgaaaaaaaccgcctatgccttcctcctgctgatcgggttcgcttccgcccctgcatttgccgaaacccgccccgccgacccttatgaaggctacaaccgcgccgttttcaaattcaacgaccaagccgaccgctacattttcgcccctgccgcgcgcggctaccgcaaagttgcgccgaaacccgtccgcgccggcgtgtccaatttttttaacaacctgtgcgacgtggtcagcttcggcagcaatatcttgcgcttggacatcaaacgcgcaagcgaagaccttgtccgcgtcggcatcaacaccactttcggtttgggcgggcttatcgacatcgccggcgcgggcggcattcccgacaataaaaacaccttgggcgacacgtttgcttcgtggggatggaaaaacagcaattatttcgtgttgcccgtcttagggccgtccaccgtccgcgacgcgctcggcacgggtattacctccgtttattcgcccaagaatatcgtcttccgcacccctgtcggacgctggggcacgactgccgtatccgccgtcagtacgcgcgaaggtctgctcgatttgaccgacagtctggacgaagccgccatcgacaaatacagctacacgcgcgacctctatatgaaagtccgtgcgcggcagaccggtgcaacacctgccgaaggtacggaagataacatcgacatcgacgaattggtcgaaagtgccgaaaccggcgcggcggaaactgccgttcaagaagattccgtatccgaaacacaggcagaagcagcaggggaagccgaaacgcaacctggaacacaaccttaa

SEQ ID NO: 36246 - DNA, 1302 bp, Neisseria meningitidis
atgccgtctgaaaccgcccgccccctttatgcggacacgtgcgccgcacacacgctcgtctggttccgccaaaacctccgcatccgcgacaacgccgccttatgcgccgccgttgccgaaggtttgcccgttatcggtatttggattgacgatgccgaaacagacaaccctcgccgcgccgcgttctaccgccaatccgccgccgaactcgcccaagggcttgcagggcgcggcatcccgctctacacggcggcatcgcctgccgagctcgtccggctcgccgtccgcctcaatatccgcgccgtcatcgccgacgaatcccatacttttgccgacaaactcgccgacaacgccctttggcatgaattggacaaacacggcatcgcgttaaccttcgtcaacgaccgtgccgttttcggcaaaaccgacctgatacccgacggcggcacggcacacaccgatttcgaccgctaccgcgaagtatggctcgaccgcttttccaagcagccccccgccggtccggacctattcgcggcataccgccaacccttccccgaaaacctttccgccccgccgcctgccgccctttcagacggcatcttcctgccgcaaaacagcggcgaaacggcggcttggcggcagtggcggcggtttctcgaacaggcggattcctactccgttttaaaggatttcccctcgcgcaaacacacctcgctgatgggcgcgtatttgagtgccggctgcatctcgccgcgcctgctcgcgcgggaaagcctcgaacgccgtctgaacgcgtgggcggacaacatcatccgccgcgattttttccttcaacttgccttgcagcacacggatgacgacccttcagacggcaatcctgaacacaccctgcgcctgacgctttggcagcagggccagaccggcattccgattatcgatgccgcgatgcgctgtttgcacaaaaccggcagcctccaccccgccctgagacgcttgagcgcggattttttctgccacgttttaaacctcccccgccgcgaaggcgagatatggtttgcccggcagctgaccgatttcgatgcggcaatcaaccaaggcaactggtggcttgccgcctcacggcacacctgccccgacattgccgccgcctcataccgtaccgacccggacggtacttttatcaaacggcacattcccgaactcgcccacctgtccgccgacaccgtccacacgccttggcggtttgcctgttcggtcgatacccacggctatcccgcctatcctgtcgccggtattccctaa

SEQ ID NO: 36247 - DNA, 1212 bp, Neisseria meningitidis
atgattattgatgtaaaagtacctatgctgtctgaaagcgtatctgaaggcacgctcttggaatggaagaaaaaagttggcgaagcagttgcccgtgacgaaatcctgatcgatatcgaaacggacaaagtggttttggaagtaccttctccacaagccggcgtattggttgaaatcgtagcgcaagacggtgaaaccgttgttgccgaccaagttttggcacgtatcgataccgctgctactgccgctgctgaagcacctgccgctgctactgccgctgctgaagcacctgccgccgctcctgccgaagctgccccggccgccgctcctgctgctgcacaaaacaacgccgctatgcctgccgccgccaaactggctgcagagagcggtgttgacgtgaacgcattgcaaggttccggccgtgacggtcgcgtattgaaagaagacgtacaaaatgccgctgccaaacctgccgcagccgctgctcctgctgttgcacttcctgccggcgcacgtcctgaagaacgcgtaccaatgagccgcctgcgtgcccgtgttgcagaacgcctcttggcttctcaacaagaaaacgccattctgactacattcaacgaagtcaacatgaaaccaatcatggacttgcgtgcgaagtacaaagaaaaattcgagaaagaacacggcgtgaaactgggctttatgtccttcttcgttaaagccgctgttgccgccctgaaaaaatacccggttgtgaatgcttctgttgacggcaaagacatcgtgtaccacggctacttcgacatcggtatcgcaattggcagcccacgcggtttggttgtgccaatcctgcgcgatgccgaccaaatgagcattgccgacatcgaacaagcaattgttgattacgcgaaaaaagccaaagacggcaaaatcgctatcgaagatctgaccggcggtacattcagtattaccaacggcggtactttcggttctatgatgtccaccccgatcatcaatccgcctcaatctgcgattttgggtatgcacgccactaaagagcgcgctgtggttgaaaacggccaagttgttgtccgtccaatgatgtatctggctctgtcttacgaccaccgtatcattgacggccgcgaagctgtattgaccttggtagccattaaagacgcgttggaagacccagcccgcctgttgttggatctgtaa

SEQ ID NO: 36248 - DNA, 483 bp, Neisseria meningitidis
atgacacaacaacgccaactgccttcgcacgaactcattatgtccgaactgatgatgccggacaccgccaatttcagcggcaacgtacacggcggcgaactcctgctcctgctcgaccaagtcgcctattcctgcgccagccgttacagcggcaattattgcgttaccctgtcggttgacaaagtcctgtttaaagaacccatccacatcggcgatttggttaccttttacgccgctgtcaactacacgggacgcacctcgatggaaatcggcatccgtgtcgaagcacaaaacatccgcaccggcgaagtccgccataccaacagttgctacttcacgatggttgcggtcaaagacggcaaacccgtccctgtccctccgctggaaatcctgaccgaccgccaacgctgccgctacgaaaaagccaaaaaacgcagagacatcagcctgcaagcctctgaagacatgtcctgcggctgctga

SEQ ID NO: 36249 - DNA, 570 bp, Neisseria meningitidis
atggaaatcctgacgcagttgggctaccgcgtcatccaactgcctgccggcatcgacgaatccgttaaagccggcgaaacacctttcgcttacgttcaaaggatggcagaagaaaaaaaccgaaccgccctgaccctcttttgcgaaaccaacggcacaatgcccgatttccccctgattaccgccgacacctgcgtcgtttcagacggcattatattaggcaaaccccactcccaagccgaagcaatcgaatttttaaaccgattgtccggcaaacaacataccgtcctgactgctgtctgcattcattatcgcggcaaaacgtcaagccgcgtccaaaccaaccgcgtcgttttcaagcccctgagttcggaagaaatttccgcctatgtccaaagcggcgaaccgatggacaaagccggcgcctacgccgtacaaggcataggcggcatctttatccaatctatcgaaggcagcttcagcggcattatggggctgcccgtttatgaaaccgtttcgatgttgcaggatttgggataccgtacccccttgtccgcccttaaaccgtaa

SEQ ID NO: 36250 - DNA, 891 bp, Neisseria meningitidis
atgaatcctaaatcccctttatttttacgactgtccgaccgtttggatgtgtacctgcgcctgatgcgggcggacaagcccattgggacgctgcttttactgtggccgacctactgggcattgtggctggcttcagacggcattcccgatttggcggtattggcggcgtttacaatcggtacgtttttaatgcgcagtgccggctgcgtcatcaacgattttgccgaccgcgattttgacggggctgtcgagcgcactaaaaaccgtccgttcgcacagggcagggtcaagaaaaaagaagcgctgctgctgacggcatttttgtgcctgcttgccgcattgtgcctgattccgctgaatcatctgacttggctgatgagcctgcccgcgctgtttcttgcgctgacttacccgtttaccaaacgtttttttccgattccccaactctatctcgggcttgccttttccttcggtatcccgatggcgtttgccgcagtgggcaacagcgtccccgttgaagcatggatactttttaccgccaatgttttatggacactggcttacgacactgtttacgccatggcggacaaagaagacgatttgaaaatcggcatcaaaacctccgccgtcacattcgggcgttacgacatcgccgctgttatgctgtgtcatggcggctttaccctgctgatggcagtattgggtgcggttatcggcgcggcttgggcatattggacggcaatccccatcgtcctgctgctgcaataccgccaatatgccgccatcaaaagccgcgtccggcaaatctgttttgaaacgtttttggcaaacaacagaattggttgggtgtggtttaccgccatttttgcccatacgtttttcgcgaaataa

SEQ ID NO: 36251 - DNA, 480 bp, Neisseria meningitidis
atgagtaaacacacttatccgataacacctgccgtgcgcgttttgcgtgaaaacggcatcgaatttgaaccttttacctatgcctatgaggaacacggcggcacggcgcagtttgcccgactattcggcaaagacgaacacttggtcattaaaaccattgttttgcaagatgaaaacggtaaggggctgattgtcttgatgcacggcgacaagcagatttcaacccgcaatctggcgcggcatttgggtgcgaaacacatcgaacccgccacgccagcacaggcaaacaagtggacgggctatctggtcggcggcacaacgccgttcggcatccggacaaaattggatatttatgtcgaacagtcggtgatggatttggacatcatctatatcaacggcggaaaacgcgggttcattatcggcatccgtcccggagatttaaatattttgaacccgaaaacaatacaggcggcggtttga

SEQ ID NO: 36252 - DNA, 1368 bp, Neisseria meningitidis
atgcctgaccttcataccgaattttcccgactcctgccggcagatgaaattgccgaactttctccgacgcttttaaaagaccagcgcaaccgctttacgtctgcaccagacatcattttgcagccgcgcagcgttgaaagcgtgcaaaccattatgcgtttttgttacgaacaccgcattccggttacgccgcaaggcggcaataccggtttgtgcggcgcggcagtatcggaaaacggcgtattgctgaacctttccaaactcaaccgcatccgcagcatcaatttgtcagacaactgcataaccgtcgaagcaggttccgtactccaaaccgtccaacaggcagccgaagcctcaaacaggctgttcccactcagtctcgccagcgaaggctcctgtcaaatcggcggcaacatcgcctgcaatgccggaggtttgaacgtattgcgttacggcacgatgcgcgacctgattatcggtttggaagtcgtcctccccaacggcgagctggtttcccatctccatcccctgcataaaaacaccaccggctacgacctgcgccatctgtttatcggcagcgaaggcacactgggcatcatcactgccgccacactcaagctttttgcccgtccctcggacaaggcaacggcatgggtcggcatacccgacatcgaatccgccgtccgcctgctgaccgaaacccaagctcactttgccgaacgcctatgcagttttgagctgatcggccgttttgccgccgagttgtcttccgaattcagcaaactccccctgccgacacattcagaatggcatattttacttgagttgaccgactcattacccgacagcaatcttgatgatcggcttgtcgaatttctttataaaaaaggatttaccgacagcgtattggcacaaagcgaacaagaacgtatccatatgtgggcattgcgcgaaaacatctccgcatcgcaacgcaaactgggcaccagcatcaaacacgatattgccattcctatcggacgcgttgccgactttgtccgccggtgcgccaaagatttggaacagaattttaaaggcatacaaatcgtctgcttcggacatcttggcgacggcagcctgcactacaatactttcctgcccgaaatcctcagcaatgaagtctatcgttacgaaaacgacatcaacgacgcagtttatcgcaacgttcttgcctgcaacggcacgattgccgccgaacacggcataggtatcatcaaaaaacagtggctggacaaagtacgcacgcctgccgaaatcgccctgatgaaaagcatcaaacaacaccttgatccatataacattatgaatccgggcaaactgcttccgtaa

SEQ ID NO: 36253 - DNA, 168 bp, Neisseria meningitidis
atggttgatgaaaaactggcagaaaaccgaaagcgttacgagcagaaacgggtgattaagaaagtctcgttcaatgccgaaacggaaaaagaacttttggaatatgcccaaaatatcgatttttcccaatgggttaaatcaatcatcaaagaaaaaatcaaaaaatag

SEQ ID NO: 36254 - DNA, 879 bp, Neisseria meningitidis
ttgaccgtccgaacgaaaaagacggcgcattataccctattccattccgaccgaaaaccgaacatgactactctcaaacccgccctgcccgcttatctggacaacatccgcatcatcctcacgcgcaccagccatcccgccaacatcggctctgccgcgcgcgcgatgaaaacaatgggtctgcacaaactgaccatcgtcgccccaaatctgatggcaacgccgatgacggaaaacccgcccgtgtttgacccggagcatcctcaatcgtttaaattaccggaagaaagcttcatcctcgcttccggcgcggcagacgttttggaaaatgccaccattgccgcttctttggacgaagcccttgccgacaccaccatcgcctgcgccctgaccagccgccgccgcgaaattactgcgccgctgcaaaccccgcgcgatttggtatccgaattactgcagaccgcaaaccgaggcgagaaagtggcactggttttcggcaacgagactttcggcttgagcatcgaagaagtccaagcctgcaaccgactgatgaccatcaacggcaatcccgactatttctcgctcaacctcgcccaagccgtgcaggtcgtgtgctacgaaatcttcagccaaaccggttcgcccatgacccatcttcaacaagaagaccacgctgcgacccacgagcaaatcaaaggcatggtcgcccacatggaaagcgtgatgaacgacatcggctttttcaaccgccgcaatggtgaacgcctgatgcgccgtatgcagagcctgttcggacgcgccaacacgcaaaccgaagacatcgatatcctgcgcggttttttcaataccgtcagccatcgtatccataaaaaagactga

SEQ ID NO: 36255 - DNA, 459 bp, Neisseria meningitidis
atgccgatggcaaaaccgctcaaataccccgtttccgcactggtcgtcctttatagcggggacggcggcatcctgctcatcgaacgcacgcatccggaaggattttggcagtcggtaaccggcagcctcgaaccgggcgaaaccgtcgcccaaacggcaaggcgcgaagtttgggaagaaaccggcatcctgctggcggacgggcagcttcaagactggcacgacagcacggtttacgaaatctaccaccactggcggcaccgctatccaaaaggcgtgtttgaaaaccgcgaacacctcttctctgccgaaatcccgcgtgatacgcccatcgccctgcaacccgaagaacacgtctcctacggttggttcgatatggaagaagcagcggaaaaagtattttccccgtccaacaggcgcgcgattttggaactgggcaggtttttgggcaaacggtaa

SEQ ID NO: 36256 - DNA, 1104 bp, Neisseria meningitidis
atgttgattttacaagccgaacgcgacagcctgctcaagccgctgcaagccgttaccggcatcgtcgaacgccgccacaccctgcccatcctgtccaacgtcctgattgagggcaaaggcggtcagaccaaactcttggcaaccgatttggaaatccaaatcgacactgcgggtcccgagggcggcgcggacgacttccgcatcaccaccaatgccaagaaatttcaggacattttgcgcgcgctgcctgccggtgcgctggtgtcgctggattgggacgacagccgtctgacgctgaaggcgggcaaatcgcgttttgccctgcagaccctgcctgccgccgattttccgatgatgaatgtcggcgaggacatcagcgcgactttctcgctggagcaggagcgtttcaaaaccatgctgtcgcaagtgcagtacagcatggcggtgcaggacatccgctattatctcaacggtctgctgatgcaggttgagggtagccagttgcgccttgtggcaaccgatggacaccgccttgcctatgcagcctgcgcgattgatgcggatttgccgcgcgccgaagtgattttgccgcgcaaaacggtgctggaactgttcaaactgttgaacaaccccgacgatccgattcaaatcgagctgctggacaagcaggtgcgtttccaatgcaacggcacgaccatcgtcagcaaggtcatcgacggcaaattccccgatttcaaccgcgtcatccctttggacaacgacaagattttcgttttgtcccgtgccgaacttttgggcgcgctggaacgtgtgtccattcttgccaacgaaaaattccgtggcgcgcgcctgttcctgcaacccggcctgttgagcgttgtgtgcagcaacaacgagcaggaagaagcgcgcgaagaaatcgagattgcctatcagggcggcgaactcgaagtcggtttcaatatcggctatctgatggacgtgttgcgcaacatccattccgacgatatgcagcttgccttcggcgatgccaaccgctcgacgctgtttaccgtgccgaacaatccgaatttcaaatatattgtgatgccgatgcggatttga

SEQ ID NO: 36257 - DNA, 1296 bp, Neisseria meningitidis
gtgattgccatgatttacatcgtactgttcctcgccgccgtcctcgccgttgtcgcctacaatatgtatcaggaaaaccaataccgcaaaaaagtgcgcgaccagttcgggcactccgacaaagatgccctgctcaacagcaaaaccagccatgtccgcgacggcaaaccgtccggcgggccagtcatgatgccgaaaccccaaccggcggtcaaaaaaacggcaaaaccccaagaccccgccatgcgcaacctgcaagaacaggatgccgtctacatcgccaagcagaaacaggcaaaagcctccccgttcaaaaccgaaatcgaaaccgccttggaagaaagcggcattatcggcaactccgcccacaccgtttccgaaccccaaaccggacattccgcaccgaaacctgccgacgcgccggcaaaacccgttcccgttccgcaaacgccggcaaaaccgctgattacgctcaaagagctgtcgaaggtcgagctgccctggtttgacgtgcgcttcgacttcatctcttatatcgcgctgaccgaagccaaagaacttcacgcactgccgcgcctttccaaccgctgccgctaccagattgtcggctgcaccatggacgaccatttccagattgccgaacccatcccgggcatccgctatcaggcatttatcgtgggtattcaggcagtcagccgcaacggacttgcctcgcaggaagaactctccgcattcaaccgccaggtggacgcattcgcacaaagcatgggcggtcagacgctgcacaccgaccttgccgcctttatcgaagtggcttccgcactggacgcattctgcgcgcgcgtcgaccagaccatcgccatccatttggtttccccgaccagcatcagcggcgtagaactgcgttccgccgtaacgggcgtgggtttcgttttggaagacgacggcgcgttccactataccgacacgtcgggctcgaccatgttctccatctgctcgctcaacaacgagccgtttaccaatgcccttttggacaaccagtcctacaaaggcttcagtatgctgctcgacatcccgcactctccggcaggcgaaaaaaccttcgacgatttgtttatggatttggcggtacgcctgtccggccagttgaacctgaatctggtcaacgacaaaatggaagaagtttcgacccaatggctcaaagacgtgcgcacttatgtattggctcgtcagtccgagatgctcaaagtcggtatcgaaccgggcggcaaaaccgcattgcgcctgttctcctaa

SEQ ID NO: 36258 - DNA, 2151 bp, Neisseria meningitidis
atgctcaccgatttagaaaaaaacgccatccgcgaccattaccaaaacatcggcaaaaacctgcccggtttccgtccgcgtgcttcgcagcgggaaatgattgcggcggttgccaacgctttttcgcggacgttggcgcgcgaagaaggcggcgagccgcccaagcgcgaaggcgagagcatcgccgtaatcgaaggaccgaccggcgtgggcaaatcgcttgcctacctgctggcgggcggcatcatggcgcaaacacgcggcaagcggctgattgtgagcagcgcgacggttgccttgcaggagcagttggtagaccgcgacctgccgtttctggtcgaaaaaagcggtttggaactgaccttcgcacttgccaaagggcgcggccgctatctctgcccctacaaactctatcaactgacgcaaagcaatgcccagcaaaacctgctcggctttgaagcccccgccgtcttgtgggacagcaaacccaagcccgaagaattgaagctgctgcgcgacatcgccgacgaattttccgcccgacggttcaacggcgaccgcgacacttggccggaaaaaatcgatgacgcgatttggctcaaagtgaccaacgaccgccacggctgcctgaaaaccgcctgtcccaaccgtccggaatgtccgttttacctagcacgcgatgtcttggaaaccgtcgatgtcgtcgttgccaaccacgatcttctgcttgccgacatcagtatgggcggcggcgtgattctgcctgcgcccgaaaacagtttctattgcatagacgaagcgcaccacctgcccaaaaaagccctcagccgttttgccgccgaacattcatggaatattgccgtttggacgctggaaaaactgccgcagctgaccggcaaaattgccgcgctgaccgataaagccgaacttgccaaccttgccgacgaagccgccgcatccttgctcgacagcctgcacgaatggcagttccatttggcggaagagccgtctttaagtttgggggtgtctgaaaacgacagacgaaccaacagcgaaccgacttggctgtgggaagacggcaaaatccccgaaggcctcgaaaccaccgtttccaatacggccattgctgcgcgcagcctgctcaaacacgttgtcgggctgaacgatgcgctttccgccgcgcgccgcgaaaaagaacaggacggcgcgctcctcgaccgcctgaccggcgagttcggcatcttcatcgtccgtatcgaacaaatcagcgcggtttgggatttgctctccaccgtccccctcgaaggcgaagagccgctggcaaaatggataacccgccgtgccgacgacaaaaacgactacattttcaacgccagccccatcagcagcgcatcccaccttgccaacagcctgtggcggcgtgcggcaggcgcggtattgacttccgccaccctgcaatccttgggcaacttcaacctgatgctgcgccaaaccgggctgcaatggctgcccgaaaccaccaccctcgccctcaaaagcccctttgactttgaaaaacagggcgaactctacatcccccccatatacgccagccccaaagaccccgaagcccacaccgccgccgtcatcgagtggctgcccaagcttatttcgcccaccgaagccatcggcacactcgtcctgttttcctcgcgcaaacaaatgcaggatgtcgccctgcgcctgcccggagactacctgccgctcctgctcgtacaaggcgaattgcccaaagccgtcctcctgcaaaaacaccaccgggccatagaagaaggcaaagccagcatcatcttcggactcgacagctttgccgaaggactcgacctgcccggcgccgcctgcgtgcaagtcatcatcgccaagctgccgtttgcgatgccggacaaccccatcgaaaaaacccaaaaccgctggatagaacagcgcggcggcaaccctttcatcgaaatcaccgtccccgaagccggcatcaaactgatccaagccgtcggccgcctcatccgcaccgaacaagactacggccgcgtaaccatcctcgacaaccgcgtcaaaacacagcggtacggccaacaattattagccggcctgccaccgtttaaaaggatagggtaa

SEQ ID NO: 36259 - DNA, 873 bp, Neisseria meningitidis
gtgaaaggactcgactattgccgtcaaaaagcagaagaaagccgctccagttttttatcgggcttccgtttcctgactcaggaaaaacgggatgcggtaacgattttatatgccttttgccgcgaattggacgatgtggttgacgaatgttccaaccccgatgttgcacaggcaacattgaactggtggcgcggcgatttggacaaggtattcggcggcgcgatgccggaacaccccgtcaatcaggccttgcggcaggttaaggaaaccttcaagctgccgaaatatgaactggaagccttaatcgacgggatgcagatggatttggttcaggcgcgttacggcagttttgaggaattgaaactgtattgccaccgcgtcgcaggcgtagtcggctacctgattgcgcggattttggggttttcagacggcaaaacgctgcaatacgccgacaagatgggacttgcgctgcaactgaccaacatcatccgcgatgtcggcgaagacgcgcgcaggggacggatttacctgccgatggaggaaatgcagcggtttgatgtccccgcaagcgtgattttgcaatgcagcccgacgggcaattttgccgaattgatggcgttccaaatcaaacgcgcccgtgaaacctaccgcgaagccgtatcgctgctgccggctgccgataaaaaagcccaaaaagtcggactggttatggcggcggtttattacgagctattgaacgaaatcgaccgggacggcgcgcaaaacgtcctcaaatacaaaatcgccctcccttcgccgcgcaaaaaacgcattgccctgaaaacctggttattcggattcaaaccgcgccccggcacgccggaacgggcataa

SEQ ID NO: 36260 - DNA, 1287 bp, Neisseria meningitidis
atgagcgcaatcgttgatattttcgcccgcgaaattttggactcacgcggcaaccccacagtcgagtgtgatgtattgctcgaatccggcgtaatgggacgcgcagccgtaccgagcggcgcgtccaccggtcaaaaagaggctttggaacttcgcgacggcgacaaatcccgctattccggcaagggcgtattgaaggcggtcgaacacgtcaacaaccaaatcgcccaagccctcatcggtatcgatgccaacgagcaatcttatatcgaccaaatcatgatcgaattggacggtactgaaaacaaaggcaatttgggtgcgaatgcgactttggcggtttctatggcggttgcacgcgccgctgccgaagactcaggcctgccgctttaccgctacttgggcggcgcaggcccgatgtccctgcccgtaccgatgatgaacgtcatcaacggcggcgaacacgccaacaacagcctgaacatccaagagtttatgattatgcccgtcggcgcaaaatctttccgcgaagcattgcgctgcggtgcggaaattttccacgccttgaaaaaactgtgcgacagcaaaggcttcccaaccacagtcggcgacgaaggcggtttcgcccccaacctgaacagccacaaagaagccctgcaactgatggttgaagccaccgaagccgccggctacaaagcgggcgaagacgtattattcgcattggactgcgcctccagcgagttctacaaagacggcaaataccacttggaagccgaaggccgctcctacaccaacgcggaatttgccgaatatctggaaagtctggtcaacgagttccccatcatctccatcgaagacggcatggatgaaaatgactgggaaggctggaaactgctgaccgaaaaactgggtggcaaagtccaactcgttggcgacgacctcttcgttaccaacccgaaaatccttgccgaaggcattgaaaaaggcgtggcaaacgcactattggtcaaagtcaaccaaatcggtactttgagcgagaccctgaaagccgtcgacttagccaaacgcaaccgctacgccagcgtaatgagccaccgctccggcgaaaccgaagacagcaccattgccgacttggcagtcgccaccaactgtatgcagatcaaaaccggttctttgagccgttccgaccgcatggcaaaatacaaccaactgctgcgtatcgaggaagaattggcggaagccgccgactaccccggcaaagccgcattctaccaactgggcaaataa

SEQ ID NO: 36261 - DNA, 369 bp, Neisseria meningitidis
atgcgtcatcgtaatggcaatcgcaaattaaaccgtaccagcagtcatcgtgctgcaatgctgcgtaatatggcgaattcattattgactcacgaagctattgtaacaactctgcctaaggccaaggaattgcgccgtgtagtagagccgttgattacattgggtaaaaagccgtcattggcaaaccgccgtttggcatttgaccgtactcgcgaccgtgatgttgtagtaaaactgtttggcgatttgggtcctcgttttactgctcgtaacggtggttatgttcgggtgttgaaatacggattccgtaaaggtgataatgcacctctggcactggttgaattggttgacaaaccggctgctgagtaa

SEQ ID NO: 36262 - DNA, 648 bp, Neisseria meningitidis
atgaaaggcgtttacttcgtcagcggcatagacacggacatcggcaaaaccgtcgccaccggcgtgttggcaaaacaattgttgcagcagggcaaaagcgtgattacgcaaaagcccgtgcaaaccggttgccaaaacattgccgacgacatcgccgtccatcgtaaaatcatgggtaaacccatgcaggaagccgacaaacaagggctgaccatgcctgaaatcttcagttatccagcttcgcctcatctcgctgcccgtcttgacggcagggctttggacttggacaaaatccgcaccgccacgcagcaactggcggcgcaatacgaaatcgtcttggtcgaaggcgcgggcggattgatggttccgctgacggaaaacctgttaaccattgattatatccgtcagcaaggctatcccgtcatcctcgttaccagcggacggctgggcagtatcaaccacactttactcagtttcgccgcgctcaaacaatacggcatccgtctgcacagcctcgtgttcaaccacatccacgacagccgcgacgcacacatcgcccaagacagcctgaactacttgaaatgccgtctgaaagccgatttttccgaagcggaatggatggagttggcaaaaacagacgcggtataa

SEQ ID NO: 36263 - DNA, 1281 bp, Neisseria meningitidis
atgtcaatttctattttcttgaaacgggtaatattccgacaccacgaaaggcaaatcatgtctgcgcaatcacaaaacaatcatacgtccccattggtcgtcttgaccacgctgttcttcatgatgggttttattacctgcatgaacgacatccttatccctcatttgaaagaaattttcgacctgtcttacgttcaggcgatgctgatccaattctgtttctttactgcctatgcggtgatgtccatcccgatgggggcttttgtcggcaaagtcggctacaaaaacggcgttatcggcggctttctgctgacggcggtcggatgcctgctgttttatcctgctgcgggcagccattcttacgcggtatttttgggcgcgttgtttattttggcttccggcgtaacgctgcttcaggtcgccggtaatccttatgttaccctgctggcgaaacccggcaaggaatcggcaacactgacgctggttcaggcgtttaacgctttgggtacgaccattgcgccgcaaatcggcgcgttcctgattttggcggacgcaacccaaaccgtcagcaaggcggaacagatttcttccgtacagattccctatttgggactggcggggctgctgattatccttgccgttttcgtgaaaatgatccggctgcccgacgcgcgcaaaattgccgccgaggaaagcgcgcacaaccacgacggcaaaaccagcgtatggcaatacaaacatctcgtgttcggtacggcaggcattttctgctatgtcggcgcggaggtgtctatcggttcgttgatggtcaacgtattgggttatctgaaagggctggatcatgcttctgccgcgcattacctgtcgttctattggggcggcgcgatggtcggacgtttcctcggttcggcggtgatggcgaaattcgcgcccaaccgttatttggcgtttaacgcatcggctgcggtcgtactgcttgccgtcgcgatggcgacgggtagcggcaatgcggatgtggcgatgtggtcgctgcttgccatcggttttttcaactcgattatgttcccgacgattttctctttggcaaccaaaggattgggaaaatttaccaacgcggcttccggtgtactgtgtaccgcgattgtcggcggtgcggtcgttcctgtcgtgcagggctgggtggcagatacttacaccctgatgtcttcgtttgtcgtttccgtcatctgttatctgtatatcgtgttttttgcggtgtacggatatagggcggacaaataa

SEQ ID NO: 36264 - DNA, 204 bp, Neisseria meningitidis
atgggcagtttttctctgacgcactggattatcgtactgattatcgtcgttttgatattcggcaccaaaaaactgcgcaacgtcggcaaagacctcggcggtgcggttcatgacttcaaacaggggctgaacgaaggcacagacggcaaagaagcccaaaaagacgatgtaatcgaacacaaaaaagacgaagacaaagcgtaa

SEQ ID NO: 36265 - DNA, 318 bp, Neisseria meningitidis
atggtagtacgcggcggaatctatctggtctccttagacccgaccgtaggaagcgaaatcaaaaagacacgtccttgtgtcgtagtctctcctcctgaaatacacaactatctcaagactgtgctgatcgttcccatgacgagcggaagccgtcctgccccgttccgcgtcaatgtccgctttcaggataaagacggtttgcttttgcccgaacagattagggctgtggataaagccagattggtcaagcatcttggaaatttagacaacagtacggctgaaaaactgtttgcagtattgcaggagatgtttgcctga

SEQ ID NO: 36266 - DNA, 1758 bp, Neisseria meningitidis
ttgatagttatgattcattataaaataaccccgtcccctctcgaccacgagtggcacatcctgctgacattcacacaagatgatgatcttcctatagaaataagcctgccaaactgggttccgggcagctatctgattcgggatttttcccgccacatcacttctatccatgcatcctgtaacggcacgtccatgccgctcgaacaaattgccaaaaaccgctggcatgccgccgccgtacgcggcgagtggcaaatccgctacaccgtatatgcattcgatttgtcggttcgaggttctttcctgacgacagaacgcggtttttttgacggatcgtgcctgtttttgaaagtcgaaggaacggaaacgctgccgcaccgcttggaattgacgggtattccgtccgaatggcgtattgccacaacgctgccggaaacagggaggtttgtctttcaggcggcatcttatgccgaattgattgaccgacctgtcgagatgggcttgattgaatttttagattttgaggcggcaggcattccgcacacaattgccttaagcggcatatatcccgatttcgaccgcaacaggctggtttcggatatcaaaaaaatctgcgaaacagaactggcggtgttttcctcccctgccccgtttcaaaaatatttgttcctgctccacgtcggcgaccatatttacggcggtttggaacacaccgacagcaccgccctgctcgccgaccgccacagccttccgccgtacggtatgaccgatgccgacgatacctacaccacattgctcggacttttctcccacgaatattttcacgcgtggaacgtcaaatccatcaaacctgccgcgttcgtcccttatgacctcgacaaagaaaactataccgaacaactatgggcattcgaaggtattacatcctattacgacgatttgtttttggcacgcagccgcaccatctcgcccgaatcttatttaaacctgctggcacaaggcattacgcgcgtacaacaaacccgcggccgtttgaggcagaccttggcggaatcgagttttaccgcgtggaacaaattttacaaaccggatgaaaacagccccaacgccatcgtcagctactaccagaaaggcgcgcttgccgcattgtgccttgatctgataatacgcaaccgaagcaacggcagacattctctcgatacgttaatggacaaactctatcgggagtggagggacacacactcgggtattccggaaaaacactggcaaatccgctgtcaggaaattaccggcttggatttggaagattttttccaaaaagcgttatacagtaccgaagatttgccgcttgccgaatgcctggcaaccgcaggcgtgggactgaccttcctgccacttccccgacaacacggcggcggatacgcagaacacatctgccccgtcccgccggcaggcgattttggcgcacgtttcaaacaaaacaccgaccacatcgtcctgacccatgtcttcaacagcggcagcgcggaatctgcggcactgtgcccgcaagacaaaatcattgctttagacggttatgcctgcaccgactttaccgcacaatgggcccgataccacgtcaatgcaaaaatcaatatccacttcttccgtgccggcatattgcgtcaaaccgtcttgacggttcaggcagcggcagcggatactgccatcctacatatcacagaccggaacctgttggacaactggttgttcggttaa

SEQ ID NO: 36267 - DNA, 2664 bp, Neisseria meningitidis
atgtccacccaattacacgatgttgaccctatcgaaacccaagagtggctggacgcgttaagctccgtcctcgaatatgaaggcggcgaacgcgcgcaatacctcttggaaaacctggtcaaatactgccgcgacaagggcgtacgtatgccacacggcacgaccacaccgtatttgaataccgtttcggttgaaaacgaaaaaggcattccgggcgaccaaaacatcgaacaccgcatccgcgcattcgtgcgctggaacgccgccgccatcgtattgcgcgccggcaagaaagatttggaactgggtgggcacatcgcatctttccaatctgccgccaccatgtacgaagtcggtttcaaccacttttggaaagccaaaggcgaaggcgaagaaggcgatttggtcttcttccaaggtcacgtcgccccgggcatctatgcacgcgcattcgtcgagggccgtctgaccgaagaccagctgaacaacttccgccaagaagtggacggacacggtctgccttcctatccgcacccccacctcttgcccgacttttggcagttcccgaccgtatccatgggcttggggcccatcatggcgatttatcaggcgcgtttcctgaaatacttggaatcgcgtggtttggcaaaaaccaaaggccgtaaagtatggtgtttctgcggcgacggcgaaatggacgaacccgaatctcaaggtgcaatcgcactggctgcacgcgaaggcttggacaacctgattttcgtcatcaactgcaatctgcaacgcttggacggtccggtacgcggcaacggcaaaatcatccaagaattggaaggcaactttgccggcgccggctggaatgtcgtcaaagtcatttggggccgccgctgggaccgcctcttggcgaaagacaaagacggtatcctgcgccaacgtatggaagaatgtttggacggcgactaccaaacttacaaatccaaagacggcgcgtatgtgcgcgaacacttcttcaatacgcccgaactgaaaacattggttgccgatatgaccgatgagcaactctgggcattgaaccgcggcggccacgacccgcaaaaagtgtacaacgcctacgaccgcgcagcgaaccatgccgacggcaaacctaccgtcatcttggcgaaaaccattaaaggttacggtatgggcgcatccggcgaaggtcagaacgttgcccaccaagccaaaaaaatggacaaagcgtccctgaaacaattccgcgaccgctttgacattccggttaccgacgaacaaatcgaaagcggcgatctgccttacctgacttttgcccccgatacggaagaatacaaatacctgcacgcacgccgcgatgctttgggtggctacctgccgcaacgcaaaccgacgcaggaagtattggaagtgcccgagctgtcagcattcgacgcacaactcaaatccagcggtgaacgcgagttctcgaccacgatggcattcgtccgcatcctgtccactttgctgaaagacaaaaaaatcggcaaacgcgtcgtacctatcgttcccgacgaaagccgtactttcggcatggaaggtatgttccgccaatacggtatttggaatccgaaaggtcagcaatatacccctcaagacaaagaccaactgatgttctataaagaatccgttgacggtcaaatcttgcaagaaggtattaacgaaccgggcgcgatggccgactggattgcggctgcaaccagctacgccaacagcaacttcgcgatgattccgttctacatttactattctatgttcggtttccaacgtgtcggcgacttggcatgggcagccggtgatatgcacgcgcgcggcttcctgctgggcggtactgccggccgtacgacgctgaacggcgaaggcctgcaacacgaagacggccacagccacatccaggccgacctgattccgaactgcgtatcttatgacccgactttccaatacgaagtcgccgtcatcgtacaagacggtctgcgccgtatgtatgccaataatgaagacgtgttctactacatcaccctgatgaacgagaactacacccatccggatatgcccgaaggtgcggaacaagacatcctgaaaggtatgtatctgctgaaagccggcggcaaaggcgacaagaaagttcaattgatgggctccggtaccatcctgcaagaagtcattgccggtgccgagctgctgaaagccgacttcggcgtagaagcagacatctggtcttgcccgtccttcaacctgctgcaccgcgacgctgtcgaggtagaacgcttcaaccgcctgcatccgctggaagccgaaaaagtacctttcgttacttccaaattgcaaggtcatgacggtccggttattgccgctaccgactatatccgcagctatgctgaccgtatccgcgcctacatcccgaacgactaccacgtcttgggtactgacggcttcggccgctccgacagccgcgccaacctgcgccgcttctttgaagtggatcgctacaacgttgccgtggcagcattgagcgcattggcggaacaaggcaaagtcagcaaagaaaccgttcaacaagccattgagaaatacggcatcaaagccgattcagctcctagctggaaacgctga

SEQ ID NO: 36268 - DNA, 1158 bp, Neisseria meningitidis
atgcccgccttttggctcgataccgaacacaccgcccgcccgtccgaacacacaggaaaacacaccatgtcccatatctcccccatccccgaaatcctagccgacatcaaagccggcaaaatggtcatcatcaccgatgccgaagaccgagaaaacgaaggcgacctgctgatggcggcgcaattcgtcacgcccgaagccatcaacttcatgatcaaacacgcgcgcggcttggtctgcctgccgatggacggcgaaatggtcgaaaaactcgggctgccgatgatgacccaaaaaaacggcgcgcaatacggcaccaactttaccgtctccatcgaagccgcacacggcattaccaccggcatttccgccgccgaccgcgccctgactattcaaaccgccgtttccccgaccgccaaacccgaagacatcgtccaacccggtcatatctttccgcttcgcgcccaaaaaggcggcgtactcgtccgcgccggacacaccgaagccggcgtcgacctggcgcaaatgaacgggctgattcctgccgccgttatttgcgaaatcatcaacgacgacggcacgatggcgcgtatgcccgaactgatgaagtttgccgaagaacacaagctcaaaatcggcaccattaccgacctcatcgaataccgcagccgtaccgaaagcctgctcgaagacatgggcaatgcgcctgtacaaaccccgtggggcgagttccaacaacacgtttacgtcgacaaactctccggcgaaacccacctcgccctcgtcaaaggcacgcccgccgccgacaccgaaaccctcgtccgcgtccacgaacccttcagcgtgatggacttcatccaagccaatccgcgccattcatggtcgctgcccaaagcccttgagcgcatccaacaagccgaaagcggcgtcgtcatcctcttacaccgcgccgaagacggcgcatccctgctcgaccgcaccctgcccaaaggtgcaaaccaagcctacaaatgggacagcaaaagctacggcatcggcgcacaaatcctcgtcggcctcaacgtcaaaaaactgcgcgtcctcgggcagccctcatctttcaccggcctgaccggcttcggtttggaagtcgtcggctttgaagaagcggaaaaataa

SEQ ID NO: 36269 - DNA, 519 bp, Neisseria meningitidis
atggctgtttttgacgtggtcgagggcgatattacccgattggcaatcgatgcgattgtcaatgccgccaattcatcgctgttgggcggtggcggcgtagacggtgcaatacaccgcgccgcaggcaaagagctgctggaggagtgccgtactctgggcggttgccgcacaggcgaagccaaaataaccaaaggctatcgtttgcctgcacgttttgtcatccacacggtcgggccggtatggtttggcggaaaacaaaatgaagaggccaaattggcacaatcctacgccaattccttgctgcttgcccggaaacacgatctccacagaatcgcctttccgtgcatcagcaccggtgtgtaccgctttccggccgaagccgccgcacgtattgctttggagagtttgaaacaaaccctgccgcaatgtccggcagtggaaaaaatcatcttttgctgtttttccaaaacagatgccgaatattatcgggcattgctggcagccgaacaggccgtctga

SEQ ID NO: 36270 - DNA, 234 bp, Neisseria meningitidis
atgaaccgccgaaaaatctatctgttgtctgttgccctcttcacactggcatttatgctgctcgtcctcttgggtgcttatctgctgaccgtcggcagcaaagccttcgccgtcgcctcctttcttttcgcattcggcgcactgttcggacaaatcggcagcctcgccctctacctgcggcacaaatccctacgcgccgcccaatccgccacaaaggaaaaccgctatgtctga

SEQ ID NO: 36271 - DNA, 1113 bp, Neisseria meningitidis
ttgttaatccactatattttaaaattcaggcggtgttttcaaatagcgcgaagcaatagccgggcttcagccggtttgtttgaaatcaaagggttggaatcaaacgccaaacgcttgaaccatcattgcccgatgcggcaaaccggcatcgtccggcaatacggttgtttaaaaaataggaaaatcaggatggaaaaccaaaggccgctcctaggcttcgcgttggcacttttggcggcgatgacgtggggaacgctgccgattgccgtgcggcaggtattgaagtttgtcgatgcgccgacgctggtgtgggtgcgttttaccgtggcggcggcggtattgtttgttttgctggcattgggcgggcggctgccgaagcggcgggatttttcttggtgctcattcaggctgctgctgctcggcgtggcgggcatttcggcaaactttgtgttgattgcccaagggctgcattatatttcgccgaccacgacgcaggttttgtggcagatttcgccgtttacgatgattgttgtcggtgtgttggtgtttaaagaccggatgactgccgctcagaaaatcggcttggttttgctgcttgccggtttgcttatgttttttaacgataaattcggcgagttgtcgggtttgggcgcgtatgcgaagggcgtgttgctgtgtgcggcaggcagtatggcatgggtgtgttatgccgtggcgcaaaagctgctgtcggcgcaattcgggccgcaacagattctgctgttgatttatgcggcaagtgccgccgtgttcctgccgtttgccgaaccggcacacatcggaagtttggacggtacgttggcgtgggtttgttttgcgtattgctgcttgaatacgttaatcggttacggctcgttcggcgaggcgttgaaacattgggaggcttccaaagtcagcgcggtaacaaccttgctccccgtgtttaccgtaatattttctttgctcgggcattatgtgatgcctgatacttttgccgcgccggatatgaacggtttgggttatgccggcgcactggtcgtggtcgggggtgcggttacagcggcggtgggggacaggctgttcaaacgccgctag

SEQ ID NO: 36272 - DNA, 684 bp, Neisseria meningitidis
atgtttgcccttttggaagccttttttgtcgaatacggctacgcggccgtgtttttcgttttggtcatctgcggtttcggcgtgccgattcccgaggatttgaccttggtaacaggcggcgtgatttcgggtatgggttataccaatccgcatattatgtttgcagtcggtatgctcggcgtgttggcgggcgacggcatcatgttcgccgccggacgaatttgggggcagaaaatcctcaagttcaaaccgattgcgcgcatcatgacgccgaaacgttacgcacaggttcaggaaaaattcgacaaatacggcaactgggttctgtttgtcgcccgcttcctgccgggtttgcggactgccgttttcgttaccgccggcatcagccgcaaagtatcgtatctgcgctttctgattatggacgggcttgccgcgctgatttccgtgcccgtttggatttacttgggcgagtacggcgcgcacaacatcgattggctgatggcgaaaatgcacagcctgcaatccggcatcttcatcgcattgggcgtgctggcggcggcgctggcgtggttctggtggcgcaaacgccgacattatcagctttaccgcgcacaattgagcgaaaaacgcgccaaacgcaaggcggaaaaggcagcgaaaaaagcggcacagaagcagcagtaa

SEQ ID NO: 36273 - DNA, 2064 bp, Neisseria meningitidis
atgatgacccaaacccttttaatcgaactccttaccgaagaactcccgcccaaagctctgaataatctgggcaaccattttgccgccgccgttgccgaaggcttggaaaaagcgcaactggttgacggtgcagccgaatttacggcttatgcctcgccgcgccgtttggcggttcaagtcaaaaacgttaaagccgttcaggccgatcagaaaatcgtgaaaaaaggccctgccgtggcgaatgccatgaaagacggtgcgccgaccaaggctttggaaggtttcgcacgcggtgcgggcgcgaaaatcgaagacttgaccatcgtccacgacggcaagcaggacgtgtacgcctacgaatacgtccaaaccggcaaaccgttgggcgagcttttggaagacattatcaatgccgcagtgaaaaaactgccgattccgaaagtcatgcgttggggcagcagcacgtttacctttgtgcgccccgttcacgggctagttgtactgcacggcggcgacatcgtaaacgtcagcgttttgggtctgcaaagcagcaatcaaaccttgggacaccgcttcttgtccaacggcgaaatcaccattgaaaacgccgacagctacgccgcacaaatgcgcgagcaaggcaaagtcgtcgcttcgtttgccgagcgcaaagctgcgattcagacggcattggaagggcaggcacgccgtctgaacgcctccgttgccgccgatgaagcattgttggacgaagtaaccgcgctggtcgaatggcctgtggtattggaagccggttttgaggaacatttcctcgccgtgccgcaggaatgcttgattttaacgatgcagcaaaaccaaaaatactttccgctgctcgaccaaaacggcaagctgatgaaccgcttcctgctggtttccaacctgcaaaccgaagacccgtcgcacatcatccgaggcaacgaacgcgttttgcgcgcgcgcctgtctgatgccgagttcttctacaaacaagaccaaaaagcgactttggaaagccgcctgccgaaattgtccagcgtggtgtaccacaacaaaatcggctcgcaagccgaacgcatcgaacgcctgcaaagcattgccgcccacatcgccaaagcattgggcgcggatgccgccgctgccgaacgcgccgcgcgtctggcaaaagccgacttggtaaccgaaatggtcggcgagttccctgaattgcaaggcaccatgggcaaatactatgcccgtttggacggcgaaaccgaagaaattgccgaagccgtcgagcaacattaccaaccgcgttttgccggcgacaacttgccgaacggcaaagtcgccactgccgttgcacttgccgacaagctggaaaccctggtcggcatttggggcatcggtctgattcctaccggcgataaagacccctacgccctgcgccgcgccgccttgggtattttgcggatgctgatgcagtacggtttggacgtgaacgaactgattcagacggcattcgacagcttccccaaaggtttgctcaacgagaaaacgccgtctgaaaccgccgactttatgcaggcgcgccttgccgtgttgctgcaaaacgattatccgcaagacatcgttgccgccgtattggcgaaacagccgcgccgtttggacgacgtagtggcgaaactgcaagccgttgccgcgttcaaacaactgcccgaagccgccgcgctcgccgccgccaacaaacgcgtgcaaaatctgctgaaaaaagccgatgccgcgttgggcgaagtcaatgaaagcctgttgcaacaggacgaagaaaaagccctctttgccgccgcgcaaggcttgcagccgaaaatcgccgccgccgtcgccgaaggcaatttccaaaccgccttgtccgaactggcttccgtcaaaccgcaagtcgatgcattctttgacggcgtgatggtaatggcggaagatgccgccgtaaaacaaaaccgcctgaacctgctgaaccgcttggcagagcaaatgaacgcggtagccgacatcgcgcttttgggcgagtaa

SEQ ID NO: 36274 - DNA, 1077 bp, Neisseria meningitidis
atgatttgccgaaaacctatcggacacacaccatattttgatatgaataaaacaatctgccgcactgctgcactattgataagcggtttttcatacgcaaacaccgtcattcccgatgtctcccccgtcgcacaaggtcaacatgtcttcattaacatccctcagcaacgcctgttcctctacaccgacggcaaactgaccaaggtttatcccgttgcagtaggtcgggcgatgacgcaaaccaatctaggcgaacataaaatcggtgcgaaagcctataaccctgtttggtacatccccaaatccatacagaaagaacgcggcgacggcgtaaaaaccatagccgccggcccggacaaccctttggggccggtttttgtccgcttaggcgaccccaaactcggtttgggcatacacgggaccaatgcgccggccagcgtccccggggttcgaagtcacggctgcgtccgcatgaaatcgcccgacgcgctcgagtttgccaaaaccatcgccagcggctcgcccgcctccgtcatctatcaaatggcgggtctcaatgaagatgcggatcgcaacctgtggcttgccgccttccgcgacccttacggtaagaacaaccttgacatcgcctctctgaaaaaaagtattgcgcaatgggcaaaaacacagggtaaaaccatcgcgcccgagaaagtcgatgctgtactcaaagaccgcaccggatcggccgtctgcctgacctgcggcaaaaacggcaagatgaagatgccgctcaaatcgctggcgtggatacagggttcttcctcatacagccaagctgaagtcattgaacaaactgaggaaaccaactctgccgaaatatccgagacacgcacgcccgaagtgcctgatgtacacacgcccgaggcacaaccgcatttaaatacccaatccgacggcacgccgactgcctataccgaaccggctgccgattcatcgccgcaagtagaaacacctgatcaggctgcttccgagccggttgatgtattattttcaatagatgtgatacggcagggaaatttgcgtttaggtaattga

SEQ ID NO: 36275 - DNA, 654 bp, Neisseria meningitidis
atgggattgggtatggaaatcggcaagctgattgtggcttttttggtgctgattaatccgtttagcgcgttgtcgctttaccttgacctgaccaacgggcacagcacgaaggagcgcaggaaggtcgcgcggacggccgccgttgccgtgtttgccgtgattgcggtatttgcgctgatcggcggtacgctgctgaaggttttgggcatcagcgtcggttcgtttcaggtcggcggcggaattttggtgctgctgatcgccatttcgatgatgaacggcaacgacaatcccgccaagcagaatctcggcgcgcagccggacacggggcaggcgcgccccgctcgcaatgccggagcgattgccgtcgtgcccatcgccataccgattaccatcggcccgggcggtatttcgaccgtgattatttatgcttcggcggctaaaacatacggcgacatcacactgattatcgcggccggtttggtggtcagtgcgatttgttatgccattttaatcgttgccgggaaggtcagccgcctgctgggtgcgacggggctgacgattttaaaccgcattatgggtatgatgctggcggcggtatcggtggagattattgtgtcgggactgaaaacgatattcccgcaactggcaggttga

SEQ ID NO: 36276 - DNA, 549 bp, Neisseria meningitidis
gtgtctcaaaacactccaatcaaaccttggtacaaacacgtctggccgtggatcttgatggcggggccgatttttgtcgtcatcgccagcgtcgctatgttttttgtcgcacagcagcacgcgacagatttggttacggacgattattataaagacggcaaacatatcgacatccagcttcatcgggatgaagaggctgtcagacggcatatcggggtgcaggttctcatttcccccgatatgaatgcggcaaaagtgtttgtcggcggcgagtttgacggcaaacagcctttgaacctgctgctgatgcacccgacccgcaaggcggacgatcaaaccgtcgccctcaagcccgtcggcagcgcgcagaacggcagggcggaatatgaggcggtgttcaaaacccttcctccgaccaaccactggtatgtgcgcgtggaggacgcggcaggcgtgtggcgcgtcgagaacaaatggattaccagccaaggcaatgcggtcgatttgaccccgatggacaaacttttcaataatgccggaagcaaataa

SEQ ID NO: 36277 - DNA, 1194 bp, Neisseria meningitidis
atgttcttcaagcacatcgaagccgcccccgccgatccgattctcggtttgggcgaagcgttcaaagccgaaacccgccccgaaaaagtcaacctcggcatcggcgtttataaagacgcatccggcgcgacacccctcgtcaaagccgtcaaagaagccgaaaaacgcctgttggaaagcgaaaccaccaaaaactacctcaccatcgacggcgttgccgactacaacgcgcaaacccaaatcctgctgttcggcaaagaccacgaaatcatcgccagccgtcgcgccaaaacagcgcaaagcctcggcggtacgggcgcattgcgtattgcggccgagtttgccaaacgccagttgaacgcgcaaaccatctggatttccaatccgacttggcccaaccacaacgccatcgccaaagcggtcggtatccaagacaaaccttatcgttactatgatgccgccaaacacggtttggattgggacggcatgattgaggacttgagccaagcgcaaaaaggcgacatcgtcctgctgcacggctgctgccacaatcctaccggcatcgaccctacgcccgaacaatgggaaactctggcaaaactttctgccgaaaaaggctggctgccgctgtttgactttgcctaccaaggcttcggcaacggtctggaagaagatgcctacggcttgcgcgtgttcttgaaacacaatacagaattgctgattgccagctcttattccaaaaacttcggtatgtacaacgagcgcgtcggcgcgttcactttggtggccgaagatgaagcaaccgccgcccgcgcccacagccaagtcaaaaccatcatccgtaccttgtattccaacccggcttcacacggcgcgaacactattgcgctggtgttggaaaatgatgatttgaaagcacaatggattgccgaactcgatgaaatgcgcggccgcatcaaagccatgcgccaaaaatttgtcgagttgctcaaagccaaaggcgcaagccaaaactttgatttcattatcgaacaaaacggtatgttctccttcagcggcttgactcccgaacaagtcgaccgcctgaaaaacgagtttgccatttatgccgtccgctccggccgcatcaacgtcgccggcattaccgacgacaacatcgattatctgtgcgaaagcatcgtgaaagtactgtaa

SEQ ID NO: 36278 - DNA, 495 bp, Neisseria meningitidis
atgaacaacagacattttgccgtcatcgccctgggcagtaatcttgaaaaccctgcccaacaggtacgcgccgcattggacacgctgtcgtcccatcctgacatccgtcttaaacaggcttcctcactgtatatgaccgcgcccgtcggttacgacaatcagcccgatttcgtcaatgccgtctgcaccgtttccaccaccttggacggcattgccctgcttgccgaactcaaccgtatcgaagccgatttcggacgcgaacgcagcttccgcaacgcgccgcgcacattggatttggacattatcgactttgacggcatctccagcgacgacccccgactcaccctgccgcatccgcgcgcgcacgaacgcagtttcgtcatacgccctttggcagaaatcctccctgattttattttgggaaaacacggaaaggttgccgaattgtcaaaacggctgggcaatcaaggcatccgtcttttaccggataagtaa

SEQ ID NO: 36279 - DNA, 1077 bp, Neisseria meningitidis
atgcaagaatggttccaaaacctctttgccgcaacgctcggtctgggcgatttgggtattactgtaggcttggtggtatccgtcatcgtcaaaattgtgattatcctgattccgctgattctgaccgtcgcctacctgacttattttgaacgtaaagtcatcggcttcatgcagcttcgcgtcggtccgaacgtaaccggtccgtggggtctgattcagccgtttgccgacgtgttcaaactcttgtttaaagaagtaacccgtccgaggctgtcaaacaaagccctgttctacattggtccgattatgtcgctcgccccgtcttttgcggcgtgggcggtgattccgtttaacgaagaatgggtgctgaccaacatcaatatcggtcttttgtacatcctgatgattacctcgctgtcggtttacggcgtgatcatcgcgggctgggcttccaactccaaatattcgtttttgggcgcaatgcgtgcttccgcacaaagcatttcctacgagattgccatgagtgccgcgctggtgtgtgtcgtgatggtatcgggcagcatgaacttctccgacatcgttgccgcacaagccaaaggtattgccggcggttcggtattctcttggaactggctgccgctcttccccatctttatcgtctatctgatttccgccgttgccgaaaccaaccgtgcgccgtttgacgtggcagagggtgagtctgaaatcgttgccggacaccacgtcgaatactccggcttcgcattcgcactgttcttccttgctgaatacattttcatgattctgatttccgcgctgacatcgttgatgttcctcggtggttggttgtctccgttcccacaaagctggggctttatcggcacgccttccgcattctggatgttcgtgaaaatggcggcggttctgtactggtatctgtggatccgtgcaaccttcccgcgctaccgttacgaccaaatcatgcgtttgggctggaaagtgctgattccgatcggcttcgcctacatcgtggttttgggcgtgtggatgatttcaccgctgaatttgtggaaataa

SEQ ID NO: 36280 - DNA, 1008 bp, Neisseria meningitidis
atgagcaccttcttccagcaaaccgcccaagccatgattgccaaacacatcgaccgtttcccgctattgaagttggaccaggtgattgattggcagccgatcgagcagtacctgaaccgtcaaaaaacccgttacctccgagaccaccgcggtcgtcccgcctgtcccctgttgtccatgttcaaagccgtcctgctcggacaatggcacagtctctccgatcccgaactcgaacacagcctcatcacccgcatcgatttcaacctgttttgccgttttgacgaactaagcatccccgattacagcaccttatgccgctaccgcaattggctggcgcaagacgacaccctgtccgaactgttggaactgattaactgccaactgaccgaaaaaggcttaaaagtagagaaagcatccgccgccgtcattgacgccaccattattcagaccgccggcagcaaacagcgtcaggccatagaagttgacgaagaaggacaagtcagcggccaaaccacaccgagtaaggacagcgatgcccgttggatcaagaaaaacggcctctacaaactcggttacaaacaacatacacgtaccgatgcagaaggctatatcgagaaactgcacattacccccgccaatgcccatgagtgcaaccacctgtcgcctttgctggaagggatagccgaaggtacgaccgtctatgccgacaaaggctatgacagtgcggaaaaccggcaacatctggaagaacatcagttgctggacggcattatgcgcaaagcctgccgcaaccgtccgctgtcggaagcgcaaaccaaacgcaaccgatatttgtcgaagccccgttatgtggtcgaacaaagcttcggtacgctgcaccgtaaattccgctacgctcgggcagcctatttcggactgattaaagtgagtgcgcaaagccacctgaaggcgatgtgtttgaacctgttgaaagcggccaacaggctaagtgcgcccgctgccgcctaa

SEQ ID NO: 36281 - DNA, 1194 bp, Neisseria meningitidis
atgtctgatcaaaaaaaccgcagaaatgccttaatcggcgctgcattcctgatggcgacttccgccatcggcccgggctttctgacccaaaccgccaccttcacccaagcactggcggcaagtttcggctttgtgattctgctctcgattctgctcgacatcggggcgcagctcaatatttggcggattgtcgccgtttccgaaaaacaggcgcaggatattgccaatcaggtcttgcccggcgcaggctatttcttggctgtgctgattgtgatgggcggtttggcgttcaatattggcaacgtcggcggcgcaggcttgggtctgaacctgctgaccggactgtcgccggaaaccggtgccgtgatcagcggcgtgattgccatcggtgtgtttctgtttaaagaagcaggcaaagtgatggacaaattcgcccaagtgatgggtttcgtaatgattgcgctgacggtttatgtggcatggcaggcgaatccgccgctggcagatgccgccgtgcatacctttatgccggaaaaactcgatgcaatggcgattgttacactggtgggcggcacggtcggcggctacatcaccttcgccggtgcgcaccgtctgctggacgcaggcatcaaaggcaaatcggcgttgccggaagtgagccaaagctcggtgcgggcgattctgattgcctcgattatgcggattgtattgtttttggcggttttgggcgtggtcagccaaggcgtacagctcaatcccgacaaccctgcttccacaccgtttgaatatgcggcgggatacatcggcctgctgattttcggcgtggtgatttgggcggcttcgattacttcggtgattggtgcggcttatacttcggtgtcgttcttctccggtctcagcccgtctatcgaacgcaataaaaacaaatggattattgcctttatcgccgtgtccaccgccgtattttccaccatcggcaaaccggcgcaggtgctggtgttcgtaggcgcattaaacggcctgattttaccgatttccctcggtctgattctgattgccgcctacaaaaccaaaattgtcggcgactacaaacacccgctgtggctcaccgtttccggcgtgattgtggtcggtttgatggcagtactcagcgccattaccatcagcaaatatatcggcggcttgttcggctga

SEQ ID NO: 36282 - DNA, 561 bp, Neisseria meningitidis
atgaatatgaaaaccttattagcactagcggttagtgcagtatgttcagttggtgttgcgcaagcacacgagcataatacgatacctaaaggtgcttctattgaagtgaaagtgcaacaacttgatccagtaaacggtaacaaagatgtgggtacagtgactattactgaatctaactatggtcttgtgtttacccctgatttacaaggattaagcgaaggcttacatggtttccacatccatgaaaacccaagctgtgagccaaaagaaaaagaaggtaaattgacagctggtttaggcgcaggcggtcactgggatcctaaaggtgcaaaacaacatggttacccatggcaagatgatgcacacttaggtgatttacctgcattaactgtattgcatgatggcacagcaacaaatcctgttttagcaccacgtcttaaacatttagatgatgttcgcggtcactctattatgatccacacgggtggtgataatcactccgatcatccagctccacttggcggtggcggcccacgtatggcatgtggcgtgattaaataa

SEQ ID NO: 36283 - DNA, 681 bp, Neisseria meningitidis
atgattttccaaacagtctggttttcagatatggtactgtcggtttcgtggattgtccttatcctgatactggcagcttccgcgccgtccgcattccgctcgcttgaccgctaccgttccgcccttccactgtgtaccgtaattttttccgcagcatggtgtctgaacgcctctgccggcggcggacagcttgcacagatgaactaccacctgctcgccgtcaatctggttgcactgatggtgggcacttccgccgccctttggcttgccgcgctgctgatgctgccctactgcctgctgtttgccggttctgtcggcgcatatccgccgaacgctttggtgctgattctgcccgcgctggtcgtcaaccgcctgtcgcgtatgctggtcaaccgcctgccgcccaatattttcatctttattttcgtcaacggctttctcgcttccgccgccggcattctgctgaccgggctggtgctgaccggtattttggatgccgcaaacgcttttccgtccgaaatattgtggacgaccgccctgcccgtctttattctgctggcgtgggcggaagccttcctcagcggcatttcaactgccatatttgttgcactgaagccccattggatcaacactttcgacgacaaccgctatctgaagtccgaccgtagcatatggaggtag

SEQ ID NO: 36284 - DNA, 4176 bp, Neisseria meningitidis
atgaatttgttgaacttatttaatccgttgcaaactgccggcatggaagaagagtttgatgccattaaaatcggtattgcctctcccgaaaccatccgctcatggtcttatggcgaagtcaaaaaacctgaaaccatcaactaccgtacgttcaaacctgagcgtgacggtttgttctgtgccaaaatctttggcccggtcaaagactacgaatgcttgtgcggaaaatacaaacgcttgaaatttaaaggcgtaacgtgtgaaaaatgcggcgtggaagtaaccctgtccaaagtgcgccgcgaacgcatgggccatatcgaattggctgcgcccgtcgcacatatttggttcttaaaatccctgccttcccgcttgggtatggtactggacatgactttgcgcgacatcgagcgcgtattgtactttgaagcatttgtggtaaccgatcccggtatgactccgctgcaacgccgccaattgctgactgaagacgattactacaacaagctggacgaatacggcgacgatttcgatgccaaaatgggtgcggaaggtatccgcgaattgctgcgtaccctgaatgtagcgggcgaaatcgaaatcctgcgccaagagttggaatcgaccggatccgacaccaaaatcaaaaaaatcgccaaacgtttgaaagtattggaagccttccaccgttccggtatgaagctggaatggatgattatggacgtgctgccggtattgccgcctgatttgcgtccgttggttccattggatggcggtcgttttgccacttccgatttgaacgatttgtaccgtcgcgtcatcaaccgtaacaaccgtctgaaacgcctgctggaactgcacgcgcccgacattatcgtccgcaacgaaaaacgtatgttgcaagaagcagttgactcgctgttggataacggccgtcgcggtaaagccatgaccggcgccaacaaacgcccgctgaaatcattggctgacatgattaaaggtaaaggcggacgcttccgtcaaaacctgctgggtaaacgtgtggactactccggccgttccgtgattaccgtaggcccatacctgcgtctgcaccaatgcggtctgccgaaaaaaatggctttggagttgttcaaaccattcattttccacaaattggaaaaacaaggtttggcttctaccgttaaagctgcgaaaaaactggtagaacaagaagtacctgaagtatgggatatcttggaagaagtgatccgcgaacatccgattatgctgaaccgtgcgccaaccctgcaccgtttgggtattcaagcgttcgaacctatcctgattgaaggtaaagcgattcagttacacccattggtgtgtgccgcatttaacgccgactttgacggtgaccaaatggctgtacacgttccattgagcttggaagcacaaatggaagcgcgcaccctgatgctggcttcaaacaacgtattgtctccagccaacggcgaaccgattatcgtaccttcccaagacatcgtattgggtttgtactacatgacccgcgaccgtatcaatgccaaaggcgaaggcagcctgtttgccgatgtgaaagaagtgcatcgtgcataccataccaaacaggtcgagctgggtacgaaaattaccgtacgtctgcgcgaatgggtgaaaaacgaagcaggtgagtttgaacctgtcgttaaccgttacgaaacaaccgtcggccgtgcattgttgagcgaaatcctgccgaaaggcctgccgtttgaatatgtcaacaaggcattgaagaaaaaagaaatttctaaactgattaacgcatcgttccgcctgtgcggcttgcgcgatacggttatctttgctgaccacctgatgtacaccggtttcggatttgcggcaaaaggcggtatttccattgccgttgacgatatggaaatcccgaaagaaaaagcggccttgctggctgaagccaatgccgaggttaaagaaatcgaagaccaataccgtcaaggtttggttaccaatggcgaacgttacaacaaagtagtggatatttggggtcgtgccggcgataaaatcgctaaagcgatgatggataacttgtccaaacaaaaagttatcgaccgtgccggcaacgaagtcgatcaagagtcattcaactccatttatatgatggcggactccggtgcccgtggttctgcggctcagattaaacagttgtccggtatgcgcgggttgatggctaaacctgacggctcgattattgaaacgccgattacctcaaacttccgcgaaggcctgaccgtattgcaatactttattgcgacccacggtgcgcgtaagggtttggcggataccgcattgaaaaccgcgaactccggttacctgacccgtcgtctggtagacgtaactcaagatttggtcgttgttgaagacgattgcggtacttcagacggctttgtcatgaaggcagtggtacaaggcggtgatgtgattgaagcattgcgcgatcgtattttgggccgtgttactgcgtctgacgttgtcgatccgtcaagcggcgagaccttggttgaagcaggcacgttgttgactgaaaaactggtggatatgattgaccaatccggtgtcgatgaagtcaaagtccgtacgccgattacttgtaaaacccgccacggtttgtgcgcgcactgttacggccgcgacttggcgcgcggcaaactggtcaatgccggagaggcagtcggcgtgattgccgcccaatcaatcggcgaaccgggtacccagctgactatgcgtacgttccacatcggtggtgcggcatcccgtgcggcagcagccagccaagtggaagccaaatccaacggtacggcacgattcagcagccaaatgcgttatgttgccaacaataaaggcgagttggttgtcatcggccgttcttgtgaagtcgtgattcacgacgatatcggccgtgaacgcgaacgccacaaagtaccttacggtgccatcctgctggtacaagacggtatggccattaaagccggtcaaaccttggcaacctgggatccgcatacccgtccgatgattaccgaacacgcaggtatggtgaaattcgaaaacgtggaagagggcgttaccgttgccaaacaaaccgatgatgtaaccggtttgtccactttggtggtgattgacggtaaacgtcgttcctctagtgcttccaaactgctgcgtccgactgtgaaactcttggacgaaaacggcgtggaaatctgtattcccggtacttctactccggtatccatggcattccccgttggtgcggtgattaccgtacgcgaaggtcaggaaatcggtaaaggcgacgtattggcgcgtattccgcaagcctcttccaaaacccgcgacattaccggcggtctgccgcgcgttgccgaattgtttgaagcacgcgtgccgaaagatgccggtatgttggcggaaattaccggtaccgtttccttcggcaaagagaccaaaggcaagcaacgtctgattgttactgacgtggacggtgtagcatacgagaccttgatttccaaagagaaacaaattctggtacacgacggtcaagtggtaaaccgaggcgaaaccattgtggacggcgcggtcgatccgcacgatattctgcgtttgcaaggtatcgaagcattggcacgctacattgtccaagaggtgcaagaggtttaccgcctgcaaggtgtgaagatttccgataagcacatcgaagtcatcatccgtcaaatgttgcgccgtgtgaacattgcggatgccggagaaaccgggttcattaccggagagcaggtcgaacgcggcgatgtgatgcttgccaatgaaaaagcgttggaagaaggcaaagaaccggcgcgttacgaaaacgtattgctgggtattaccaaagcttccctgtccaccgacagcttcatttctgccgcatcgttccaagaaaccacgcgcgtcctgaccgaagccgcgattatgggcaaacaagacgagttgcgtggtttgaaagaaaacgtcatcgtcggtcgcttgattcctgccggtaccggtttgacttaccaccgcagccgtcatcaacaatggcaagaggtggagcaggagactgctgaaacccaagtaacggatgaataa

SEQ ID NO: 36285 - DNA, 729 bp, Neisseria meningitidis
atgcctgattacatccgcatctcgcgcgccgcggacagcctgcgcgatatcaaaatcacccctcatttcctgccgcatacggacggttcgtgccttattgaatgcggcaataccaaagtgatttgtaccgcttccatagatgaaaacgtcccgccgtttctgcgcggtaaaaaccaaggctgggtaacggcggaatacgggatgctgcctgcctcaactgcttcccggatgcgccgcgaagcttcggcgggcaaacagtccgggcgcacacaagaaatccaacgccttatcgggcgttcgctgcgcgcggtcgtggatatggaaaaactcggcgaacgacaaatcttgattgactgcgatgtgattcaggcagatggcggtacgcgcacggcttcgattaccggtgcgtttgtcgcgctgcaaatcgccgtcggcaaactggtttcagacggcattttgagtgaaaaccccatccgcgaagccgttgccgctgtgtcagtaggcgtagtgaacggcgtgccgcttttggatttggattatcccgaagactccggttgcgacagtgatgtgaatatcgtcatgaccgcatcgggaaaaatcatcgaaatccaaggtacggcggaagacgcgccgttcagtttggacgaattgggcaaactggttgcactggcgcaaaaaggcataggcgaactgctgcaacaccagcaaaatgcgttgtccgccgcctga

SEQ ID NO: 36286 - DNA, 282 bp, Neisseria meningitidis
atggaaaatggacaccgaaataatcgatctcccttagaaaaaagaattttttatctggagcattcgggacagtatctgatgatttgcgccctatcagattactccaaaaataaacatactgtcgttatggcaaattttctctatccaaatgaaaaaatggattggagaaatttagatgatttgttcaatgagttggttttagaggaattacagtcttcatttatggattggtatccaactattgaagaggcaattagccatcatttagaagatttttcgtaa

SEQ ID NO: 36287 - DNA, 666 bp, Neisseria meningitidis
atgacagtattaagcaaagagcaggtcctatccgcatttaaaaaccgcaagtcgtgccggcattacgatgcggcacgcaaaatcagtgccgaggattttcagtttattttagaactcgggcgtttgtcgcccagttcggtcggttcggagccttggcagtttgttgtggttcaaaaccccgaaatccgacaggcaatcaagccgttttcttggggtatggcggatgctttggataccgccagtcatttggtggtgtttttggcaaagaaaaatgcccgcttcgacagcccgtttatgttggaaagcctcaaacggcgcggcgttaccgaaccggatgccatggcaaaatctttggcgaggtatcgggcgtttcaagccgacgacatcaagattttggacgattcgcgcgccttgtttgactggtgttgccgccagacctatatcgcgttgggcaacatgatgacgggtgcggcgatggcaggtatcgattcctgtccggtggaaggtttcaactatgccgatatggaacgcgtattgtccaggcagttcggtttgttcgatgcggcagaatggggcgtgtccgtcgccgcgacattcggttaccgcgttcaggaaatcgccacgaaagcgcgcaggcccttggaagaaaccgttatttgggcataa

SEQ ID NO: 36288 - DNA, 756 bp, Neisseria meningitidis
atgattaaaatccgcaatattcataagaccttcggcaaaaataccattttgcgcggcatcaatttggatgtgtgcaaagggcaggtggtcgtcatcctcgggccttccggctcgggtaaaacgacgtttctgcgatgcctaaacgcgttggaaatgcccgaagacggacaaatcgagttcgacaacgagcgaccgctgaaaatcgatttttctaaaaaaccaagcaaacacgatattttggcactgcgccgcaagtccggcatggtgttccaacaatacaacctctttccgcacaaaactgcgttggaaaacgtgatggaagggccggttgccgtgcagggtaagcctgccgcccaagcgcgcgaagaagctttgaaattactggaaaaagtcggcttgggcgataaggttaacctttatccctaccagctttccggcggtcagcagcagcgcgtcggcatcgcccgcgcattggcgattcagcctgaactgatgttgtttgacgaaccgacttccgcactcgatcctgaattggtgcaagatgttttggataccatgaaggaattggcgcaagaaggctggaccatggttgtcgttacgcatgaaatcaaattcgccttagaagtggcgaccaccgttgtcgtgatggacggaggcgttattgtcgaacaaggcagcccgcaagatttgttcaaccatcccaaacatgagcggacgcggagatttttaagccaaatccaatctaccaagatttga

SEQ ID NO: 36289 - DNA, 510 bp, Neisseria meningitidis
atgagtaactttgaaaaaaaatatattttagaattaaatgatgctttaagccatttaaatcataactctacctcatttgatttattgaaagttttgatttcatggttatcaaacgatattgtcattgataaatttaaaattttaggttatgactttagtaaatatatcgaaatgaatcccgatgactatccggttgaaaaatctatattgaatagagaggaaattatttatctcaaaaacaatatttatcgtaaaatatcatcaggaaattttaaatttcaatactttgtacaatatattagagatattttagaatatttatttattgaacatattgaaagagtctgtccttactgcgaatggggtgaaatgcaaaaattagaagaacaaaatacgcatgaaacggtgtatctctgtactcaatgtggatgtgctttttataacgataattcacaatttttattaaaaacccctttaaccattccaatgaaacgtgatgaatttaaataa

SEQ ID NO: 36290 - DNA, 1542 bp, Neisseria meningitidis
atgaagtttttagaccgtgaggcaagcattgccaagccgggtttcaaccgttggctcgtaccgcccgcagcattggcggtgcaccttgccatcgggcagatttacgcctattccgtattcaacgcgccgctgaccaaacttatcggcataaccgaatcggcggccggagattggaagctgacgaccgtaggttggattttcagtatcgcactcgcgatgctgggcgcgtcggccgccctgttcggtacgtggatggaacgggtagggccgcgcaaagccatatttgccgccgcctgctgcttcagcctgggcttcttcgtatccgcattcggcgtgcgtacgcacaacctcttcctgctctatttgggcaacggcgtcatcggcggcgtaggcttgggtttgggctacatcgggccagtttccacactgatgaaatggtttcccgacaagccgggtatggcgaccggtttggcgattatgggtttcggcggcggcgcaatgctggcctcgccgctttccgtatcactgatgaacgccttttcaaacgctgcttcggtcggggttgccgaaaccttcgccgtattgggtctgctttacctcgcactgatgatgtttggcgcgtttaccatccgcgtacctgccgacggctggaaacctgaaggctataccgcgccgaaaacgcaaaacaagctggtcagcagcaatcatgtcaacgtgtcccaagccatgaaaacgccgcagttttggctgttgttctgggtattgtgcctgaacgtaaccgccggcatcggcgtattgggtcaggcatccgtgatgattcaggaactcttttccgaaacctccgtaggcaggcagtcggcagtcggcgcaggtgcggcggcaggcttcgtcagcctcctgagcctgtttaatatgggcggacgctttttgtggtcgagcgtttccgacaaaatcggacgcaaaaacacctacaccatcttcttcgtactcggttcgctgctgtatttcgccgttccctccatcggcgagggcggcagcaaagccctgttcatcatcggcttttgcgtgattatttccatgtacggcggcggatttgccgccattcccgcctacctgaaagacctgttcggcacctatcaggtcggcgcgattcacgggcgcatcctgctggcctggtcaaccgccgccgtcatcggcccggtactggtcaattacatacgccaaagccaaatcgacagcggcataccggcggcacaggcatacagcgtaaccatgtacatcatggcgggtctgctgattatcggtttgttgtgcaacctcgccgtcaaatccgtacacgaaaaacaccacgaaaaagacatcaaaaccgccgcacgcagcggcaaccccgatgacgaaaccgccatatccgacgcttaccttgtgggcgaaaaagtttccggcggcggcatatcggtctggtggcgttgggcattggccgtcataccgctcgcctacggcgtggtgatggtctttgtcaaagcactcgaccttttctcctga

SEQ ID NO: 36291 - DNA, 219 bp, Neisseria meningitidis
atggcgaaagaagatactatccaaatgcaaggtgaaattcttgaaactttacctaatgcaacatttaaagtaaaacttgagaatgaccatattgtattgggtcatatttctgggaagatgcggatgcattacattcgtatttctccgggagataaggtcacagtagagctgacaccttatgatctaactagggctcgaatcgttttcagagcaagataa

SEQ ID NO: 36292 - DNA, 480 bp, Neisseria meningitidis
atgaaacacatactccccctgattgccgcatccgcactctgcatttcaaccgcttcggcacatcctgccggcgaaccgtccaccccaaacgaaaccgctatgaccacgcataccctcacctcaaaatacagctttgacgaaaccgtcagccgccttgaaaccgccataaaaagcaaagggatggacatttttgccgtcatcgaccatcaggaagccgcccgccgaaacggcttaacgatgcagccggcaaaagtcatcatcttcggcacgcccaaagccggcacgccgctgatggtcaaagaccccgccttcgccctgcaacttccactgcgcgtcctcgttaccgaaacagacggcaaagtacgcgccgcctataccgatacgcgcgccctcatcgccggcagccgcatcggtttcgacgaagtggcaaacactttggcaaacgccgaaaaactgatacaaaaaaccgtaggcgaataa

SEQ ID NO: 36293 - DNA, 654 bp, Neisseria meningitidis
atgttttccgtaccgcgttcctttttgccgggcgttttcgtacttgccgcgcttgccgcctgcaaacctcaagacaacagtgcggcgcaagccgcttcttcaagtgcatccgcgtcagctgcggaaaatgcggcaaagccgcaaacgcgcggtacggatatgcgtaaggaagacatcggcggcgatttcacgctgaccgacggcgaaggcaagcctttcagcctgagcgatttgaaaggcaaggtcgtgattctgtctttcggctttacgcactgtcccgatgtctgcccgacagagcttttgacgtacagcgacacgttgaagcagttgggcgggcaggctaaggacgtgaaagtggtgttcgtcagcatcgatccggaacgcgacacgcctgaaatcatcggcaagtatgccaaacagttcaatccggactttatcggtctgacggcaacgggcgaccaaaacctgccggtcatcaagcagcaataccgcgtggtttctgccaaagtcaatcaaaaagacgacagcgaaaactatttggtcgaccactcttccggtgcgtatctcatcgacaaaaacggtgaggttgccattttctcgccttacggaagcgagccggaaacgattgctgccgatgtaaggactctgctctga

SEQ ID NO: 36294 - DNA, 861 bp, Neisseria meningitidis
atggcaaaagtaaaaggcggattggggcgcggtttggattcgctgctcgccaacggcgcagacaacagcagcggcgaccgattgaccacggttgcggttaaagatatccggcccggccgctatcaggcgcgtgttcaaatcgatgacgaagccttgcaggagctggcagattcgattaaagcacagggagtgatacagcccgtcatcgtgcgcgaacacggactgtcccgatacgaactgattgcaggcgaacgccgttggcgcgccgcacagattgccggcctgaccgaaatccccgccgttatcaaaaccatcagcgacgaaaccgcattggcaatgggtttgatcgaaaacctccagcgcgaaaacctcaaccccatcgaagaagcacaaggcttgaaacgccttgccgacgagttcggactgacccacgaaaccatcgcccaagccgtcggcaaaagccgaagcgcgatttccaacagcctgcgccttttaagcctgcccgaacccgtgcaggaaatgctttaccaacgccgcctcgaaatggggcacgcccgcgcattgctgaccctgcccgtcgtcgaacagctcgaattggcgcaaaaggccgtcaaaaacggctggtcggtgcgcgaagtcgaacgccgcagccaaatggcccatcaaaacaaacgcctcgaacccaaaaaacctgctaccgccgacatcgaccgtctgaacgatttgctgactgaaaaactgggtgtcaacgccgaaatcaaaaccgccaaccataaaaaaggcagaatcatcctgcatttcgacacgcccgaaaccttcgaccatatcttgaagcaattgggcatagattaccgaccttaa

SEQ ID NO: 36295 - DNA, 969 bp, Neisseria meningitidis
atgagtgaaatcaaaaccgacgaccccaaacgcggcatcaaactcagaggcgcggacaaaaccgcgcgcatccccatcaaagtcgtcccccttcaggaaaaactgaaaaagcccgaatggatacgcgccaaactcccatcgcgaaaattctttgaaatcaaagacattttgcgcgaacaaaagatgcacaccgtttgcgaggaagcctcctgccccaacatcggcgaatgcttcagcaaaggcacggcgaccttcatgattatgggtgacatctgcacccgccgctgcccgttctgcgacgtgggacacggtcggcccaatatgctcgaccccgacgaaccgagaaacctcgccgaatccgtcaaagccatgaacctgcgttacgtcgtcatcacctccgtcgaccgcgacgacctgcgcgacggcggcgcacagcatttcgccgactgcatcaaagccatccgcgaaaccagcccgaacaccaaaatcgaaatcctcgtccccgacttccgaggacgcttggacatcgcactcaaaatccttgccgaaaccccgcccgacgtgatgaaccacaacctagaaacccatccgagcctgtacagaaaagcccgtcccggtgccaattatcaacattctttagacttattaaaacgttataaagaaatgatgccgcacatcccgaccaaatccggcatcatggtcggcttgggcgaaacagacgaagacgtgcgtgaaattatgcgcgatatgcgggcgcacaatatcgaaatgattaccatcggacagtacctccagccttcagacggacacctgcccgtcctgcgctacgttacgcccgagcagttcaaaatctttgaaaaagaagcatacgaactgggcttcagcaatgccgccatcggcgcgatggtacgttccagctaccacgccgacgaacaggctgccgaagccttacgcgaatgtgaattctga

SEQ ID NO: 36296 - DNA, 342 bp, Neisseria meningitidis
atgcccaaaatcaccgtacttccacacacgacattatgccccgaaggcgcggttatcgaagacgcgcccgaaggcaaaaccgtccttgacgtgctgctcgaccatgatatcgaagtcgatcacgcctgcgaaaaatcctgcgcctgcaccacctgccacgtcatcatccgcaaaggtttcgacagtttggaagaaccgaccgaattggaagaagacctgctcgatcaggcttggggtttggaagccgattcacgcctgagttgtcaggcggttgtcgccggcgaagatttgattgtggaaatccccaaatacaccatcaaccacgcgcgcgaagaacactga

SEQ ID NO: 36297 - DNA, 576 bp, Neisseria meningitidis
ttgctatgcactcaaacagatggggataacgcgcaaaaaaagaccaccacttacaaagaacaagacccggccaaagtaacgcattatttgacacagccggccgaattttccgactaccaacgtgtttatttggatgaaacaggatttgaccgctacctgttccgtccctatgcccgcagcctgaaagggcaaatagtgaaagcgcagataagtggaaaaagataccaacgcttatctttggtgtccgcacaagtcggcaaccggctgattgctccgatggtttatcaaaatacgatgaccggagtcttttttgaagcgtggtttcagcaatgcctactgcccgcattgactcaaaaatcggtgattattttagataatgcgcgatttcaccgtatgggtgtcttacgggaaatggcggaaaaattgggacataaggtattgcctcttgcaccttattcacctgagctcaacccgattgagaaagtgtgggcgaatattaagcggtatctgcgaaccgttttgtctgattacgcccgatttgacgatgcactactgtcctattttgattttaattga

SEQ ID NO: 36298 - DNA, 168 bp, Neisseria meningitidis
atgaatgaaaaagatttgatcgaatggctcgaagaccgtggcgagctgatgattatgaaaaaggacggcgaaggctttgtgattgcagcgcgtgcgccggacgggatgtggaagactgccgaggcggaaactttggctcaggcgataactttatgggaggaagtgtga

SEQ ID NO: 36299 - DNA, 360 bp, Neisseria meningitidis
atgccacgcgtaaaacgcggtgttaccgcccgtgcccgtcaccaaaaaatcttcgcgttagccaaaggctaccgcggccgtcgtaaaaacgtttaccgcgttgccaagcaggcggtaatgaaagccggccaatacgcataccgcgaccgccgccaacgcaaacgccaattccgtcaattgtggattgtccgtatcaatgcaggtgcgcgtgaaaacgggttgtcttacagcaaatttatgaacggtctgaaacgcgcctctattgaaatcgaccgcaaagtattggctgatttggccgtgttcgataaagccgcttttgcacaattggttgaaaaagccaaagctgctttggctgcttaa

SEQ ID NO: 36300 - DNA, 876 bp, Neisseria meningitidis
atggcagtaggaaaagagattctcaccaaaatccgcagtgttcagaatacccaaaagatcactaaagcgatgcagatggtgtcaacctctaaaatgcggaagactcaggaacggatgcgtttggcgcgtccgtatgccgaaaaagtgcgtatggtgatgagccatcttgcgcaaaccaataccgatcatggtattccgttactggaatctcatcgggaaatcagacgtgtcggttttattttgattacgtctgataagggtttgtgtggcggtttgaacgccaacgtgctgaaaaagtttttggcacaagttcaagagtatcggaatcaaggtattgaagaggaaatcgtatgccttggcagtaaaggtctgatggcgtgtcagagcattggtctgaatgtggttgccagtgccgtaaatttgggcgataccccaaaaatggaaatgctgctcggacctttgacagaactcttccaacggtatgagaaacatgaaattgacagaatccatctggtgtattcgggttttgtcaataccatgcgtcaagaaccgagaatggaagtattgctgcctatcggtgagaacgtgattggcgattcagctcccaaatcaccgttcagctgggaataccgctacgaaccgactgcacttgcagtgttggaatatctggttcgccgctatttagagtctgtggtttatcaggcgttgagcgacaatatggcatccgaacaggcagcccgcatggttgccatgaaagctgcaacagacaatgcaggcaatgccatcaaagagttgcgtctggtatataacaaatcgcgtcaagctgcgattaccacggaattgtcagaaattgtagcaggtgcggcggctgtctga

SEQ ID NO: 36301 - DNA, 492 bp, Neisseria meningitidis
gtggttcggcaggacgatttgagtttggggcttgaaattgcaggcggtcaaacttatctattggaacaattcctttttcaaaggcgaagcctgcttgcctttaaagggggtttgagagagaatgcagaaaatattatattaaggaataacaccatgtcggatgaaagccctattatttttactgacagctgctgtgccaaagttgccgatttgattgccgaagaaaacaatcccgatttgaaattgcgggtttttgtcaatggcggcggctgttcgggtttccagtacggatttacttttgacgaaatcaaaaacgacgacgattttgaaattgagaaaaacggtttggtctttttggtcgatccgatgagctatcaatatctggtcggtgcggaaatcgactatacggaaagtttgcagggttcgcaattcgtcatccgcaatccgaatgcggaaacaacctgcggttgcggatcgtcgttttccgtatga

SEQ ID NO: 36302 - DNA, 1434 bp, Neisseria meningitidis
atgaacgaatattcccaattaatcaagcatcccgatatttccctttccccgatttcagacggcatcggggtcggcaatccggcgacgggcgaaattttggcgtatgtccgcaacacgggttcggacaaactgaaaaacctgattcaaaaggcggcggcagcgcaaaaattatgggcggcgaaaactgctttggaacgcgcagacatattgtggcgttggtattttttagttaaagaaaacaaagaagcactggcgcgcctgatgacgatggagcagggcaaaagcctgaccgagtcgcgcggcgaaatcgattatgcggcttcgtttgtgcgctggtttgcggaagaggcgcggcggattgacggcgatgtgctgacgagtgtgaaagcgtcgcaaaaactggtcgtgttgaaacagcctgtcggtgttaccgccgcgattacgccgtggaactttccgtccgcgatgattgcgcgcaaggctgcgccagctttggcagtgggttgcgcgatgatcgtcaaacccgcgtcgctcacgcctttgagcgcgtatgcgttggccgtgttggcttacgaagcgggcgtgccgcaggatttgctgcctgttgtcagcggcagtgcttcggaaatcggccgtgaatttgccacgaacccgattatccgcaaaatcagcttcaccggttcgaccgaagtcggcgcgaaaatttttgccgacagcgcggcggacattaaaaaactcagtttggaactgggcggcaatgcgccgtttatcgtgtttgacgatgccgatttggacaaagccgtcgaaggcgcgctcgccagcaagttccgcaacagcggtcagacctgtgtctgcaccaaccgcgtttacgctcaatcgggcatttacgacgcattttgccgcaaattaagtgaaaaagcagccgtgctcaaattgggcaacggcttggacgaaggcgtgaaccaagggccgctgattgaggaaaaagcggtagaaaaagtcgagcagcacatcgccgacgcactctcaaaaggcgcggtctgtctgaccggcggcaaacgcagcgcgttgggcggaacgttttttgagccgactgtcttaagcggcgtaacagcacaaatggcggtggcgcgcgaggaaaccttcgggccgttgtgtccagtgttccgttttgaaaccgaagccgaagtcatcgcggtcgccaacgatacggaatacggtttggcagcttaccttttcaccgccgacaccgcccgccaatggcgcgtcggcgaagcattggaatacggtatggtcggcatcaatacgggcttaatcagtaatgaagtggcaccgttcggcggcgtgaaacgcagcggtttgggacgtgaaggcagcaaatatggtgcggacgaatatctagaattgaaatatttgtgtattgatgtcgggtag

SEQ ID NO: 36303 - DNA, 549 bp, Neisseria meningitidis
atgcgcactattttcttttctggttcacgcagcatttcacgactaaatccacaaatacgagaaagaattaacaatattcttagcaataattttgatattgttattggagatgctaatggggctgataaagctatccaaaaatttctacaagaacaagattatgctaatgtgcatatttacttttctggcaaaatttaccgaaataatgtggggaattggcagtttgtccaagtagacagcaaaggaactggaagggtattttatacagcaaaagataagaaaatggcagaaattgctgattatggctttattttatgggatggtaagagtattggttcattaaataatatagcagaacttttacagctaaataaaccttctcttgtataccattctcaaacaaaagaattctttaaaattaaatcaagcgcagatttagagaatattttatctaacatagaagatgatgttttagcttcaattttagaaaagggaaatacttttcttaaaagctatgtaacaaaacaaccttctttaattcaagagtaa

SEQ ID NO: 36304 - DNA, 291 bp, Neisseria meningitidis
atggcgaaatactttaccgagacgggtatcggtgtccgtgagcattttgattttttcggcgagtttgtcgtttcgccggcagcacgttcgggtgatttggcacttgcttacggtttgaggctggaagcgggcgaagagggtttgagccttgccgagcttttcgataagcgttccgacagtcaggagtcggtcgagtgcggtcgtattgacatcggcggctttatgctgaccgcgaaggaggttgacggggacggcaatatcgggtctatggggctgaaagtaccgcgttag

SEQ ID NO: 36305 - DNA, 198 bp, Neisseria meningitidis
atgcagaaagtctatgttgtccagtccgtatcaacaggggactttctgtatctctctcctgaaacgggcgacatcggacataccaaattaatcaccaatgccgattatttctacgacttcgaagaagcgattaacgcaggtttggaagaaatcggcaaccaatacgaatttgtcgtattcggatttttgaaagactga

SEQ ID NO: 36306 - DNA, 519 bp, Neisseria meningitidis
atgagtgaaataataaatctcactgaatcaggtataacttttaatctagtaaaaaataacctgttttatatagaaccatatatccggaagagaaggcaagaaggtattaagacagtagagtttatctatctgcaagaagataatttgttatttgttgaggcaaaacaaagtattccaaatcaagaaagatctcctgagcgttttgatgaatatatttcagagatttatcaaaaatggtgtaatgcattaaatgttgaaattttgggaatattaggcagagaagatatcaaagaaacaattatgcctagtgctttttcaaatttgcaatggggtagcatagaaatcaaattattactggttatcccggatgtgctgcttaattatcttgggcaattgaatgaattaataaagcaagaatttaataagaaagatactttgcggttgatttctttatggaacatttctgtagaagtaattaatagggacttagccattcaaaaaggtttagctagctcttga

SEQ ID NO: 36307 - DNA, 753 bp, Neisseria meningitidis
ttgggcgtgcgcgaactattgggggaacgcggtttccgctatcttttggcattggatgccgatcccgcgccgctgacggaacacctcacccgacgcgccccgctcggacaccgcctcggcatttacgccgaagaactgctggcattttggtttgccaacgcgccacacgccgaactgctcgcgcacaacctcacggtttccggttcggacggcaatacgcaaggcgcggcggattttgtggtaaggcttaacggcaagccctaccatatcgagctgacctgcaaatattacggcggcggcacgggcaggctcgaagacatgcgcggactcgaccccaaagacacgctgttgggaaaagccgccaaactgaccgcccaactcggtctgccgcacacttcagacggcatccgaaccttgcggcaacacggtctgccgcttgacgtaaaacccgtttccatcgtgcgcggcatcggattttttccacacggtttccatgcttttgagccaccgcttaatccatacggttggcgcggcatctatattcaagattgggcggaatacgggtttaaacgccaagaagtccgctaccatctgctcgaccgtatggcctacctcgcgcctgcgcgtgtcgccgaaaccgaaacattgaacgcaaccgaaatccgccgtatcgaccaaggcttgattgccgttttggaatgtcggccggacggcttttggcacgaaatcgaacgcattatgaaggccgtctga

SEQ ID NO: 36308 - DNA, 372 bp, Neisseria meningitidis
atgccaactatcaaccaattggtacgcaaaggccgtcaaaagcccgtgtacgtaaacaaagtgcccgcactggaagcctgcccgcaaaaacgcggcgtgtgcacccgtgtatacacgactacccctaaaaaacctaactctgcattgcgtaaagtatgtaaagtccgcctgaccaacggttttgaagtcatttcatacatcggcggcgaaggccacaacctgcaagagcacagtgtcgtattgattcgcggcggtcgtgtaaaagacttgccaggtgtgcgttaccacactgtacgcggttctttggatactgcaggcgttaaagaccgtaaacaagcccgttccaaatacggtgctaagcgtcctaaataa

SEQ ID NO: 36309 - DNA, 750 bp, Neisseria meningitidis
atggtattgcgcagggattttctgacttggtgtaatgaaacattgcagacagcgttgtttaaagattacgcccctaacggtttgcaggttgaagggagggaatatatcgggaaaatcgttacgtcagtaacggcaagcagggcagcgattgattttgctgtggagcagaaggcagatttgcttttggtacatcacggtatgttttggaaaaacgagttgccgaccgttactggttggaaaaaagaacggattgccgcactgttacggcacgacatcaatatggcaggctaccatctgcccctagatgcacatcccacactgggcaacaatgcccaactcgccgacagattgggttttgcgacagaaaaacggttcggcgaacaaaacctgctcaactcgggcagcctgaaacaagccaagacactcggcgcattggcggcgcatattgaaacagttttgcaacgtaagcctgtcgtcatcggcaaacccgaacgcgaaatccgacgggttgcatggtgcagcggcggggcgcaggggttttttcagacggcaatagacgaaggtgtcgatctgtatttgacgggggaaatctctgaagctcaataccaccttgccaatgaaacgggtacggctttcatttcggcagggcatcacgcgacggaacgttacggcgtacgcgcgctggcagaatcggcggcagaggttttcgggttggaagtgtgccattttgacgaaaacaatccggcttga

SEQ ID NO: 36310 - DNA, 753 bp, Neisseria meningitidis
atgattaccctgccttccttaaacaatctgccgtcaaaatgggatgaaatccgctattggctcgaaacccgggtttgtgagtgcggcgttatgccgcatcccaatttgacggaatgcgaagccgggcagttcgatcgggatttttgggacaatatcggctgcgcgcctgaagaatatgtccgtatccgccgagccatccgtctgttggaagcgcgttatcccgacagtttgaatgagctggtgtgtgccgccattgccacgcctttgggcgagatgctggcggtgttcggaaataagggattgtgtctgctggagtttgtcggacagaagcatttggaacaggaaattgccgccgtccaaaaagccttgcgcggacggtttgtgtttcgggaggatgagcggacgcaacttttgcggcaggaattggacttatacttcaagggtcgtctgaaaacctttgccacgcctttggagcagattggcaccgagtttcaaaagcaggcatgggacgcgctcttggcgattccttacggcgaaacgcgcagctacaaagagcaggcgcagcgtttgggcaaccccaacgccgtccgcgccgttgccgccgccaacgggcagaacaaggtgtctatcttgattccctgccaccgcgtcatcggcagcgacggcaaactgaccggctacgcgggcgggttgaaccgcaaacagtttttactggctttggaacgcggcgaagttcagacggcattgttttaa

SEQ ID NO: 36311 - DNA, 3249 bp, Neisseria meningitidis
atggctgccttcaaacctaatccaatcaactacatcctcggcctcgatatcggcatcgcatccgtcggctgggcgatggtagaaattgacgaagatgaaaacccaatctgcctgattgatttgggcgtgcgcgtatttgagcgtgccgaagtaccgaaaacaggcgactcccttgccatggcaaggcgtttggcgcgcagtgtccgccgcctgacccgccgtcgcgcccatcgcctgcttcgggcccgccgcctattgaaacgcgaaggcgtattacaagccgctgattttgacgaaaacggcttgatcaaatccttaccgaatacaccatggcaacttcgcgcagccgcattagaccgcaaactgacgcctttagagtggtcggcagtcttgttgcatttaatcaaacaccgtggctatttgtcgcaaagaaaaaacgagggcgaaactgccgacaaggagcttggcgctttgctcaaaggcgtagccgacaatgcccatgccttacagacaggcgatttccgcacaccggccgaattggctttaaataaatttgagaaagaaagcggccatatccgcaaccagcgcggcgattattcgcatacgttcagccgcaaagatttgcaggcggagctgaatttattgtttgaaaaacaaaaagaattcggcaatccgcatatttcagacggccttaaagaaggtattgaaaccctgctgatgacgcaacgccccgccctatccggcgatgctgttcaaaaaatgttgggacattgcaccttcgaaccggcagagccgaaagccgctaaaaacacctacacagccgaacgtttcatctggctgaccaagctgaacaacctgcgtattttagagcaaggcagcgagcggccattgaccgataccgaacgcaccacgcttatagatgagccatacagaaaatccaaactgacttacgcacaagcccgtaagcttttggagctagacaataccgcctttttcaaaggcttgcgctatggtaaagacaatgccgaagcctcaacgttgatggaaatgaaggcctaccatgccatcagccgtgcgctggaaaaagaaggattgaaagacaaaaaatccccattaaacctttctcccgaattacaagacgaaatcggcacggcattctccctgttcaaaaccgatgaggacattacaggccgtctgaaagaccgtgtacagcccgaaatcttagaagcgctgttaaaacacatcagcttcgacaagttcgttcaaatttccttgaaagcattgcgccgaattgtgcctctaatggaacaaggcaaacgttacgatgaagcctgcgccgaaatctacggagaccattacggcaagaagaatacggaagaaaagattgatctgccacccatccctgccgacgaaatccgcaaccccgttgttttgcgtgccttatctcaggccagaaaagtcattaacggcgtggttcggcgttacggctcccccgcacgtatccatattgaaacggcaagggaagtaggaaaatcgtttaaagaccgcaaagaaatcgaaaaacgccaagaagaaaaccgtaaagaccgtgaaaaagccgccaccaaattccgagagtatttccccaattttgtcggcgaacccaaatccaaagatattctgaaactgcgcctgtacgagcaacaacacggcaaatgcctgtattcgggcaaagaaatcaacttaggccgtctgaacgaaaaaggctatgtcgaaatcgaccatgccctgccgttctcgcgcacatgggacgacagtttcaacaataaagtgctggtattgggcagcgaaaaccaaaacaaaggcaatcaaaccccttacgaatacttcaacggcaaagacaacagccgcgaatggcaggaatttaaagcgcgtgtcgaaaccagccgtttcccacgcagtaaaaaacaacggattctgctgcaaaaattcgatgaagagggctttaaagaacgcaatctgaacgatacgcgctacgtcaaccgtttcctgtgccaattcgttgccgaccatatgctgctgacaggtaaagggaaaagacgtgtctttgcctcaaacggacaaattaccaatctgttgcgcggcttttggggattacgcaaagtgcgtgcggaaaacgaccgccatcacgccttggacgccgtcgtcgttgcctgctcgaccgttgccatgcagcagaaaattacccgttttgtacgctataaagagatgaacgcgtttgacggtaaaaccatagacaaagaaacaggagaagtgctgcatcaaaaaacacacttcccacaaccttgggaatttttcgcacaagaagtcatgattcgcgtcttcggcaaaccggacggcaaacccgaattcgaagaagccgataccccagaaaaactgcgcacgttgcttgccgaaaaattatcatctcgccccgaagccgtacacgaatacgttacgccactgtttgtttcacgcgcgcccaatcggaagatgagcgggcaagggcatatggagaccgtcaaatccgccaaacgactggacgaaggcgtcagcgtgttgcgcgtaccgttaacacagttaaaactgaaagacttggaaaaaatggtcaatcgggagcgcgaacctaagctatacgaagcactgaaagcacggctggaagcacataaagacgatcctgccaaagcctttgccgagccgttttacaaatacgataaagcaggcaaccgcacccaacaggtaaaagccgtacgcgtagagcaagtacagaaaaccggcgtatgggtgcgcaaccataacggtattgccgacaacgcaaccatggtgcgcgtagatgtgtttgagaaaggcgacaagtattatctggtaccgatttacagttggcaggtagcgaaagggattttgccggatagggctgttgtacaaggaaaagatgaagaagattggcaacttattgatgatagtttcaactttaaattctcattacaccctaatgatttagtcgaggttataacaaaaaaagctagaatgtttggttactttgccagctgccatcgaggcacaggtaatatcaatatacgcattcatgatcttgatcataaaattggcaaaaatggaatactggaaggtatcggcgtcaaaaccgccctttcattccaaaaataccaaattgacgaactgggcaaagaaatcagaccatgccgtctgaaaaaacgcccgcctgtccgttaa

SEQ ID NO: 36312 - DNA, 1902 bp, Neisseria meningitidis
atgactacgccaaaaaaaactgccaaaacttccggcaacgaagcacgcgagcttgccgacttgagcgaagacatcggcatccgcttcaaatatccgaactcggaacgcgtgtatctgcaaggcagccgcgacgacatccgcgtgcctttgcgcgaaatccgccaggacgacacctacacggcgcaaggcacggaagccaatccgccgattcccgtctatgacaccagcggcgtgtacggcgatccggcggcacacatcgatttaaaacaagggctgccccacatccgcacggcgtggctggacgaacgcggcgataccgaaatcctgcccaaactctccagcgaatacggcatcgaacgcgcgcacgacccgaaaaccgcccatctgcgtttcaaccaaatcacccgcccgcgccgcgccaaagccggacgcaacgtaacccaattacattatgcccggcaaggcattatcacgcccgaaatggagtttgtcgccatacgcgaacgtttaaaattagacgaattgtcccaaaaaccggaatacgccaagctcttgaaacaacacgcagggcaaagtttcggcgcgaatatcccgacccatcccgaccaaatcacgcctgaattcgtgcgccgagaaatcgccgccggacgcgcgattattcccgccaacatcaaccaccccgaactcgaaccgatgattatcggccgcaacttccgcgtcaaaatcaacggcaatttgggcaactccgccgtcacctccagcctgaccgaagaagtcgaaaaaatggtgtggtcgctgcgttggggcgcggacacgattatggatttgtccaccggcgcgcacatccatgaaacgcgcgaatggattatccgcaacgcgcccgtccccatcggcaccgtgccgatttaccaagcgttggaaaaaaccggcggcatcgccgaagatttgacttgggatttgttccgcgacaccctcatcgaacaggcggaacaaggcgtggactatttcaccatacacgcgggcgtgttgctgcgttatgtaccgatgaccgccaaccgcctcaccggcatcgtctcgcgcggcggttcgattatggcgaaatggtgtttggcacatcatcgggaaaacttcctctacacgcatttcgacgaaatctgcgaaattatgaaagcgtatgacgtatcgttcagcctcggcgacggcctgcgccccggctgcattgccgatgccaacgacgaatcccaattcgccgagctgcacaccttgggcgaattgacctccaaagcgtggaaacacgacgtacaggtgatgatcgaaggccccggccatgtaccgctgcaacgcgtcaaagaaaatatgaccgaagagttgcaacactgttttgaagcaccgttttacaccctcggcccgctcgttaccgacatcgcccccggctacgaccacatcacctcgggcataggcgctgccaatatcggctggtacggcacggcgatgctctgttacgttacccccaaagaacatttgggactgcccgacaaagaagacgtgcgtaccggcatcatcacctacaaactcgccgcccacgccgccgacctcgccaaaggctggccgggcgcacagttgcgcgacaacgccctgagcaaggcgcgtttcgagttccgctggcgcgaccagttccgcctaagcctcgaccccgaacgcgccgaaagcttccacgacgaaaccctgcccgccgaaggcgcgaaaatcgcccacttctgttcgatgtgcggccccaaattctgctcgatgaaaatcacgcaggaagtgcgcgactacgccgacaagcaaaaagcccaacggcagggcatggaggaaaaagcggtcgagttcgtcaaaaaaggcgcgaagatttacagttga

SEQ ID NO: 36313 - DNA, 570 bp, Neisseria meningitidis
atgttatttccgagaattatcgcagcatcagcgcaacgtaagttaagcgtttatttgaaaaaaggcggtttggtcgcttatccgaccgaatcttgttatggcttggggtgtcttccgacattagccaaagcactcggtaagttggcgcatttgaaaaaaagaccgcaacacaagggtatgattgtcatcgggaatcaatttgaacaattgcagcctttacttcaaatgccgtctgaaaatcttcaggatatgcttagaaaagaatggcctgcccctaaaacgttcctattatccgccaaatcctgtgtcttacctgagttgcgcgggaaacagcgcagcaagttggcggtcagggttcccgcccatgtaggtgcgcgccgcttgtgtcaggctttgcaaacgcctttggtctcgacttcgtgcaaccgcgcaggcaaacgcgcgtgtcggacggagagggaagtcagaaggcaattcggacgcgatgtgtggattgttggtgggagaatcggcaggcagaaatcgccgagtcagattattgacggggaaacaggtaaacgtttgcgttag

SEQ ID NO: 36314 - DNA, 1209 bp, Neisseria meningitidis
atgaccggcatcatacattcgctgcttgacaccgacctctacaaattcactatgctgcaagtggttctgcaccagtttccgcagacgcacagcctttacgaattccgctgccgcaacgcctcgaccgtctatccgcttgccgacatcaaggaagacttggaagccgaactcgacgcgctctgccggctgcgcttcacccacgacgaactcggctatctgcgctccctgcgtttcatcaaaagcgactttgtcgattatctcgaactcttccagctccaacgccgctttgtcgaaatcggcacagacgataaagaccgtctgaacatccgtatcgaaggtccgatgatacaggcgatgttttttgaaatcttcatcctcgccattgtcaacgaactttacttccgccggctggaaacccctgccgttatcgaagaaggtgaacgccggcttcaagccaaagccgcgcgcctcaaagaaatcgccgccgcacaaaaccccgacgatccgcccttcctgatttccgacttcggcacgcgccgccgctacaagctcgcgtggcaggaacacgtcatccgcaccctgctcgaagccgccccaagcatcgtgcgcggcaccagcaatgtctttctcgccaaaaaactcggcattacccccatcggcaccatggcgcacgaattcctccaagccttccaggccctcgacgtacgcctgcggaatttccaaaaggccgcgctcgaaagctgggtgcacgaataccggggcgatttgggcgttgccctgaccgacgttgtcggtatggatgccttcctgcgcgatttcgacctctatttcgccaaacttttcgacgggctgcgccacgacagcggcgacccttacgtttggggcgacaaagcctacgcccactatcaaaagctcaaaatcgacagccgcaccaaaatgctgaccttctccgacgggctggacatcgaacgctcttgggcattgcaccaatatttcaaagaccgcttcaaaaccggcttcggcatcggcaccaacctcaccaacgatatggggcatacgcccttgaatatcgtcttgaaactggtcgaatgcaacgggcagtccgtcgccaagctgtccgactctccgggcaaaaccatgaccaacaacagcaccttcctcgcctacctgcgccaagtgttcgacgtacccgaacccgaaacgccgtaa

SEQ ID NO: 36315 - DNA, 660 bp, Neisseria meningitidis
atggacacttggcacgatgcactcggcggcgaaaaacagcagccgtattttcaggaaattttaaatgcagtcaggcaggaacgtttgtcgggacaaatcatctatccgccggcggcggatgtgttcaacgcattccgcctgacagcgttcgaccgggtcaaagccgtcattctcggacaagatccgtatcacggggcagggcaggcgcacggtttggcattttccgtccggcagggtatccgcataccgccgtctttactcaatatctacaaggagttggaaaccgacatcgaaggcttttccattcccgcgcacggctgtctgacagcgtgggcggagcagggcgtattgcttctgaacacggttttgacggtgcgtgcaggacaggcgcattcgcacgcccttttaggctgggaacgctttaccgataccgtcatcaggcagcttgcggcgcaccgcaagcaccttgtcttcatgttgtggggtgggtatgcgcaacaaaaaaggaaactgatagacagtcaaaatcatttgatactgaccgcaccgcatccgtctcctctgtcggcatatcgcggttttttcggttgccgccatttttcacaggcaaacagctatttgagccggcacggtatcgatccgataaactggaagctgtga

SEQ ID NO: 36316 - DNA, 1248 bp, Neisseria meningitidis
atgttgaaacaaacgacacttttggcagcttgtaccgccgttgccgctctgttgggcggttgcgccacccaacagcctgctcctgtcattgcaggcaattcaggtatgcaggacgcgccgtcttcggcagtttacaacaacccctatggagcaacgccgtacagcccggctcctgccggcgatgcgccttatgtgccgccggtgcaaagcgcgccggtttatacgcctcctgcttatgttccgccgtctgcacctgccgtttcgggtacatacgttccttcttacgcacccgtcgacatcaacgcggcgacgcatactattgtgcgcggcgacacggtgtacaacatttccaaacgctaccatatctctcaagacgatttccgtgcgtggaacggcatgaccgacaatacgttgagcatcggtcagattgttaaagtcaaaccggcaggatatgccgcaccgaaagccgcagccgtaaaaagcaggcccgccgtaccggctgccgcgcaaccgctcgtacagtccgcacccgtcgacatcaacgcggcgacgcatactattgtgcgcggcgacacggtgtacaacatttccaaacgctaccatatctctcaagacgatttccgtgcgtggaacggcatgaccgacaatatgttgagcatcggtcagattgttaaagtcaaaccggcaggatatgccgcaccgaaaacctcagccgtagaaagcaggcccgccgtaccggctgccgtgcaaacccctgtgaaacccgccgcgcaaccgcctgtgcagtccgcgccgcaacctgccgcgcccgctgcggaaaataaagcggttcccgcgcccgccccgcaatctcctgccgcttcgccttccggaacgcgttcggtcggcggcattgtttggcagcgtccgacgcaaggtaaagtggttgccgatttcggcggcaacaacaagggtgtcgatattgcaggaaatgcgggacaacccgttttggcggcggctgacggcaaagtggtttatgccggttccggtttgaggggatacggaaacttggtcatcatccagcataattcttccttcctgaccgcatacgggcacaaccaaaaattactggtcggcgaaggtcagcaggtcaaacgcggtcagcaggttgccttgatgggcaataccgacgcttctagaacgcagcttcatttcgaggtgcggcaaaacggcaaaccagttaatccgaacagctatatcgcgttctga

SEQ ID NO: 36317 - DNA, 711 bp, Neisseria meningitidis
atgtctcctgttttgtatttgattcctacgcctttgggtacgcccgatacgccgtgcctgttgccgcatgaacaacgagcggttgtcgggctgacggattttgtcgtggaagcggaaaaaacggcgcgcgcgcatttgaaacatttgggcgtgacaatgcctatccgcgaactgaatttgcaaacgctgaacgaacacacggatttgaagactttgccggaattgctgaaacctttgcaagaagggcgcagtatgggcattgtcagcgaggcgggttgcccggctgtggctgatccgggtgcgaatttggtggcattggcgcataaacacggttttgaagtacggcctttggtcggtccgtccagcttgttgctggcgctgatggcttcgggtgcgaatgggcagaactttgcgtttaagggttatttgccgtctgaaaaaaatgagcggattcagagtttgaaggctttggaacaacgttcgcgccagcagaatgaaacgcagctgtttatcgaaacgccgtatcgcaacgatgtgttgttggcggatgcggtggaaaacctgcatcctgaaacgcgcttgtgcacggctacggatttgacgttgccgactcagtcggtggtcagtaaaacggttgcggattggcgcaggatgaaggaaatgcccaatctgaaaaaacgcccgacgatttttgtgatgtatgcaggttga

SEQ ID NO: 36318 - DNA, 474 bp, Neisseria meningitidis
atgaaccttgatttaaccgcgcaaaaagtccgtctttcttggaaggatattctgtgggggtatgggaataaatacttgggttgggctgatgtggcagcttatgcccgaaaaatgacgctttcagatcatgatgaacgtgtgttcaaactatctttaatcaacaaatccaatattcttgaattaaagcctgttctggaagatttggcttcggaaatgagggattattcccctaaaaattggctgtacgtcctcttaagcgatgtattccatagaaaagaagaatttgaggatcctttgggggaagttgaaaaaatttatgcagattttgattatccggaagaaatagaatcatttgtcaggtatatgccgcccaaagacggttatattccttctgcccacacctatgaagaaaatattgcccggttatattctcactgggaacactatttgaacaacggcggagggcagggttaa

SEQ ID NO: 36319 - DNA, 888 bp, Neisseria meningitidis
atgcagaaatccaaattatcttggttcttgaaactgatgttggcactgtcgctggcgtttctgtatatcccgctggttgttttggtcatctattcgtttaacgaatccaagctggtaaccgtttggggcggcttttcgaccaagtggtacggcgcattgctggaaaacgacaccatcttggaagccgcttggctgtcgctgcggattgccgttgtgtcttcgcttgccgccgtcgttttgggcatgctggcgggctatgcgatggcgcggattaaacgttttcgcggcagtaccttgttcgccggtatgatttccgcacctatggtgatgcccgacgtgattaccggtctgtctatgctgctgctgattattcaggtacagatatttttgcagggcagcgaatggttacaacatctctacttcgatcgtggctttttcactattttcttaggacatacgacgctgtgcatggcatacattaccgttgttatccgttcgcgtctggttgagcttgaccaatcgctcgaagaagccgcaatggatttgggcgcgcgtccgctgaaaatcttttttgtcatcactttgcctttgattgcccctgccatcgcttcaggctttctgctcggcattaccctgtctttggatgatttggtgattacctcattcctctccggccccggttcatccacattgccgcaggtgattttctccaaaatcaagctgggtcttgatccgcagatgaacgttttggcaaccatcctgatcggcatcatcggaacattggtcatcatcgtcaattattggatgatgaggcaggcaaccaagcgtgaccgagaagcggcagaagcctaccgccaagaaaaattggctgccgagaaagcaaattaa

SEQ ID NO: 36320 - DNA, 540 bp, Neisseria meningitidis
atgaacatcattgataccgccattcctgacgtaaaactgcttgagccccaagtcttcggcgacgcgcgcggcttttttatggaaaccttccgcgacgagtggtttaaaacccaagtctgcgaacgcaccttcgtgcaggaaaaccactccaaatccggcaaaggcgtattgcgcggcctgcactatcaaaccgaaaacacacaaggcaaactcgtacgcgtggttgtcggcgaagtattcgacgtggccgtcgatatgcgcgaaggttcgccgactttcggcaaatgggcgggcgcaaccctgtccgcgcaaaaccaatgccagctttggatacccgaaggcttcgcgcacgggttttgcgttttgggcgacgcggcggaagtcgtgtacaaatgcaccgactattacaagcctgaagccgaacaggttttaatatggaacgacccgacagtcggcataggctggccgttgcaaggcgagccgaacctgtcgcctaaagacttggccggcaaagtattggctgaagcggtcacgttttaa

SEQ ID NO: 36321 - DNA, 795 bp, Neisseria meningitidis
ttgaacgactttttgcaagatgaacagcgtggaatggtttatgtgtcgccgtgggtaaagtttcacgggaaaatgtattcatttcaaaatcagcgggaaatccatacactaatcggttcggcaaatctgacttgtttttgggataaagccgaacgaacttatgaaacgatggtgcatttggatgattatcaaatagcgtctaaattgcgggaagatattgctcaaactattaagcagcttggaattcctatcaacaaagcagataagccagtagagtttaaagaacacaatgttcatttagagcaatgtttaggtgttgagaaaataagtaaagaaagagtagaaaaactatttactcaaacttctcaatattattttgaattacctgttaaaactgaacctagaagcagtttaaatcgtttttttgcggaaggtagaaaaaatcaacggggcttttatttacctcgaccttggtatgaggcagagttgattgtttcaacaagatttttaactgcagagggttatccaaaggaaaaaaactttacagttattacagatgatggctggcagtttgaatgtaatacgacaggacaaaatggtaaaaatttcagttcaaaaggtgaccaaactatttttggaaaatgggtaaaaggacgtttggaagcaaccggctgtttaaaaacaggtgaacctgtaacagaagaaaccttacgccaatacggtaacgatcattttgagttccgttcaaccgacaatcctgatgtttggctgctctcatttaaggggaaaaattaa

SEQ ID NO: 36322 - DNA, 1077 bp, Neisseria meningitidis
atgaagccgtctatcttagaaaaactgcaacaactcggcgaccggttggaagaagttacccaccttttagggcaacccgaagccacggcagatatggacaactaccgcaagctcacgcgcgaacacgccgaactgacccccgtcgtcgaagtgttccaaaactatcggcttgcccaaagcgacttggcggatgccgaagaaatgttgtccgaccccgaaatgaaagactttgccgccgaagaaatcgaagcggcgaaagccaaaatcggcgcactcgataccgaattgcaaaaactgctgctgcccaaagatgccgacgacgacaaaaacatctttatcgaagtacgcgccggaacgggcggcgacgaagccgcgctgtttgctggcgatttgctgcgtatgtacagccgctacgccgaacgcaaccgctggcaggttgaaatcgtgtccgccaacgaaagcgagttgggcggctataaagaagttatcgcccgtattatcggcttaggcgcgtacagccgtttgaaatttgaatcgggcggacaccgcgtgcagcgcgtccccgccaccgaaagccaaggccgcatccacacctccgcctgcaccgttgccgtcatgcccgaagcggacgaactggaagacatcgagttgaaccccgtcgaccttcgcatcgacaccttccgcgcatccggcgcaggcggtcagcacatcaacaaaaccgattccgccgtccgcattacccacctgcccaccggcatggtggtcgaatgccaagacggccgcagccaacacgccaacaaagcgcaggcaatgaaagttctcgccgcccgcctgaacgacgcgcaaaaacgcgaagcccaagccaaagaagccgccgaacgcaaatccctcatcggcagcggcgaccgcagcgaacgcatccgcacctacaactatccccaaggcagggtaacagaccaccgcatcaacctcaccctgcacaagctggattttgtgatggacggcgatttggcagaaatcaccgatgccctgattgccgaacatcaggcggagcttttggcggcaatgggcgattga

SEQ ID NO: 36323 - DNA, 801 bp, Neisseria meningitidis
atgagcccatccccctttatcgaaatgaaagacgtcgccttcgcgtatggcgaccgcccgattctgaagaacatcaatttcagcattccgcaaggcaattttgctgccgtaatgggcggttcgggcagcggcaaaaccacgctgatgcgactgattacaggacagattcgtccgcagtccgggcaggttttgattgaaggacgggatttggcgggcttttcggctgacgagttgtatgaacaccgccgccgtatgggcgtattgttccaacacggcgcgctgtttactgatttgtcggtattcgacaatatcgcttttccgatgcgcgaactgacgcgcctgccggaagcggtgattcgggatttggttttgttgaaattgaacgcggtcggtctgcgcggtgtggaaaacctgatgccgtccgagttgtccggcgggatgtcgcgccgcgtcgcgcttgcccgcacgattgcgctcgaccctgaaattatgttgtacgacgaaccgtttaccggcctcgatccgatttccttgggcgtgattgcccacttgatcagccgcgtcaataaggctttgcgttcgaccagcgttatggtaacgcacgacattgaaaaatctttggaaatcgtcgatcaggtgatttttttggcgcacggcgaaattatgttctccggctcgccgcaggaaatgcgcgaactggattcgccttgggtgcgccagtttgtcggcgggctggcagacggccccgtggcataccgctatccggcgcaaacctcattgcatcaggatttgctcgggtaa

SEQ ID NO: 36324 - DNA, 1284 bp, Neisseria meningitidis
atgtccaaatcaatcaaactcaacgtaccgggtcaggcaggtttggagctgccggtattggaagccagcatcgggcacgatgtggttgacattcgggggctgacaaaaaatacaggtttgttttccttcgaccccggatttgtttcaaccgcaagctgtgagtctaaaattacttacatcgacggcgatcaaggcttgctttattatcgcggataccccatcgagcagctggccgaaaagtccgattatttggaagtctgctacctgttgatttacggcgaactgccgactcccgagcaaaaggcagaatttgacaataccgtccgccgccacacgatggtgcatgaacagctgacttggttcttccgggggttccgccgcgacgcgcatccgatggcgatgatggtcggcgtggtcggtgcgctgtctgcgttctaccaagacagcttggacattagcaatcccgaacaccgcaaaatcgcgatttaccgcctgatttccaaaatcccgaccattgcggcaatgtgctaccgctattcaaacggtctgccgttcaattatccgaagaataatctttcttattccgaaaacttccttcatatgatgttcgccacgccgtgtgaagactacaaacccaatcccgttttggcacgcgcgctcgaccgcatctttattttgcatgccgaccacgagcaaaacgcctcaacttcaaccgtccgtctggcagggtcttcgggtgcgaacccgtttgcctgtattgctgccggtatcgcctgcctgtggggtgcttcgcacggcggtgcgaacgaagccgtgttgaaaatgttggacgaaatcggcgatgtgtctaatgttgccgcatacatggaaggtgtgaaacaacgcaaataccgtctgatgggcttcggtcaccgcgtgtaccgcaatatggatccgcgtgccagcattatgcgcgaaacctgctatgaagttttgaaggaattgggcttggaagacagtccgaaattcaaactggcgatggaattggaacagattgcgctgaaagacccgttctttatcgaacgcaaactgtatccaaacgtcgatttctattccggcatcgtcctgtccgcgctgggcatcccgaccgaaatgtttaccgtcatcttcgccctgtcgcgcagcgtgggctggatttcgcactggcacgagatgattagcgatccttcgctgaaaatcggccgcccgcgccagctttataccggttcggaacgccgcgattatgtgccgccaggcgagaggtaa

SEQ ID NO: 36325 - DNA, 204 bp, Neisseria meningitidis
atggatgtgcaaaaacaatatccctttgaaaccgtcgccgtatgcgtgctgccgaaccacattcacgccatttggacgctgccacccgacgatgcggattattccctactccggcggctgattaaaaccaaattctccgcatattcccctcatgctaaaaacttatccgccggcaaacagcggcggcacgaacacggtatttga

SEQ ID NO: 36326 - DNA, 861 bp, Neisseria meningitidis
atgtctgatttgtctgtattgtcgccgtttgccgtgcctttgacagcggtgttcgggctgctggtcggaagtttcttaaatgtcgtcatttaccgcgtgccggtcatgatggaacgcggctggacggtatttgccaaagaatatttaaacctgccgctgaccgaagaggaaagccgtaccttcaacctgatgaaaccggattcctgctgtcccaaatgccgcgtgccgatacgcgcgtggcagaacatcccgattgtcagctacctgctcctgcgcggcaaatgcgcctcctgccaaaccaaaatcagcatacgctatcccttaatcgaactgctgaccggcgtattgttcgggctggttgcctggcaatacggctggtcttggattacattgggcggtttgatactgaccgcgtttctgatttccctgacctttatcgatgcggacacccaatacctgcccgactcgatgacattacccttgatttggctggggctgatatttaatttggacggcggcttcgtgcctttgcagtctgccgttttaggtgcggttgccggctatggttcgatatggcttttatgcgcggtatataaactgattaaaggcgaaatcggtatgggcaacggagatttcaaactgattgccgcattgggcgcgtggctcggcatatccgcattgcccgtgctgatttttgtttcctcgctgatcggtttggtcgcggcaatcgttatgcgcgtcgccaaggggcagcattttgccttcggccccgcactgacagtttcgggctggataatttttacggcaaacgattccgtatggcgggcggtcaactggtggctgacccatccggtgctgtaa

SEQ ID NO: 36327 - DNA, 333 bp, Neisseria meningitidis
atgcagattttatcttttcagccggacattgcggaacgtatgctggaaggtacggaaggcgagtcggtcaacgaaaacgcacaattcgtccgtacggacaacggctattggattgcgtggcatgaaggcgtagcggcactgcttgcgcccgatacgccgccgggcattccctgtttttgggtggaaggcgcggaaagccttgaagagttgtgcgtcatggtggaacgcggcgagtttgacgaagtggaagagtttgacggcgatgacgacgaatggctcgaaacggcacagggttgcgggcaccacggcgaagcttgcgcctgcggacattaa

SEQ ID NO: 36328 - DNA, 324 bp, Neisseria meningitidis
atgtttttagatgatgtaaatgtttttttagatgatttaaatactaatccaatcactgacgaatggtatatgtccaattttgccgataaacatattaaaattttggaaagttacgaagcctttgatattctaaaacaatttgttgattacatgattgaagaatatgatgaaaaatcagaatatgaaatcatggaaatattgagacaattaaaatatcaagcagataccaacgaaaaattttatacaaatacacagaaacagaaaattgtagaattatataaacaagaaattagtcaggatattttaaatgaaatctttagataa

SEQ ID NO: 36329 - DNA, 2793 bp, Neisseria meningitidis
atgtccaacagacctacactcctcctcgttgacggctcgtcctacctctaccgtgcgtatcacgcgatggggcaaaacctgaccgcccccgacggcgcgccgacgggtgcgctgtatggcgtattgaatatgttgcgccgtttgcggtcggaatatccgcacgattattgcgcggtggtttttgatgcgaaaggcaaaaatttccgccatcaaatgtttgaagaatacaaggcgacgcgcccgccgatgcccgacgatttgcgcccgcaggcggaagcactgccggatttagtgcgcctgacgggctggccggtattggtgattgggcaagtggaggcggacgatgtgatcggcacgctggcgaaacagggggcggaacatggtttgcgagtcattgtttcgaccggcgataaggacatggcgcagttggtggatgagcgcgttacgctggtgaacacgatgagcggagaaacgctggatattgaaggcgtgaaggcaaaattcggcgtgcgccccgaccaaatccgcgattatctcgcgctgatgggcgacaaggtggacaacgtgccgggcgtggaaaaatgcggcccgaaaacggcggtgaagtggctggaagcctacggctcattgcaaggcgtgatagaacacgcttcggaaatcaagggcaaagtgggcgaaaacctgcaagccgcgctgccccaactgccgctgtcgtatgatttggtcacgattaaaaccgatgtggacttgcacgccgagctttcagacggcatcgaaagcctgcgccgtaccacgccgaaatgggcgcaactggttgtcgattttaaacgctggggcttccgcacgtggctgaaagaagcggaatcaaacatgaataccggctcgaccgatgatttgttcggcagcgacagcatcggcgagcaggcggctttgaatgcggaaatgccgtttgaaaaacaagccgaaaaagccatcgcccccgaaaaactggattatcaagccgttaccaccgaagcgcagtttgccgctttgttggacaaactgtcgcgggcggacacaatcggcatcgatacggaaaccacgtcattagatgcgatgaatgcctcgctggtcggcatcagcatcgccttccaagcaggcgaagcggtttacatccccgtaggccacagcctgaccgccgcgcctgaacagcttgatttgcaagacgtattaggccgtctgaaaccgcatttggaaaaccccaccctgaaaaaaatcgggcaaaacctcaaatacgaccaacatgtttttgccaactacgacatcgccctgaacggcattgccggcgacgccatgctcgcttcctacatcatcgagagccatctcggacacggtttggacgaattgtccgaacgctggctgggcttggaaaccattacctacgaatcgctgtgcggcaaaggcgcgaagcaaatcggttttgccgacgtcgctatcgggcaggcgaccgaatacgccgcccaagacgccgatttcgccctgcgcctcgaagcgcatctgcgcgcgcaaatggacgaaaaacagcttgaaatgtatgaaaaaatggagctgcccgtcgcgcaggtattgtttgaaatggaacgcaacggcgtgcaaatcgaccgcgccgaactcgcccgccaaagcgcggaactcggcgccgagctgatgaagctcgaacaacaagcctatgccgccgcaggccagccgttcaacctcaattcgcccaaacagctgcaagaaatcctgttcgacaaaatgggcatccccaccaaaggcctgaaaaaaaccgccaaaggcggcatttccaccaacgaagccgtgctcgaacagctcgcgcccgactaccccctgcctaaaatcatcctgcaaaaccgcagcctggcgaagctcaaatccacctacaccgacaaactacccgaaatgatttcccccaaggacggccgcgtgcataccacctacgcccaagccgtcgccattacaggacgcttggcaagcaacaaccccaacctgcaaaacatccccatccgcaccgccgaaggccgacgcgtgcgccgcgccttcaccgcaccgcaaggcagcgtcatcgtttccgccgactattcccaaatcgagctgcgcatcatggcgcacctctccggcgataaaaccctcattgccgcgttccaaaacggcgaagacgtacaccgccgcaccgccgccgaagtgttcggcatcgcccccgaaaacgtctcgtccgaacaacgccgctacgccaaaaccatcaacttcggcctgatttacggcatgggccaatacggccttgccaaatcattgggcatcgacaacatctccgctaaaaactttatcgaccgctacttcgcccgctaccccggcgtcgccgaatacatgcagcgcaccaaagaacaagccgccgcccaaggctacgtcgaaaccctgttcggcagaaggctctatttgcccgacatccgcaacaaaaacgccaacgcccgcgcaggagccgaacgcgccgccatcaacgctcccatgcaaggcaccgcgtccgacctcatcaaacgcgccatgatagacgtgcgaaactggctttcagacggcatcggcagcaaactggtcatgcaggtgcatgacgaactggtgctggaagtcgttgaaaccgaactggattttgtcaaagaaaaactgccgcagattatggcgaaagtggacggcggattattggatgtaccgctggtggctgaggttggcgtaggggagaattgggaagaggcacattga

SEQ ID NO: 36330 - DNA, 411 bp, Neisseria meningitidis
ttggctatggccgaagggcaggatgtcgatttggtagagatttccccaactgctaaaccgcctgtgtgcaaactgatggattacggtaaatacaaataccagcaggccaagaaacgcgacgaagccaagaaaaaccaaaagcaggtgcaaatcaaggaaatcaaattccgtccgggtacggatgagggcgattatcaaatcaagatgcgcaacattaaccgcttccttgccgacggcgataaagtcaaagtgacattgcgtttccgcggccgtgaaatggctcaccagcaactcggcgcgcaacttttggaacgtgtaaaagaagatttggctgaagtggcgcaaatcgagtcctttcccaaaatggaaggtcgccaaatggtgatgatgattgcgccgaagaaaaaataa

SEQ ID NO: 36331 - DNA, 810 bp, Neisseria meningitidis
atgaccgccctcccccgttactccgttttcggcaaccccgttgcacacagtaaatcgccgcaaatccatcagcaatttgcccttcaggaaggcgttgacattgaatacgaacgcatttgcgccgacatcggcggtttcgcgcaggcggtttcgacattttttggaacaggcggttgcggggcaaacgttaccgtaccgttcaaacaggaagcgtttcatctggcggacgagcattccgaccgcgctttggcagcaggtgcggtcaatacgctgattctgttgaaaaacggcaagctgcgtggcgacaataccgacggtatcggtttggccaacgacatcacgcaggtcaaaaacattgccatcgagggcaaaaccattttgcttttgggcgcaggcggcgcggtgcgcggcgtgattccggttttgaaagaacaccgccctgcccgtatcgtcattgccaaccgtacccgcgccaaagccgaggaattggcgcagcttttcggcattgaagccgtcccgatggcggatgtgaacggcggttttgatatcatcatcaacggcacgtccggcggtctaaacggtcagattcccgatattccgcccgatatttttcaaaactgcgcgcttgcctacgatatggtgtacggctgcgcggcaaaaccgtttttagattttgcacgacaatcgggtgcgaaaaaaactgccgacggactgggtatgctagtcggtcaagcggcggcttcctacgccctctggcgcggatttacgcccgatatccgccctgttatcgaatacatgaaagccatgtaa

SEQ ID NO: 36332 - DNA, 2580 bp, Neisseria meningitidis
atgcgatacgacaaattaaccgccaaattccaacaggcccttgcagaagctcagagtttggcgttggctgcggacggcagctatctggaagcgggctttgtgctgaaagccctgcttgacgaccaaaacagcggtgctgccgcgctcttggctcatgcgggcgtgaacgtgccgcaggtgaaacagcgtttgcagcagcatttgaacagcctgccgaaagtgtccggccagggcggcgacattctgcccagccgcgaattgcaggcggtgttgaacctgatggacaaagccgcaaccaaacgcggcgatgcctatatcgccagtgaacttttcctgcttgccttggtgcagcagaacgatgcggccggcaaaattttgaaagaagccggcgcgaccgaacaaaacatcaatgccgcgattgacacggtacgaggaggacaaaacgtgaacgatgccaatgccgaagaccaacgcgatgctttgaaaaaatatacgctcgatctgacccaacgcgcccgagacggtaagctcgaccccgttatcggccgtgacgacgaaatccgccgtgcgattcaggtattgcaacgccgtaccaaaaacaaccctgtgctgattggcgaaccgggcgtgggtaaaaccgccatcgtcgaaggtttggcacaacgcatcgtcaacggcgaagtacccgaatccctgcgcaacaaacgcctactggttttggacttggcggcattgattgccggcgcgaaataccgcggcgaatttgaagaacgcttgaaaggcgtgttgaacgacttggcgaaagacgacggcaacactctgattttcatcgacgaaatccatactttggtcggcgcaggcaaaaccgacggtgcgatggatgcgggcaatatgctgaaaccggctttggcacgtggcgaattgcactgtatcggcgcgaccaccttggacgaataccgccaatacatcgaaaaagacgcggcactcgaacgccgcttccaaaaagtattggtcggcgagccaagtgtagaagacaccatcgctatcttgcgcggtttacaggagcgttatgaaatccaccacggtatcgatattaccgaccctgctatcgttgccgcagcggagttgagcgaccgctacattaccgaccgcttcctgcctgataaagcgattgatttgattgacgaagccgccagccgtgtcaagatggaaaaagaaaccaagccggaagcaatggacaaaatcgaccgccgtctaattcagcttcggatggaaaaggcgcacgttgaaaaagaaaaagacgatgccagcaaaaaacgtttggaactgatagacgaggaaatcaacggtctgcaaaaagaatacgccgatttagacgaaatctggaaagccgaaaaagcaatttcagacggtgctgctaatattaagaaacaaattgacgaagtcaaaattaaaatcgaacaggcaaaacggcaaggcgatttggcactggcttcaaaattgatgtatgaagatttggagcatttggaaaaacagcgtgcagccgccgaacgggcagatacggacagcacaaaaccggcaaacaaactcttgcgtaataatgtcggcgcagaggaaatcgcagaagtggtttcccgtatgaccggcattcctgtgtcaaaaatgatggaaggcgaacgcgacaagttgctgaaaatggaagaagtgttgcaccgccgcgtagtcggtcaagacgaagccgtgcgtgccgtgtccgacgccatccgccgcagccgctccggtcttgccgacccgaataaaccttacggcagcttcctgttcttgggcccgaccggcgtgggtaaaaccgagttgtgcaaagcattggcaggcttcctgtttgacagtgaagatcatctgattcgtatcgatatgtccgaatatatggaaaaacacgccgttgcccgcctcatcggcgcgcctccaggctatgtcggctacgaagaaggcggctacctgaccgaacaagtccgccgcaaaccgtacagcgtaattcttttggacgaagtggaaaaagcccatcccgatgtgttcaacatcctgctgcaagtattggatgacggccgcttgaccgacggacaaggcaggacggtagattttaaaaataccgtgattgtgatgacttccaacatcggcagccagcacatccaacaaatgggtactcaagactacgaagcggtgaaagaagttgtgatggaggatgtgaaagaacatttccgtcctgaaatgatcaaccgcatcgacgaagtggtcgtgttccacggactggatcaggcaaacatccgcagtattgccaaaatccagcttaaaggtttggaaaaacgtttggaaaaacaaaacctccgcctgactgtttccgatgccgctctggacatcatcgccaaagccggtttcgacccgatttacggcgcacgtccgctcaaacgcgccatccagtcggaaatcgaaaacccgctggcaaaagctctgcttgccggaaactatgcgcccgaaagcgaaatcagggtagaagccaacggcgacagactgaaatttgcctga

SEQ ID NO: 36333 - DNA, 999 bp, Neisseria meningitidis
atgtccgaaaacaaacaaaacgaagtcctgagcggttacgaacaactcaaacggcgcaaccgccgccgcctcgtaacggcaagttgcctggttgccgcctcctgcatcctgctggcagccgccctcagttccggccctgccgaacagactgccggcgaaacaagcggcgtagaaaacaaagcggcaggtgcggcacaaacccctgccttgaaatccgccgccgacaaaccgcaggacttggcaggcgaagacaagccttctgccgccgacagcgaaatcagcgagcctgaaaacgtaggcgcgccgctggtgctgattaacgaccgcctcgaagacagcaacatcaaaggtttggaagcatccgagaaactgcaacaggcagaaaccgccaaaaccgcaccgaagcaggcaaaacaacgcgctgccgaaaaagtgccggcaactgccgacagtacggatacggtagcggttgaaaaaccgaaacgcactgccgaaacaaaaccgcaaaaagcggaacgcactgccaaagccaagcccaaagccaaagaaaccaaaaccgccgaaaaagttgccgacaaaccgaaaactgccgccgaaaaaaccaaaccggatacggcaaaatccgacagcgcggtaaaagaagcgaaaaaagccgacaaggctgaaagcaaaaaaacagccgaaaaagaccgttcggacggcaaaaaacacgaaacggcacaaaaaaccgacaaagcggacaagaccaaaaccgccgagaaggaaaaatccggtaaaaaagccgccattcaggcaggttatgccgaaaaagaacgcgccttaagcctccagcgcaaaatgaaggcggcgggtatcgattcgaccatcaccgaaattatgaccgacaacggcaaagtttaccgcgtcaaatcaagcaactataaaaacgcaagggatgccgaacgcgatttgaacaaattgcgcgtacacggtatcgccggtcaggtaacgaatgaatag

SEQ ID NO: 36334 - DNA, 498 bp, Neisseria meningitidis
atgactgcgcttacccttccggaagacatccgccaacaagaaccatccgttctgctctataccctcgtttccgcctacctcgaacacaccgcccaaaccggcgacgaatccctctcctgcctgtccgacgaccagcacacgctgaccgcattctgctacctcgacagccaagtcgaagaaggtggcttcgtgcaactcatcgcatccggttacggcgaatatattttccgcaacccgcttgccgacagtctccgccgctggaaaatcaaaattacgcccaaaatcatcgacaaagccaaaagcctctacgaaaaacacggcgaaaccatcgaaacgctcgccgacggaggcgcagacatcgaatccctgcgcaaacagttccccgactttgaagaatgggacggcgcatactacgaagccgccgaacaagacctgcccctgcttgcagaacacatacagtcaaactgggaaaccttcgcccatatcgggcaggcgtga

SEQ ID NO: 36335 - DNA, 1218 bp, Neisseria meningitidis
atgaaaacggtagtctggattgtcgtcctgtttgccgccgccgtcgggctggcattggcttcgggcatttacaccggcgacgtgtatatcgtactcggacagaccatgctcagaatcaacctgcacgcctttgtgttaggttcgctgattgccgtcgtggtgtggtatttcctgtttaaattcattatcggcgtattcaatatccccgaaaagatgcagcgtttcggttcggcgcgtaaaggccgcaaggccgcgcttgccttgaacaaggcgggtttggcgtattttgaagggcgttttgaaaaggcggaactagaagcctcacgcgtgttggtcaacaaagaggccggagacaaccggactttggcattgatgttgggcgcacatgccgccgggcagatggaaaacatcgagctgcgcgaccgttatcttgcggaaatcgccaaactgccggaaaagcagcagctttcccgttatcttttgttggcggaatcggcgttgaaccggcgcgattacgaagcggcggaagccaatcttcatgcggcggcgaagatgaatgccaaccttacgcgcctcgtgcgtctgcaacttcgttacgctttcgacaggggcgacgcgttgcaggttctggcaaaaaccgaaaaactttccaaggcgggcgcgttgggcaaatcggaaatggaacggtatcaaaattgggcataccgccgccagctggcggatgctgccgatgccgccgctttgaaaacctgcctgaagcggattcccgacagcctcaaaaacggggaattgagcgtatcggttgcggaaaagtacgaacgtttgggactgtatgccgatgcggtcaaatgggtcaaacagcattatccgcacaaccgccgccccgagcttttggaagcctttgtcgaaagcgtgcgctttttgggcgaacgcgaacagcagaaagccatcgattttgccgatgcttggctgaaagaacagcccgataacgcgcttctgctgatgtatctcggtcggctcgcctacggccgcaaactttggggcaaggcaaaaggctaccttgaagcgagcattgcattaaagccgagtatttccgcgcgtttggttctggcaaaggtttttgacgaaaccggagaaccgcagaaggcggaggcgcagcgcaacttggttttggcaagcgttgccgaggaaaaccgaccttccgccgaaacccattga

SEQ ID NO: 36336 - DNA, 1152 bp, Neisseria meningitidis
ttggaacaggatatgagtcaaaatgcctcggtgggcattgtaacgccccaaaaaattccgtttgaggtgccactggttttggaaaacggtaaaactttgccgcgtttcgatctgatgattgaaacctacggcgagctgaatgctgaaaaaaacaatgcggttttaatctgccacgcgctgtcgggcaaccatcatgttgcgggcaaacattcggcggaggataaatatacgggctggtgggacaatatggtcggtcccggaaaaccgattgatacggaacgttttttcgtggtcggtttgaataatctgggcggctgcgacggcagcagcgggcctttgtcgatcaatcctgaaacgggtagggaatacggcgcggattttccgctggttacggtgaaggactgggtaaaatcccaagccgcgcttgccgattatctcagcatcgggcaatgggcggcggttgtcggcggcagcttgggcggcatgcaggctttgcagtgggcgatttcctatcccgaacgcgtgcgccacgccttggtgattgcgtccgcgccgaaactgtccacgcaaaatatcgcgttcaacgatgtggcgcgtcaggcgattttgaccgatcccgatttcaacgaaggacattaccgcagccgcaacaccgttcccgctcggggcttgcggattgcccgcatgatggggcacatcacctatcttgccgaagacggtttgggcaaaaaattcggacgcgatttgcgttccaacggctatcaatacggctatggcgttgaatttgaagtagaatcctatctgcgctatcaaggcgacaaattcgtcgggcggtttgatgccaacacctatttgctgatgaccaaggctttggactatttcgatccggcggcagatttcggcgacagcctgacccgcgccctgcaaaatgtgaaagcgaaattctttgtcgccagcttcagcaccgactggcgtttcgcacccgaacgttcgcacgaactggtcaaggcactgattgccgcccaaaaatccgtgcagtatatcgaagttaaatccgcacacgggcacgatgcctttttaatggaagacgaagcctatatgcgtgcggtcgccgcctatatgaacaacgtttataagggatgtcagcaatga

SEQ ID NO: 36337 - DNA, 2157 bp, Neisseria meningitidis
atgcctgtccctcaacccaccgcaccttacgaccctctgaccgccgaagcgcgtaccctgcttttccatacagcctcctacctcaagcccgaggaacaggcggagcttgaaaaagccgtcgcctatgcgtttcgcgcccacgacggacaaacccggaaaagtggcgaaccatacattacgcatccaattgccgttgcgacgcagctcgccctttggcatatggacatacagggtctgtgtgcaggcgtgatgcacgacgtattggaagatacgggcgtgacaaaaggggaaatggcggaggtgttcggcaatacgattgccgagatggtggacggtctgtccaaactcgaaaaactcaaatttgaagatcatgcggaacatcaggcggagagtttccgcaaactgattttggcaatgaccaaagatgtgcgcgtgattgtcgttaaacttgccgaccgtctgcataatatgcggacactcggttcgatgcgcccggacaaacgccgccgtattgcaagggaaacccttgaaatctacgcacagattgccaaccgtataggtttgaataacgcatatcaagagcttcaggatttatcgttccaaaacctgcatcccaaccgctacgagactttaaaaaaagcgatggacaagagccggaagaaccggcaggacgttgtcggcaaagtcttgcgcgcattcggccagcggctggtaggcgcgaatatagaggccaaaatcaaaggcagggaaaaaaacctgtacggcatccatcagaaaatgatggcgaaaaagctgcgctttgccgaggttatggatatttacggtttccgcgtcattgtcaacagcattccagcctgttatgccgcactcggcgcattgcacaccctctatcagcccaagcccgggcggttcaaagactatatcgccattccgaaaagcaatgggtatcaaagtctgcatacgactttggtcggcccttacggcttgccgattgaagttcagatacgtaccaaggaaatggatgctgttgccgaaggtggaatcgccggacattggagctataaatcatattctaagacggtcgatcaggcggtgcttcacacaaaccggtggctgaaaaatatcttagatttgcaggcaagcagtgccaatgctattgagtttctcgaacacgtcaaagtcgatttgtttccgaacgaaatctacatccttacgccaaaaggaaaaatcctaactttgcccaaaggggcaacgcctgtcgattttgcttatgcggtgcataccgatatcgggcacaaaaccgttgccgcacgtatcaacaatatcatgatgccgttgcgtacgaagctcaaaaccggcgattccgtcgaaattattacatccgaacacgccaaacccaatcccgcgtggttgaatttcgccgtgtccggcagggcgcgcagtgccatacgccaatatattaaaaaccttaaccggcacgatgcggtcgttttgggagagagcctcttacaaaaagccctgtccagtttgctgcccaaagatgtcctgctttcagacggcatcaaagaaaaataccttgccgatctcaacgacaaacagacttcatttgaggaagtgctgtacaacgtcggtatggggcataccctgcctgtttatgtcgccatgcatattgctgagttggcaggggagcatttcggcagcgaggttaggctcagttccattaaagtcgatggtcaggaaagcgggcatattcattttgcagagtgctgccaccctgttcccggcgattccatccgtttgctgttggttaagggaaaaggcatgattatccatagggatagctgcccgacgttgttgaagtccgatcccgaacagcagctggatgcagactgggaaaatatgaacgggcagaactaccgtgtcgggcttcaagtccaatcggaagacagccacggcttgctggcattaatggcgcaagcgatttccgattccggtgcggacattgagtcggtcgaaacaccgtctaaatcccagtcgggaacggaaggttttgtcgaattcaaattcttattgaaagtcaagaatctgaatcaattgaatcagattattcaaaatctgcatagtattccatatatccgcaaagtcatcagaagttga

SEQ ID NO: 36338 - DNA, 420 bp, Neisseria meningitidis
atgtataaaataaaatgtttttatgatcagtttagttctggtgaattatttaactactgccagtttttagataattcttctaatcaaaagataaatacacgaggaacggtgtatcaatatattatttatgttttaacaggagacctttatctacaaaaagacatagatgaaaatttagaatttatccatcaagcagaaaataatcccaatgaagtttattcaggaggtggacaaggtttttgctgggatatttctgctgaaaaagtagttttctatcacaacgaatttgatgaagaagacggctggcctgatttaagctgttcgctgcatacttttaaaactgctttaattgcttggaatgcttttttgcaattgcctaaaagtattcattcggtggtggagactgtgattgaggaataa

SEQ ID NO: 36339 - DNA, 282 bp, Neisseria meningitidis
atgcagtacgtccgcgacaacgaaattatgctcaacatcggcgcgaccgccacgcaaaaccttcaaatcgacaacgattggatcagcttttccgcccgcttcggcggacaggcgcacgacatatggatacctgtcggacacgtcctcagccttttcgcacgggagaccggcgaaggtatggggtttgaattggaagcgtatcgccccgacacgccgcctgaaaacacctctgccgaaaccgcgccccggcccgccaaaaaaggcttgaaattggtcaaataa

SEQ ID NO: 36340 - DNA, 858 bp, Neisseria meningitidis
atggcacgacacgtttggcaggcaggacggtttgaaatcggtttggacaaaccgaaaatcatgggtatcgtgaatctcacgcccgattctttttccgacggcggagcgtattcgcaaaacgcccaaacagctttggcgcatgccgaacggcttttgaaagagggtgcggacattctcgacatcggcggcgaatcgacgcggctgggtgcggattatgtttcgcctgaagaagaatgggcgcgggttgagcctgtattggcagaagtggcggggtggggcgttcccgttagtttggacacgcgccgcacggtggttatggaaaaagcgttggcactcggcggcatcgatattattaacgatgtggcggcgttgaccgacgaaggcgcggtcgaattgctggcgcgtcaggcggacacgggcatttgcctgatgcacatgcagggtttgcccaaaaccatgcagattaatccgaaatatcaagatgttgtcggtgaagtagcgcggtatttgaaagcgcgctcagcggaatgtatcgcggcaggcatcgcaccgcaacgcatcatactcgaccccggcttcggctccggcttcggcaaaaccttgcaacacaatatcgcgctgatgcggcatttacccgaattgatggcggaaacaggttttccgctgctcatcggcgtatcgcgcaaaagcacgataggcgagctgaccggcgaggcaaatgcggcggaacgcgtacacggcagcgtggcggcagcgttggcttccgtagcgcgcggcgcacaaatcgtgcgcgtgcatgatgtgaaggcaacggcggatgctttgaaggtgtgggaagcgttgggcatcaatctgtaa

SEQ ID NO: 36341 - DNA, 1218 bp, Neisseria meningitidis
atggagattattttaggtatcgtgatgtttaccgtcatcgttttggttttggcactgatgattctgtttgccaaatccaaactggtcagcgaaggcgacatcaccatcaaagtcaacggcgaaaaagagctgacgatgcccgccggcggcaaactcttgggcgcgcttgccaacgaaggcatctttatcccctccgcctgcggcgggggcggttcgtgcggacaatgccgcgtcgtcgtaaaaagcggcggcggcgacatcctgccgaccgagctgtcccacatcagcaaacgcgaagcacgcgaaggctgccgtctgtcgtgccaagtcaacgtcaaaaccgacatggacatcgaagtccccgaagaagtgttcggcgtgaaaaaatgggaatgcaccgtcatctccaacgataacaaagccacgttcattaaagaactcaagcttgccattcccgaaggcgaagaagtccccttccgcgccggcggctacattcaaattgaagccccgccgcacaccgttgcctacaaagacttcgacattcccgaggaataccacgaagactgggacaaatacaatttgtggcaatacgtttccaaagtggacgagccgattttgcgtgcctactctatggcttcgtatcctgaagaaaaaggcatcattatgctgaacgtgcgtatcgccacgccgcccccgcgcgtacctgatgcgcctccgggacaaatgtcgtcctacatctggtcgctcaaacccggcgacaaagttacgatttccggcccgttcggcgaatttttcgccaaagacaccgatgccgaaatggtatttatcggcggcggtgcgggtatggctccgatgcgttcccacattttcgaccagttgaaacgtttgaactccaaacgtaagattaccttctggtacggcgcacgttccaaacgcgaaatgttctatgtcgaagacttcgaccaactcgcagcagaattcccgaacttcacatggcacgtcgccctgtccgacccattgcctgaagacaactgggacggctacacaggcttcattcacaacgtggtttacgaaaaccatctgaaaaaccacgaagcgccggaagactgcgaattttatatgtgtggtcctccgatcatgaaccagtccgtcatcaaaatgcttaaagacttaggcgtggaagacgaaaacatcctcttggacgatttcggcggttaa

SEQ ID NO: 36342 - DNA, 1419 bp, Neisseria meningitidis
atggaaaatatattgtctgttctggtgggtacagtcaatcggttcctttgggactacctgctgatttacgcgcttttgggtatcggcctgttttttacgctgtatctcggtgcgccgcagattaccaagctgggtgcgggattcaaatctgtattcggcggcttgtttgccaaaggcgataaagacgacaagtctttatcgcagtttcaggcgttggcggttgccatatctgcgcaaatcggtacgggcaacgtcgccggcgtggcgaccgccatcaccgcaggcgggccgggcgcgattttttggatgtgggtttctgccgttttggggatgtccacgatttttgcggaggcactgctggcgcagaaataccgcgtcgtcagccacggcaaatacatcggtgggccggcgttttatattacgcacggtctgactccgaaaatcggcaggggcgcggcgcgtttcctgtcgggctttttctccattgcgttgattatcgcattgggctttatcggcaatgcgacacaggcaaactccattgcttctgccgttaccattgcatttgatgtgccttctttggcagtcggtattgtgcttgccgtccttgcgggcatggttgtgattggcggcgtgaaccgtattgccaatattgcccagtttgtcgtgccgtttatggcggttgtttatattttgtgcgccgtcgttatcctgtttgaattttccgactatattgtgccgatgttcaaccacatctttaccgccgccttcaatcctgaagccgttttgggcggtgcggcgggtatcggtatgcgcgaagcgatacgtttcggcgtggcgcgcggtctgttttccaatgaggcggggatgggttcgactccgcacgcccacgcgactgcggatgtgaagcatcctgtacagcaaggtatggcggcatttgtcggtgtgtttatcgatacgattttggtatgtacggcaactgcgctgattatcctgctgaccgatgccaacctttcgggcgaacagggcgcggcggttactcaatttgcctttaacaaggcatttccgggcttcggttcgcaattgcttgccgtgtgtctgaccttcttcgccttgacgaccattatcggctggtattatttcggtgagtccaacatccgttttcttttcaggggaagacacttgggcatctatcgcgcattggttctgcttgccatcgttttaggtacgctcggcaaagtcgatttggtttggagcctgtccgatatgttcaacggctttatggttatcccgaacttgatagccctgtttttgttgcgtaaggaaatccgtgccatttatgatgattatttggcacagaaaaaagcgggtcgggatttgtcttatccgtatgaattccacgagttccacgacaagggctga

SEQ ID NO: 36343 - DNA, 684 bp, Neisseria meningitidis
atggaactggtatttatccgccacggacaaagcgaatggaacgcgaaaaacctgtttacaggctggcgcgacgtgaagctgagcgagcaggggcttgccgaggctgccgccgccggtaaaaaactgaaagaaaacggctatgagttcgacatcgccttcacatccgtcctgacccgcgcgattaagacctgcaacatcgttttggaagaatccgaccaactgttcgtaccgcaaatcaaaacgtggcggctgaacgaacgccactacggccaactgcaaggcctggacaaaaaacaaaccgccgaaaaatacggcgacgagcaagtccgcatctggcggcgcagctacgacaccctgccgccgcttttggacaaagacgatgagttttccgcacacaaagaccgccgctatgcccatctgcctgccgatgtcgtacccgacggcgaaaacctgaaagtaacgctggagcgcgtattgccgttttgggaagaccaaatcgcccccgcgattttgagcggcaaacgcgtcttggtggcggcgcacggcaactccctgcgcgcgctggcaaaacacatcgagggcatttccgacgaagacattatgggcttggaaatcccgaccggtcagccgctggtgtacaaattggatgacaacctgaaagtcctcgaaaaattctacctgtaa

SEQ ID NO: 36344 - DNA, 2322 bp, Neisseria meningitidis
ttgcattttgaaaatgagattgagcataaaattttagtaacctatgttattgcaaaggtctcaagctgttacaataaactcgtttttatcggaacggaagaccccatcatgaccgccatcagcccgattcaagacacgcaaagcgcgactctgcaagaattgcgcgaatggttcgacagctactgcgccgcgctgccgaacaacgataaaaaacttgtcttagccgcccgttcgctggcggaagcacattaccccgccgatgccgccacgccgtatggcgagccgctgcccgaccacttcctcggcgcggcgcaaatggttcatgaactcgacctgctccccgatgccgtcgccgccaccctgcttgccgacatcggacgctacgtccccgattggaacctattggtttccgaacgctgcaacagtaccgtcgccgagctggtcaaaggtgtggacgaagtgcagaaactcacccacttcgcccgggtggacagcctcgccacgccagaagaacgcgcccagcaagcggaaaccatgcggaaaatgctgctggcgatggttaccgacatccgcgtcgtgttaatcaaactggcgatgcgtacgcgcaccctgcaatttttaagcaacgcccccgacagccccgaaaaacgcgccgtcgccaaagaaaccctcgacatcttcgccccgctcgccaaccgtttgggcgtgtggcagctcaaatggcagctcgaagatttgggcttccgccatcaagagcccgaaaaataccgcgaaatcgcgctgcttttggacgaaaaacgcaccgaacgcctcgaatacatcgaaaacttcctcaacatcctgcgcggtgaactcaagaaatacaatgtccatttcgaagtcgccggccgcccgaaacacatctactccatttacaaaaaaatggtgaagaaaaaactcagcttcgacggcctctttgacatccgcgccgtgcggattctggttgataccgtccccgagtgttacaccacgctgggcattgtccacagcctttggcagcctatccccggcgagttcgacgactacatcgccaacccgaaaggcaacggctataaaagtttgcacaccgtcatcgtcggtcccgaagacaaaggtgtggaagtgcaaatccgcaccttcgatatgcaccaattcaacgaattcggtgtcgccgcgcactggcgttacaaagaaggcggcaaaggcgattccgcctacgagcaaaaaatcgcctggttgcgccaacttttggactggcgcgaaaatatggcggaaagcggcaaggaagacctcgccgccgccttcaaaaccgagctgttcaacgacacgatttacgttttaaccccgcacggcaaagtcctttccctgcctacgggcgcgacacccatcgacttcgcctacgccctgcacagcagcatcggcgaccgctgccggggcgcgaaagtcgaagggcaaatcgtgccgctgtccaccccgcttgaaaacggacagcgcgtcgaaatcattaccgccaaagaagggcatccttccgtcaactggctgtacgaaggctgggtcaaatccggcaaggcaatcagtaaaatccgcgcctacatccgccagcaaaacgccgacaccgtgcgcgaagaaggccgcgtccaaatcgacaagcagcttgccaaactcacgcccaagcccaacctgcaagagcttgccgaaaacctcggcttcaaaaaactcgacgacctctacactgccgtcggacaaggcgaaatttccaaccgcgccatccaaaaagcctgcggcacgctgaacgaacctccgcccgtacccgtcagcgaaaccaccatcgtcaaacagtccaaaatcaaaaaaggcggcaaaaacggcgtgctcatcgacggcgaagacggtttgatgaccacgcttgccaaatgctgcaaacccgcgccgcccgacgacattgtcggcttcgttacccgcgatcgcggcatttcggtacaccgcaaaacctgcccctctttccgacacctcgccgaacacgcgcccgaaaaagtactggacgcaagttgggcggcgttgcaggaaggacaagtgttcgccgtcgatatcgaaatccgcgcccaagaccgctccgggcttttgcgcgacgtatccgacgcgctcgcccgccacaaactcaacgttaccgccgtgcaaacccagtcccgcgacttggaagccagtatgcggttcacgctcgaagtcaaacaggtcaacgacctcccgcgcgtcctcgccagcctcggcgacgtcaaaggcgtattgagcgttacccggctttaa

SEQ ID NO: 36345 - DNA, 900 bp, Neisseria meningitidis
atggttgcaaaaataaaaaaattctcagattcaaccctttccgttttgaataacggcgagcgtcggttttatgtctattgtctgaccgacctgaaaaaagacaaaatcctctacatcggcaaaggctgcggtaatcgtatcttcgagcatgaatgggttgctagtcgttcacaagacccagtctccggcgagattatcgatcggaaactcaaagccatctccaaatgcaagaaactcggtcgctatatcatcagctatcatctgactgaagtcgaagcactcgccgccgaatctgccttaattcattttgttaaatctgtcttgggtaaaaaactcaaaaataaaattgccgggcatggtccgggtggtattagcgtagaagaactagatcgccgctttggattctcttctctcccacttaacgagattaaccccgacgggctgattctcgccatcaaaatccacaatgctttcgatttagatactgacgaagaattagactaccttttcgacaaccaagacgatgccaacctcaaatcgcgtacgttgggcaactgggttatcggtaaagatgttgcttcaaaagtgaaatacgttatcggcgttcacaccggtctgcaaaacgctgttgtcagtgcatacgaagtggacggttttgaaacaatggttgaggaaaccaaaaacggtagaaaacaatcccgttaccgtttccgcactacctctcgtagcgaagaggtattagccaaactcggtctgcaacaaaaatgcctgcccgaattgaagtttggtagcgggggagaaaaagcgtatatcagacccaaaacagagacagaaactgaacaagagaatattcagacgacccccaatccaaaaataaaaaaggaaaaaaccaaatcatga

SEQ ID NO: 36346 - DNA, 1419 bp, Neisseria meningitidis
ttgcagcgtcttccccggcttgtgccgccgcgtcaagtgctttgttacaatgcactaccttcacatttcttaataaattttatgagtaaccatacttcttggtcgtccaaaatcggtttcgtacttgctgcagcaggttcggccatcggtttgggcgcgatttggaaatttccttatacggcaggcaccaacggcggcgcggtgtttttcctgctgtttttgatatttactatcttggtcgccctacccgttcagcttgccgaattttatatcgggcgcacgggcggtaaaaatgccgtcgattccttcagggttctgcgtccgggcacgcaatggctttgggtcgggcgtatgggcgttgccgcctgctttattttgctgtcgttttacagcgtggtcggcggatgggtattaaattatgtcgtccacagttttacgggggcggttcataccggcgcggactttgaagccttgttcggcgcgacgatttccaatccggcaggttcgctgtcctatcaggctctgtttatgctgattacggtttgggtggtcaaaggtgggatttcagacggcattgaaaaggcaaaccgttatctgatgccggggctgtttatcctctttattgcgctggcaatccgttcgctgacgctgccgggtgcaatggagggcgtgtcattcctgctcaaaccgaattggtcgtactttaaagccgatacgatgattacggctttgggacaggcgttttttgccctgagcatcggtgtttccgccatgattacctacgcttcatatttgggaaaagatcaggatatgttccgctcggggcatacgattatgtggatgaacctcttggtttcgctgcttgccggcctggtgatttttccggcggtgttcgccttcggttttgaaccgagccaggggccgggattgatttttatcgtattgcccgcagtgtttatgaagatgccgttcggtacggttttgtttgcggtatttatgctgctggtcgttttcgccacgctgacttccgcattttcgatgttggaaacggtcatcgccgcaaccatccgccaagacgagcgcaaacgcaaaaaacacacttggcttatcggcacggccattttcattatcggcatcccatccgcgctgtctttcggcgtatggggtgagtttaaggttttcggcaaaaccatttttgatttgtgggactatgttatttccgccgtcattatgccgattggtgctttgagtgtttccatctttaccgcctggattcaggacaagcagtctgtgttaaaagatgccggcgcgggcagcaccgtaccacgggcagtgctgctgctgtggctgaataccttgcgctaccttgccccgattgccattattattgttttcatcaattctttggacatcctttaa

SEQ ID NO: 36347 - DNA, 762 bp, Neisseria meningitidis
atgggcaatctgcatgaagggcatcttgcgcttgtgcgtgaggcgaaaaaacgcgcggacagtgtcgtggtcagcattttcgtcaaccgcctgcaattcggtcagggcgaggatttcgacaaatatccgcgtactttgcaacaggatgcggacaagctggaagccgagggtgttgccgttgttttcgcgcccgatgagaaagaactctatccgaacgtggaacagcgttacaacgtcgaaccgcccaatctgcaaaatgagttgtgcggcaagtttcgtccgggacatttccgcggggtggcaacggtagtgtccaagctgttcaatattgtcgcgccggatgttgcctgtttcggcaaaaaagactatcagcagcttgccgtgattaaaggtttgaccgaggatttgaattttgatgttgaaatagtgcctgtcgatacggggcgcgcggaagacggtttggcactctccagccgcaaccagtatttgagtgcggcggaacgcgacgaagcaccgcgcctgtaccgcgaattaaaggctgttgccgaatccttggcgcagggcagtttggattatgcaggtttggaaaaacgtgccgtccaatccctgacagaatacggctgggtggtcgattatgtcgaaatccgccgcgtcgatacgctcgaagtggcgcgggcgggagataagaaactggtggtcttggccgccgcccgtctggggacgacgcgcctgattgacaatttggaaataaaactcccttaa

SEQ ID NO: 36348 - DNA, 1458 bp, Neisseria meningitidis
atgtcccggcatcccgcccccaccggagaaaaaacattcttcggccaccccttccagctttccaccctcttccatatcgaattgtgggaacgtttttcattttacggaatgcagggcatcctgctgatttacctctactacaccgccgacaaaggcggcttgggcatagacaaaaccctcgccggcggcattgtcggcgcatacagcggcagcgtgtacctgtccaccattttgggggcgtggtttgccgaccgagtatggggtgcggaaaaaaccctcttcctctcgggcatcgtcgtgatgctcggacacatcgtccttgccgccgccccgggcctgtacggccttttaatcgggctgatattcatcgcattgggcagcggcggcgtgaaatctacggccagttctatggtgggcgcattatacgaacaggacgaaatgcgcccgctgcgcgatgcgggattttccattttctacatcgccatcaacatcggcggcttcctgggcccgctgctgaccggcctgctgcaggaaaacatcggtttccattatggtttcggcgcggcggcggtcggtatggcattcggcttgtggcgttattccctgggacgtaaaaacctgccccaccccaccgtcccccatccgctttcaaaaggacagggcaaaactgcggccgccgtcggcatcgccctcatcgccgcacttgcaaccgccatcaaaacagggcttgtcaacctcgacaatttctccggcatcctcctatctaccgtcatccttgccgtcatcgtctattttacccggctgctgaccaacccccgcgtcagttccgacaacaagcggcatatcatcgcctacatcccgcttttcctgaccatctgtatgttttgggcggtctggtttcagatttacaccgtggcaaccgtctatttcgacgaaaccgtcaaccgcaccatcggttcgtttaccgtgcccgtcgcctggaaagattccatgcaaagcctgtgggtcatcctgttttccggactgatggcggcaatgtggacaaaaatggggcgcaaacagcccaaaaccccgctgaaattcgctatggcggtatttgttaccggcgcgtcgtttttgggattcgtcccctttatttccgccggcacgccgatgcctattgcggttttcgcactgattgtccttgccatcacgataggcgaactgatgatttccccgattgcgctgtccatctccaccaaaatcgcaccgcctttattcaaaacccaaatggtcgcccttaatttccttgccttttcattaggcttcactttgggcggcgtattgtttgaaaaaggctatcaggcgggcgacgaaatcggcttctatcggctgctgttctacatcggcgcagccacaggcttcctgctgctcctgctcgtccccaaattgaacaaaatgctcgaaggcacagactaa

SEQ ID NO: 36349 - DNA, 885 bp, Neisseria meningitidis
atgagcagcggaaatatccacatccacagcatgaccggatttgccaacgcggcggcagagtgcggcagcaaacgcatcaatctcgacctgcgtgcggtcaaccaccgttttctagatattcaaatcaggatgcccgacgatttgcgctatttggaaagcggtatccgcgagaaaatttcatcccatatcgcacgcggcaaagtcgaatgcaaaatccaaattcaagatgcggaaaacggcagtcagtccttggaactgaatcgcgacttggtcggacagcttgccgaaatcaacaaagacctccgcaagcatcacgatttggcaaaactgggcgttgccgacatcctgcgtttccccggcgtattggcaagccaaagggaaaatacggaagaattggcaaaaagcattaccgaactgaccgaaaaagcgttaaaagactttactgccgcacgcaagcgggaaggtaagaaattaggcgagcacctgctgcaacgccttgaggctatggaagaaatcatagatgcattaagcgaactctttcctaccctgttggaaacacataaagaaaaaatccgcgcccgcctcgtcgaagcggtcggcagcatcgacaacgaccgcctgcaacaggaatttgccctctttatccaaaaatccgacatcgacgaagagttcagccgcctacgcacccacattgccgaagtgcgccgtatcgttaccgaacacaaaggcagcagcggcaaacggctggacttcctgatgcaggaattaaaccgcgaagccaacactttgggcagcaaatccattgccgccgaatgcacccaagcctcggtcgaactgaaagtcttaatcgagcagatgcgggaacaggtgcagaatatcgaataa

SEQ ID NO: 36350 - DNA, 396 bp, Neisseria meningitidis
atgccgtctgatgtcggaatacggcttcagacggcattcaaacggaagttgaacatgaaaaaaatattgtattttctgatttttgttttttctacaagcgtatgggcgggggatgcggaagacaatttgctcagcatccaatccggttaccgcgccttattgcaaaagcaaaacaatctggacggaaaaatcatcgggatgcagtcggatttggaagatgcgcgcagacggttgcaggcggctcaggcagacatcgcccgtttggaagcggaaattcctgcagcaatggcgcaaaaagcccggcaggctgaagagctgaggcaaatcggagtgcgtttggaccatgcttggaatgcggtttacggcgcagggggaacgaaggcgtcggggaattga

SEQ ID NO: 36351 - DNA, 399 bp, Neisseria meningitidis
atgagcaccttctttcaacaaaccgcacaagccatgattgctaaacacatcgaccgcttcccgctattgaagttggaccgggtgattgattggcagctgatcgaacaatacctgaaccgtcaaaaaacccgttaccttagagaccaccgcggccgtcccgcctatcccctgctatccatgttcaaagccgtcctgctcggacaatggcacagcctctccgatcccgaactcgagcacagcctcatcacccgcatcgatttcaacctgttttgccgctttgacgaactgagcatccccgattacagtcatcaaccatattccggtttgtcggagaaagatgcatacgctgtgatgaccggataccgaccctttaaaagagtccgaccctatgccgtctga

SEQ ID NO: 36352 - DNA, 966 bp, Neisseria meningitidis
atgagctacacgcaactgacccagggcgaacgataccacatccaatacctgtcccgccactgcaccgtcaccgaaatcgccaaacagctgaaccgccacaaaagcaccatcagccgcgaaatcagacggcaccgcacccaagggcagcaatacagcgccgaaaaagcccagcggcaaagccagactatcaaacagcgtaagcgacaaccctataagctcgattcgcagctgattcagcacatcgacacccttatccgccgcaaactcagtcccgaacaagtatgcgcctacctgtgcaaacaccaccagatcacgctccaccacagcaccatttaccgctaccttcgccaagacaaaagcaacggcagcacgttgtggcaacatctcagaatatgcagcaaaccctaccgcaaacgctacggcagcacatggaccagaggcaaagtccccaaccgtgtcggcatagaaaaccgacccgctatcgtcgaccagaaatcccatatcggcgattgggaagccgacaccattgtcggcaaaggacagaaaagcgcattattgaccttggtcgaacgcgttacccgctacaccatcatctgcaaattggatagcctcaaagccgaagacactgcccgggcagctgttagggcattaaaggcacataaagacagggtgcacaccatcaccatggataacggcaaagagttctaccaacacaccaaaataaccaaagcattgaaagcggagacttatttttgtcgcccttaccattcttgggagaaagggctgaatgagaacaccaacggactcatccggcaatacttccccaaacaaaccgatttccgtaacatcagtgatcgggagatacgcagggttcaagatgagttgaaccaccggccaagaaaaacacttggctacgaaacgccaagtgttttattcttgaatctgttccaaccactaatacactag

SEQ ID NO: 36353 - DNA, 702 bp, Neisseria meningitidis
atgttccgcatcgtcaaatggctgattgccctgcccgtcggcatctttatctttttcaatgcctatgtgtacggcaacatcattacctaccgcgccgtcgcgccccatcggactgcctttatgtcgatgcggatgaagcagtttgaacaggaaggtcgcgatgtcgcactggattaccgctgggtgccctacaaccgcatctcggtcaacctgaaaaaagccctgattgcttccgaagatgcccgtttcgccggacacggcggcttcgattggggtggcattcaaaacgccatcaggcgcaaccggaacagcggcaaagtgaaggcgggcggttcgaccatcagccagcagcttgccaaaaacctgtttttaaacgaaagccgcagctatatccgcaaaggcgaagaagcggcgattaccgcgatgatggaagccgttaccgacaaagacaggattttcgaactgtatctgaattcgattgaatggcactacggggtgtttggcgcggaagccgcgtcccggtatttttatcaaatacccgccgccaaactgagcaaacagcaggcggcgaaactgacggcacgcgtccccgccccgctctactacgccgaccatccgaaaagcaaacggctgcgcaacaaaaccaatatcgtgctcagacgcatgggttcggcagagttgcctgaaagcgacacggactga

SEQ ID NO: 36354 - DNA, 930 bp, Neisseria meningitidis
atgattcacgtttcggcagtgcaggcaccggcgcatattcaggataccggacgctacggacaccggcgttacggcatcggtcatgccggtgcgatggacacggttgctttggcggcgggtaatattttattgggcaacgacgaaggcacggccgcaatcgaaatcgctttgggcgggataatgctggtgtttgaacgggatacgccgttttgtctcaccggtgccgtgtatcaggcggaattggacggcgaaccggtctattcgtattggcgttataccgcccgcaaagggcagaccttgaaaatggtgcgtgccgtgcagggcatgtacggctatgtgtgcgtggcgggcggatttgatgtgccggaagtgatgggttcgagaagcaccgacctgaaagccggtttcggcggccatcaaggcagaatgctgcaaaaaggtgattgtctccccatcggcaaaggtgcgcaggaattgtccaaagtcggcattgccccgataccgtttaccgataccgtccaccttgttccttcgtcggaatatgccgctttcagtgaaaaagggcgtctgaatctggaacgggaaacgtggacgctgcaaagcgatagcaaccgcatgggctaccgcttcgacggacagccgctgaccctgtcgcaacctttggaaatgctgtcccacgctgttcaggcaggaaccgtgcaggtgccgcccggcggcaaaccgattatcctgctggccgatgcgcaaaccaccggcggttatccgaaaatcgctaccgttgccgccgccgatttgggcaggctggcacaggtgcgcttcggcagcaaagtcaaattcaaaataatcggcttgaaagaagccaccgccctgcggcgcaaaaaccaagtctatctgaaccaaatacggagaatcacccatgaagcaggttga

SEQ ID NO: 36355 - DNA, 294 bp, Neisseria meningitidis
ttgcggcaaaaaaccgtggcattgtgggttcaagtgtttgaaaccgatgttttaaaaccccctaatgccttatccgataacgaatggagttttcccatgcctaaaatgaaaaccaagtctagcgcgaaaaaacgctttaaagtactgggtaacggcggtgtgaaacgcgctcatgcgttcaaacgccacatcttgactaaaaagaccaccaaaaacaaacgccaactgcgcggtacctctatggtaaatgatcgcgatttggcttctgttgctaaaatgttaccctacgcttaa

SEQ ID NO: 36356 - DNA, 324 bp, Neisseria meningitidis
atggacaactgtattttctgcaaaatcgccgccaaagacattccggcgcaaaccgtctacgaagacggcgaaatggtttgtttcaaagacatcaaccccgccgctccggttcatctgctgctgattcccaaagtccatttcgattcgttggcacacgccgcgcccgaacatcagccccttttgggaaaaatgatgctgaaagttcccgaaatcgccaaagcggcaggactggcagacggcttcaaaaccctgatcaataccggaaaaggcggcggacaagaggtcttccacctgcatatacacatcatgggtacacccgtataa

SEQ ID NO: 36357 - DNA, 1035 bp, Neisseria meningitidis
atgagtacttcattgagttaccgcgatgcgggcgtcgatatcgacgcaggcgaccaactggtcgaaaacatcaaaccgtttgccaaacgcaccatgcgtccggaagtattgggggatttgggcggttttggcgcattggtcgaaatcggcaagaaatataaaaatcccgtattggtcagcggtacggacggcgtgggtaccaagctcaaacttgcctttgattgggataaacacgatacggtgggcattgaccttgttgcaatgagtgtcaacgatattttggttcaaggagcagaacctctgtttttcttggattatttcgcctgcggcaaattggatgttccgcgcgcaaccgatgtcatcaaaggcattgcacaaggttgcgaagaatccggctgcgccctgattggcggggaaactgccgaaatgccgggcatgtatcccgtcggagaatacgatttggcgggttttgccgtcggcgtagtggaaaaagagaatgtcattaccggccgcagcatcggcgcgggcgatgtggtattgggtttggcttccaacggcgcacattcaaacggctattcccttatccgtaaaatcatcgaacgcgacaatcccgatttggatgccgagtttgataatggcaaaaccttgcgtgaggctgttattgcgccgacccgtctgtatgtgaaaccgattcttgccgctttggaaaaatttaccattaaaggtatggcgcacattaccggcggcggcattaccgaaaacgtgccgcgcgtgttgcctgaaaacacggttgcacaaatcgatgctaaatcgtgggaattgcccaagctcttccaatggcttcaaaaggcgggcaatgtggaaacccaagaaatgtaccgaacctttaactgcggcatcggcatggtcgttattgttgctgccgaagatgccgatgcggttcagggtctcttgggtgaacaaggtgaaacagtttaccgtttaggtttgatccgtgagcgtcagggagacgagcatcaaacccaggttgcctga

SEQ ID NO: 36358 - DNA, 96 bp, Neisseria meningitidis
atggacatcgtatttgcggcagacggcaggatgcggcggctgtttaccttgaggcaatacttcggcattttgcaccgattgctgaaaaaccgttga

SEQ ID NO: 36359 - DNA, 1008 bp, Neisseria meningitidis
atgagcaccttcttccagcaaaccgcccaagccatgattgccaaacacatcgaccgtttcccgctattgaagttggaccaggtgattgattggcaaccgatcgaacagtacctgaaccgtcaaaaaacccgttaccttagagaccaccgcggccgtcccgcctaccccctgctgtccatgttcaaagccgtcctgctcggacaatggcacagcctctccgatcccgaactcgaacacagcctcatcacccgcatcgatttcaacctgttttgccgctttgacgaactgagcatccccgattacagtactttatgccgttaccgcaactggctggcgcaagacgacaccctgtccgaattgctggaactgattaaccgccaactgaccgaaaaaggtttaaaaatagagaaagcatccgccgccgtcgttgatgccaccattattcagaccgccggcagcacacagcgtcaggccatagaagtcgatgaagaaggacaaatcaacggccaaaccacaccgagtaaggacaaagatgcccgttggacaaagaaaaacggtttatacagactcggttacaaacaacatacccgtaccgatgaggaaggctatatcaagaaactgcacatcacccccgccaatgcccatgagtgcaaacacctgttgcctttgttggaagggttacccaaaggtacgaccgtctatgccgataaaggctacgacagtgaggaaaaccggcaacatctggaagagcatcagttgttagacggtattatgcgcaaagcccaccgcaaacatccactgtcggaagtgcaaaccaaacgcaaccgatatttgtcgaagacccgttatgtggtcgaacaaagcttcggtacgctgcaccgtaaattccgctatgcgcgggcggcctatttcggactgattaaagtgagtgcgcaaagccatctgaaggcgatgtgtttgaacctgttgaaagccgccaacaggctaagtgcgcccgctgccgcctaa

SEQ ID NO: 36360 - DNA, 483 bp, Neisseria meningitidis
atgatgaaaaagatactggccgtatcggcactatgcctgatgactgcggcggcacgggctgccgatacttacggctatctcgccgtttggcagaatccgcagaatgcggacgatgttttgcaggttaaaaccacaaaagaagattcgacgaaaagcgaagcgtttgccgagttggaagccttctgcaaaggtcaggacacgcttgcgggcattgccgaagacgagccgaccggatgccggtcggtcgtgtcgctgaacaatacctgtgtcgcgctggcatacccgaaagccttgggcgcgatgcgcgttgaaaacgccgtcgtgattacttctccgcgttttacgagcgttcatcaggtcgcactcaaccagtgcatcaaaaaatacggcgtacagggacaatgcggcttggaaacagtgtattgcacatcttcttcttattacggcggaactgtgcgctctttgattcaaaatctcaaataa

SEQ ID NO: 36361 - DNA, 1236 bp, Neisseria meningitidis
atgactatttcgacaatggcacagacacacgatactcgattacaaaaaactttgctctttcccagtcaacaaggttggaaatctaaaacttttcttaaacctgattcacatattagattagcaaccgtattcagcgggattggtgcggttgaacaggcattccaccgattaaatttaaaccataccattgtttttgcaggagatattgatccatacgttaaaaaaagttatcttggaaactataaattaaatgaagatttttggcataacgacattactcaatttgatgcgagcaagtttagaaatcaagttgatattttagttggaggcagtccttgccaagcattttccatggttggcaaacgtgcaggattagaagatacacgaggaacattattctatgaatttgctcgcgttgtggatgaagtccaaccaaagatatttatttatgaaaatgtaaagggcttgctcaatcatgataatggaaaaacttggaaagttgtaaaaagtgttttttattcacttggttatgacttatatttccaaataatgaatagtaaggattatgggattcctcaacatcgtgagcgtatttttgttgttggctttcatacccctcctataaatggttttcagtttcctgaaaagattgaattagaacatactatgcaagattttttagaggactatactgatagcaaatattttttacgtgaaaagggtgtgaaatttgttaccagttctaaaaatagacaaaaacgttatacacagattaatggagaaattgccttatgccaaaaagcaaatcaacaatttaattggcatggtgattttatttttcaggcagcccgcgaatctgaatttgatgactttatttttgatgtaaataacgttgaggaaaaatattatctttctgaaaaaatcaaaaattatgttttggcaggaggaacaaaaaattttaaaaccagtacggaaactgatttgcctgtagctcgcccattattgcaaactatgcataaaatgcatcgtgccggggttgataattatgttactcataatcgtggacgtattcgtaaattaacacctagggaatgtttgcggctaatgggttttagagatgattttaaaattttagttagtgatactcaaatgtatcgccaagcgggaaacagtattgttgttgatgtattaatcgctatattaaaacaaatggatattacgctttatggagagtaa

SEQ ID NO: 36362 - DNA, 996 bp, Neisseria meningitidis
atgttgagaaaattgttgaaatggactgccgtttttttgaccgtatcggcagccgttttcgccgcgctgcttttcgtccctaaagacaacggcagggcataccgaattaaaattgccaaaaaccagggtatttcgtcggtcggcaggaaacttgccgaagaccgcatcgtgttcagcaggcatgttttgacggcggcggcctacgttttgggtgtgcacaacaggctgcatacggggacgtacagattgccttcggaagtgtctgcttgggatatcttgcagaaaatgcgcggcggcaggccggattccgttaccgtgcagattatcgaaggttcgcgtttttcgcatatgaggaaagtcatcgacgcaacgcccgacatcgaacacgacaccaaaggctggagcaatgaaaaactgatggcggaagttgcccctgatgccttcagcggcaatcctgaagggcagtttttccccgacagctacgaaatcgatgcgggcggcagcgatttacggatttaccaaaccgcctacaaggcgatgcaacgccgcctgaatgaggcatgggaaagcaggcaggacgggctgccttataaaaatccttatgaaatgctgattatggcgagcctggtcgaaaaggaaacggggcatgaagccgaccgcgaccatgttgcttccgtcttcgtcaaccggctgaaaatcggtatgcgcctgcaaaccgacccgtccgtgatttacggcatgggtgcggcatacaagggcaaaatccgtaaagccgacctgcgccgcgacacgccgtacaacacctacacgcgcggcggtctgccgccaaccccgattgcgctgcccggcaaggccgcgcttgatgccgccgcccatccgtctggcgaaaaatacctttattttgtttctaaaatggacggtacgggcttgagccagttcagccatgatttgaccgaacacaatgccgccgtccgcaaatatattttgaaaaaataa

SEQ ID NO: 36363 - DNA, 1779 bp, Neisseria meningitidis
atgacggttttgaagctttcgcactggcgggtgttggcggagcttgccgacggtttgccgcaacacgtctcgcaactggcgcgtatggcggatatgaagccgcagcagctcaacggtttttggcagcagatgccggcgcacatacgcgggctgttgcgccaacacgacggctattggcggctggtgcgcccattggcggttttcgatgccgaaggtttgcgcgagctgggggaaaggtcgggttttcagacggcattgaagcacgagtgcgcgtccagcaacgacgagatactggaattggcgcggattgcgccggacaaggcgcacaaaaccatatgtgtgacccacctgcaaagtaagggcagggggcggcaggggcggaagtggtcgcaccgtttgggcgagtgtctgatgttcagttttggctgggtgtttgaccggccgcagtatgagttgggttcgctgtcgcctgttgcggcagtggcgtgccggcgcgccttgtcgcgtttgggtttgaaaacgcaaatcaagtggcccaacgatttggtcgtggggcgcgataaattgggcggcattctgattgaaacggtcagggcgggcggcaagacggttgccgtcgtcggtatcggcatcaattttgtcctgcccaaggaagtggaaaatgccgcttccgtgcaatcgctgtttcagacggcatcgcggcggggaaatgccgatgccgccgtgttgctggaaacgctgttggcggaacttgatgcggtgttgttgcaatatgcgcgggacggatttgcgccttttgtggcggaatatcaggctgccaaccgcgaccacggcaaggcggtattgctgttgcgcgacggcgaaaccgtgttcgaaggcacggttaaaggcgtggacggacaaggcgttttgcacttggaaacggcagagggcaaacagacggtcgtcagcggcgaaatcagcctgcggtccgacgacaggccggtttccgtgccgaagcggcgggattcggaacgttttctgctgttggacggcggcaacagccggctcaagtgggcgtgggtggaaaacggcacgttcgcaaccgtcggtagcgcgccgtaccgcgatttgtcgcctttgggcgcggagtgggcggaaaaggcggatggaaatgtccgcatcgtcggttgcgccgtgtgcggagaattcaaaaaggcacaagtgcaggaacagctcgcccgaaaaatcgagtggctgccgtcttccgcacaggctttgggcatacgcaaccactaccgccaccccgaagaacacggttccgaccgctggttcaacgccttgggcagccgccgcttcagccgcaatgcctgcgtcgtcgtcagttgcggcacggcggtaacggttgacgcgctcaccgatgacggacattatctcgggggaaccatcatgcccggtttccacctgatgaaagaatcgctcgccgtccgaaccgccaacctcaaccggcacgccggtaagcgttatcctttcccgaccacaacgggcaatgccgtcgccagcggcatgatggatgcggtttgcggctcggttatgatgatgcacgggcgtttgaaagaaaaaaccggggcgggcaagcctgtcgatgtcatcattaccggcggcggcgcggcaaaagttgccgaagccctgccgcctgcatttttggcggaaaataccgtgcgcgtggcggacaacctcgtcattcacgggctgctgaacctgattgccgccgaaggcggggaatcggaacatacttaa

SEQ ID NO: 36364 - DNA, 1539 bp, Neisseria meningitidis
atgtggaaaattctgcaggcctgcgtcgaagcggacgtgattgtgattacgcaggcggcgaataccggtttgacgggtggctcgacccccgacggcaacgattacgaccgcgacatcgtgattgtgaacaccatgcggatgaacatcatccaaaccatcaacaacaacgaacaagtcgtctgcctgcccggttcgaccctgaaccagcttgaattgctgctgaaacctttggggcgcgaaccgcattcggtcatcggctcatcctgtatcggtgcgtccgtcttgggcggcgtgtgcaacaactccggcggcgcgttggtacagcgcggcccggcctacaccgaaatggcgttgttcgcccaaatcaacgaagaaggcaggttggaactggtcaaccacttgggcatagacttgggcgacacgcccgaagaaatcctgaccaacctgcaaggtcatcattatcaaaacaaagacatcacgcaagatgcgggcaaagggcacgaccacgcctattgcgaacacgtccgccaagtggacgaaccgaccgccgcgcgtttcaatgccgaccccgcccgccattacgaagcctcgggctgcgcgggcaaactgatggtttttgccgtccgtttggacaccttcccgcaagaaaaacaaaccgccgtgttctacatcggcacgaacgacatcaacgagctgaccgacatccgccgcgccgccttgggcgaatttgaaagcctgcctgtttccggcgaatacatccaccgccacgctttcgacattgccgacgtgtacggcaaagacacgttttacgtcatcaaaaaattcggtacgcaccaactgccgaaattatttgacttgaaggcgcgcgtggacaggttcggcaaaaaagccagcttcctgcccaaacatttttccgacaaggccatgcagttcgtcagcaaatacctgcccgaccacctgcccaaatccatgcgcgattaccgcgacaaatacgaacaccacctgattctgaaaatgggcgggaaaggcgtggatgaggcgcgcgcgttcttaaaagaatattttgcacaccacagcggcgcgtttttcgagtgcaacgccgaagaaacccaagccgcgatgctgcaccgtttcgccgtcgcctccgccgccatccgctaccgcgccgtgcatgatgacgaagtggaagacttggtcgcgctcgacatcgccctgcgccgcgacgatcgcgactggtttgaaaaactgccgtcggaaatcgacaataaaatcatccataaactctactatggacatttcatgtgccacgttttccatcaggattacatcatcaaaaaaggcaacgactgcatggcgttggaacacgaaatgctgcatcttttagaccaacgcggcgcgcaatatcccgccgaacacaacgtcggtcatttgtatgaagccaagcccgcgctcaaacagttttaccgcaaactcgacccgaccaacagcttcaacccgggtatcggcaaaaccagcaaaaagaaaaactgggcggaataa

SEQ ID NO: 36365 - DNA, 645 bp, Neisseria meningitidis
atgaagctcaaacatctgttgccgctgctgctgtcggcagtgttgtccgcgcaggcatatgccctgacggaaagggaagactatcttgtgttggataaacccattcctcaagaacagtcgggcaaaattgaggttttggaatttttcggctatttctgcgtacattgccatcatttcgatcctttgttattgaaattgggcaaggcattgccgtctgatgcctatttgaggacggagcacgtggtctggcagcctgaaatgctcggtctggccaggatggcggccgccgtcaatttgtcgggtttgaaatatcaggcaaaccctgctgtgtttaaagcagtttacgaacagaaggttcatttggaagacagggcggtggccggaaaatgggctttgtctcaaaaaggctttgacggtaaaaaactgatgcgcgtttatgactctcccgaggccgcagcagcagcatcaaaaatgcagaaactgacagaacaatacggtattgacaacacgccgaccgttattgtcggcggaaaataccgcgttatcttcaataatggctttgacggcggcgttcatacgattaaagaattggttgccaaagtcagggaagaacgcaagcgtcagccccctgctgtacagaaatag

SEQ ID NO: 36366 - DNA, 480 bp, Neisseria meningitidis
atgccggaaagtattttcaaacagatttcccttgatattttgaaactgcatcgggattctgtttattcgctgcttgccacttccggctgcaactgtcaggtgcatgaagcggcgtatgtcaacatcgacggcaaatattatattgcgctttcatgcgagcccgaggtaggggaagtcaaaacaggcattttgctgattgaggatgaaagccgcaaccttcgtttgagctgggtcggcagtgcacgggaacttgaccgcaaggatagtgtctataagcgtgccttgtccgcgttgtccagaaagctggggcggtgtaaggacaggctgcatacggcggttcaaccgtttttgttggagctggtgccggagaaaggcagattttctgtcggcgatgaagaagtttggatttctcgaaacgatttagtgagggctttatatcctgtcggatacagtatgcggcaggcagtgtttcagatttaa

SEQ ID NO: 36367 - DNA, 504 bp, Neisseria meningitidis
atggctttattgaatatcttgcaatatcccgacgagcgtctgcacacggtggcaaagcctgtcgaacaagtcgacgagcgcatccggaagctgattgccgatatgtttgaaacgatgtacgaatcgcgcggcatcgggctggcggcgacgcaggtcgatgtgcacgagcgcgtggtcgtgatggatttgaccgaagaccgcagcgaaccgcgcgtgttcatcaaccccgtcatcgttgaaaaagacggcgaaaccacttacgaagagggctgcctgtccgtgccgggcatttacgacaccgtaacccgcgccgaacgcgtcaaggtcgaggctttgaacgaaaaaggcgaaaagttcacgctggaggcggacggcttgctggcgatttgcgtgcagcacgagttggaccacctgatgggcatcgtgtttgtcgaacgcctttcccaactcaagcaggggcggattaagaccaagctgaaaaaacgtcagaaacatacgatttga

SEQ ID NO: 36368 - DNA, 585 bp, Neisseria meningitidis
atgcacatactgaccgccggcgtggacgaggcaggacgcgggcctttggtcggcagcgtgtttgccgccgccgtcatccttccggaaacattcgacctgcccggactgaccgactccaaaaaactcagcgagaaaaaacgcgacgcgcttgccgaaatgattaaagaacaggcggccgcgtggtacgtcgccgccgccacgcccgaagaaatcgcaagcctcaacatcctgcacgccacgatgctcgccatgaaacgcgccgttgacggtttggctgtgcgtcctgaaaaaatattcatcgacggcaaccgcattcccgaacatttggacatccccgccgaagcagtcgtcaaaggcgacagcaaaatcatcgaaatctccgccgcatccgttttggcaaagaccgcccgcgatgcggaaatgtacgcactggcgcaacgccatccccaatacggtttcgacaaacacaaaggttacggcacgaagcagcatctggaagccctcaaacaatacggcgtgctgcccgaacaccgccgagatttcgcccccgtcagaaacctgctcgcgcagcagacgctgttttaa

SEQ ID NO: 36369 - DNA, 339 bp, Neisseria meningitidis
atgaaaaaaatcgaggcgattgtcaaaccgttcaaactcgacgacgtgcgcgaggcgttgacggaaatcggcattacgggcatgaccgtcagcgaggtcaaagggttcggcaggcagaaggggcatacggaaatctatcgcggtgcggaatacgccgtcgatttcctgcccaaagtcaaaatcgagctggtgttggcggatgatgctgtggaacgcgcgattgacgtgattgtcgaggtggcgcgttcgggaaaaatcggcgacggcaagatttttgtgctgccggtcgaggaggcaatccgtatccgcacgggcgaacgtgcggacgcggcggtttga

SEQ ID NO: 36370 - DNA, 2760 bp, Neisseria meningitidis
atgaaaagaatgttatttaacgcaacgcaggccgaagagctgcgcgttgccatcgtcgacggacaaaacctgctggatttggacatcgaaacgctgggcaaagaacagcgcaaaggcaatatctacaaaggcatcattacccgcatcgagccgtcgctggaagcgtgtttcgtggattacggaaccgaccgccacggcttcttgccgtttaaagaagtctcccgctcatacttccaagactacgaaggcggacgcgcgcgcatccaagacgtgctcaaagaaggcatggaagtcatcgtccaagtcgaaaaagacgagcgcggcaacaaaggcgccgcgctgaccaccttcatcagcctcgccggacgctatctggtattgatgccgaacaacccgcgcggcggcggcgtatcccgccgtatcgaaggtgaagagcgtcaagagttgaaagccgccatggcggaactcgacattccgaacggcatgagcatcatcgcccgtaccgccggcatcggccgcagcgcggaagagttggaatgggacttgaactacctcaaacaactctggcaggcgattgaagaagcaggaaaagcgcatcacgacccctacctgctctttatggaaagctcgctgctgatccgagccatccgcgactatttccgccccgacatcggcgagattttggtggacaatcaagaagtttacgaccaagttgccgagttcatgagctacgtcatgccgggcaatataggccgtctgaaactctacgaagaccacacgccgctgttttcccgcttccaaatcgaacatcaaatcgaaagcgcgttttcgcgcagcgtcagcctgccttccggcggcgcgatcgtgatcgaccacaccgaagccctcgtttccatcgacgtgaactccgcacgcgccacacgcggcgcggacatcgaagacaccgcgttcaaaaccaatatggaagccgccgaagaagtcgcccgacaaatgcgcctgcgcgacttgggcggtttggtcgtcatcgacttcatcgatatggaaaaccccaaacaccagcgcgatgtggaaaacgtcctgcgcgacgcgctcaaaaaagaccgcgcccgcgtgcagatgggcaaactgtcccgtttcggacttttagaattgagccgccaacgtttgaaaccggctttgggcgaaagcagccatgttgcgtgtccgcgctgtgccggcaccggcgtgattcggggcatcgaatccaccgccctgcacgttttgcgcatcattcaagaagaagcaatgaaagacaacaccggcgaagtgcgcgcacaagtgcccgtcgatgtcgccaccttcctgctgaacgaaaaacgcgccgagctgtttgcgatggaagagcgtttggatgtcaacgtcgtcctgattccgaacatccacctcgaaaatccgcactacgaaatcaaccgcatccgcaccgacgacgtagaagaagacggcgaaccgagctacaagcgcgttgccgagccagaagaagacgaatccgccaaaccgttcggcggcgaaaaagccaaagccgcccgtcccgaacccgccgtcaaaggcgtgcgccacaccagccccgccccgactgccgcccccgagaaaaaaacctcctggtgggacagcttcaaagcttggctcaaacgcattttcggcggcagcgaaacccaagccgcacccgctgccgaaacctccgaaaaacgcagcacggcaaaccgcagcggcagccgcgccaacaaccgccgccaaaacccgcgccgcagcaaacgcgaaggcagcaaagtagaagtccgcgaagtggcaggcaaaactgccagacaggaagcgcgtgccgacacagccgaaacgcgcaacaacggcaaccgccgccgcaacgaacgcggcgaccgtgccgccgaacgtgccaacgaagcggaaatccaaagccgcaacgtacagcctgccgcaaccgttgcagatgccgcaccgtccgaaaccgaagtgcaaaccggaaaacgccgccgcaacggcagccgcaacgaacgcggccaaaccgcgccggaaaccgccgccgttgccgaaacagccgttcagacagcggaaaacacgccgtccgaaccgcataccgcagaagacaaaggcagcaagcccaaatccgaacgcaaccgccgcgaacgcgacagccgcgacgccaaagaacgccgcgagcgcaacaatcagcgcgaccgccgtcaaaacggcaaaaaacgcaatattccgtctgccgccaaaatcgagcagtacctgaatattcacgacaccgccgacaaagtccattccgccgccgcgcacgttttcggcgaaaccgacgcaaacgcgccgattaccgtcagcattgccgatccggttgcagaaagggatcttccgacagcatctcccgccgtttcaaacggcgacgcaccggtttatgatgcggcggaaaaaatccgccgtgccaccgccgccatcctgcccgaaggcgcgacaccgaaagccgaagcacaggaaatgccgtctgaaaccgcaacctttacggctgcggcggaacaggcacgggaaaccgcacaaaccggcggactcgtcctgatcgaaaccgaccctgccgcattgaaggcatgggcggcacaacccgaagtccaaaccggacgcggtttgcgccgttccgaacagcccaagccgtctgaagtcgcaaccgtccctgccgaagaaatgatccaagtcgaaacccggcaaggctga

SEQ ID NO: 36371 - DNA, 768 bp, Neisseria meningitidis
atggcactggcaaaacgcatcatcccctgtctcgacgtaaaagacgggcgcgtcgtcaaaggcgtgaacttcatcggtttgcgcgacgcgggcgaccccgtcgaagccgccaaacgctacaacggcgaaggcgcggacgaattgaccttcctcgacatcaccgcctcatccgacaaccgcgacaccatcctgcacatcatcgaagaggttgccggacaagtcttcatcccgctgaccgtcggcggcggcgtacgcaccgttgccgacatccgccgcctgctcaatgccggcgcggacaaagtcagcatcaacaccgccgccgtaacccgtcccgatttaattaacgaagccgccggatttttcggttcgcaagccatcgtcgccgccgtcgatgccaaagccgtcaaccccgaaaacacacgctgggaaatctttacccacggcgggcgcaatccgaccggtttggatgcggtggaatgggcggtcgaaatgcaaaaacgcggcgcgggcgaaatcctgctcaccggtatggacagggacggtacgaaacagggtttcaacctgccgctgacccgcgccgttgccgaagccgtcgacattcccgtcatcgcctccggcggggtcggcaatgtccggcacctgattgaaggcataaccgaaggcaaagccgatgccgtacttgccgccggcattttccatttcggggaaatcgccatccgcgaagccaaacgcgctatgcgcgaagccggcatcgaagtgcgcctctga

SEQ ID NO: 36372 - DNA, 330 bp, Neisseria meningitidis
atgggcagcctgattattgaagatttgcaggaaggcttcggaaaagaagcagttaaaggcaaagagattaccgtgcattacacaggttggctggaagacggtaccaaattcgactccagcctcgaccgccgccagccgctgaccatcacgctcggcgtcggacaagtcatcaaaggctgggacgaaggcttcggcggaatgaaggaaggcggcaaacgcaagctgaccatcccttcggaaatgggctacggcgcacacggtgccggcggcgtgattcccccgcacgccactttgatatttgaagtcgagctgctgaaagtgtacgaataa

SEQ ID NO: 36373 - DNA, 1764 bp, Neisseria meningitidis
atgggttttcctgttcgcaagtttgatgccgtgattgtcggcggtggtggtgcaggtttacgcgcagccctccaattatccaaatccggtctgaattgtgccgttttgtctaaagtgttcccgacccgttcgcataccgtagcggcgcagggcggtatttccgcctctctgggtaatgtgcaggaagaccgttgggactggcacatgtacgataccgtgaaaggttccgactggttgggcgaccaagatgcgattgagtttatgtgtcgcgctgcgcctgaagccgtaattgagttggaacacatgggtatgccttttgaccgcgttgaaagcggcaaaatttatcagcgtcctttcggcggtcatactgccgaacacggtaaacgcgcggtagaacgtgcttgcgcggttgccgaccgtaccggtcatgcgatgttgcatacgttgtatcaacaaaacgtccgtgtcaatacgcaattctttgtggaatggacggcacaagatttgattcgtgatgaaaacggcgatgtcgtcggcgtaaccgccatggaaatggaaaccggcgaagtttatattttccacgctaaagctgtgatgtttgctaccggcggcggcggccgtatttatgcgtcttctaccaatgcctatatgaataccggcgatggtttgggtatttgcgcgcgtgcaggtatcccgttggaagacatggaattctggcaattccacccgaccggcgtggcaggtgcgggcgtgttgattaccgaaggcgtacgcggcgagggcggtattctgttgaatgccgacagcgaacgctttatggaacgctatgcgccgaccgtaaaagacttggcttctcgcgacgttgtttcccgcgcgatggcgatggaaatctacgaaggtcgcggctgcggtaaaaacaaagaccatgtcttactgaaaatcgaccatatcggcgcagaaaaaattatggaaaaactgccgggcatccgcgagatttccattcagttcgccggtatcgatccgattaaagacccgattcctgttgtgccgactacccactatatgatgggcggcattccgaccaattaccaaggcgaagtcgttgtgccgcaaggagacgaatacgaagtgcctgtaaaaggcctgtatgccgcaggtgagtgcgcctgtgcttccgtacacggtgcgaaccgtttgggtacgaactctctgctggacttggtggtgttcggtaaagctgccggcgacagcatgattaaattcatcaaagagcaaagcgactggaaacctttgcctgcggatgcgggcgagctgacccgccaacgtatcgagcgtttggacaatcaaactgatggcgaaaacgttgatgcattgcgccgcgaactgcaacgctctgtacaactgcacgccggcgtgttccgtactgatgagattctgagcaaaggcgttcgagaagtcatggcgattgccgagcgtgtgaaacgtaccgaaatcaaagacaagagcaaagtgtggaataccgcgcgtatcgaggctttggaattggataacctgattgaagtggcgaaagcgactttggtgtctgccgaagcacgtaaagaatcacgcggtgcgcacgcttcagacgaccatcctgagcgcgatgatgaaaactggatgaaacatacgctgtaccattcagatatcaataccttgtcctacaaaccggtgcacaccaagcctttgagcgtggaatacatcaaaccggccaagcgcgtttattga

SEQ ID NO: 36374 - DNA, 1152 bp, Neisseria meningitidis
atgcagacatggcagcttccggaacatatcgccgacgtactgcccacgaacgcgcggcagcttgaaagcgcgagggagcagttgttggcactgttccgcgtacacggttatgaactggtacagcctccgctgatggagtacgcacattccctgctgacgcatatcgatgcggggctttccctgaaaaccattttggtaacggacaggctcagcggcaggcagttgggcatacgcgccgacatcacgccgcaggtggcgcgtattgatgcccatcttttatccgccaaccaagggattaaccggttgtgttatgccggtccggtgttgcacgcgcagcccgacggtctgctgaatatgcgcgaacccttgcaggcaggggcggaaatgtacggttttgccgacatccgtggcgacatcgagctgatagacctgatgctgaaaagcatgaaaattgccgatatgggcaaagtgctgctttcgctggggcatatcggcatattccgcgccttgtccgatgcggcgcatttggatgcggggcagtccgcaacgctgcttgccttgatgcaggataaagataccggggcggtcgaagcgcaggtcaaggcttggaagctggacggcatgtgggcaaaagcattctcgctgttgccgcgcctgtacggcgggcgtgaagtgttgtccgacgcgcgcggacggttgccggatttgtcggcggtcggcggcgcgttgggcgaattgcaggcggtgtgcgacgcattccccgattgtgaaatccatatcgacttgtccgagctgcgtgtcgacaattaccacacgggcttgctgtatgccgcctatgccgccgatttccacgacgcggtcgcgcgcggcgggcgttatgacggattgggcggatatttcggcagggcgcgcccggcaacgggattcagtttcgacttgcgcagctttatcgggcgtttgcccgccatcgaacggcagcccgccgtgttggtcgatgcggaagatgccgaagcggcgcgcgaagcggtcgaagccttgcgtgaacaagggcagtgtgtcgtaatcgattacggtatcggacacaatgtttcggaagagcttgcaggccgtctgaaaaagacggacggcgtttggcaggtcgtgaaacgctaa

SEQ ID NO: 36375 - DNA, 669 bp, Neisseria meningitidis
atgaaccacgacatcactttcctcaccctgttcctactcggtttcttcggcggaacgcactgcatcggtatgtgcggcggattaagcagcgcgtttgcgctccaactccccccgcatatcaaccgcttttggctgatcctgctgcttaacacaggacgggtaagcagctatacggcaatcggcctgatactcggattaatcggacaggtcggcgtttcactcgaccaaacccgcgtcctgcagaatattttatacacggccgccaacctcctgctgctctttttaggcttatacttgagcggtatttcttccttggcggcaaaaatcgagaaaatcggcaaaccgatatggcggaacctgaacccgatactcaaccggctgttacccataaaatccatacccgcctgccttgcggtcggaatattatggggctggctgccgtgcggactggtttacagcgcgtcgctttacgcgctgggaagcggtagtgcggcaacgggcgggttatatatgcttgcctttgcactgggtacgctgcccaatcttttggcaatcggcattttttccctacaactgaaaaaaatcatgcaaaaccgatatatccgcctgtgtacgggattatccgtatcattatgggcattatggaaacttgccgtcctgtggctgtaa

SEQ ID NO: 36376 - DNA, 3060 bp, Neisseria meningitidis
atgttttggatagttttgatcgttattttgttgcttgcgcttgccggcttgttttttgtccgcgcacaatccgaacgcgagtggatgcgcgaggtttctgcgtggcaggaaaagaaaggggaaaaacaggcggagctgcctgaaatcaaagacggtatgcccgattttcccgaacttgccctgatgcttttccatgccgtcaaaacggcagtgtattggctgtttgtcggtgtcgtccgtttctgccgaaactatctggcgcacgaatccgaaccggacaggcccgttccgcctgcttctgcaaatcgtgcggatgttccgaccgcatccgacggatattcagacagtggaaacgggacggaagaagcggaaacggaagaagcggaaacggaagaagcagaagctgcggaggaagaggctgccgatacggaagacattgcaactgccgtaatcgacaaccgccgcatcccattcgaccggagtattgctgaagggttgatgccgtctgaaagcgaaatttcgcccgtccgtccggtttttaaggaaatcactttggaagaagcaacgcgtgctttaaacagcgcggctttaagggaaacgaaaaaacgctatatcgatgcatttgagaaaaacgaaacagcggtccccaaagtccgcgtgtccgataccccgatggaagggctgcagattatcggtttggacgaccctgtgcttcaacgcacgtattcccatatgttcgatgcggacaaagaagcgttttccgagtctgcggattacggatttgagccgtattttgagaagcagcatccgtctgccttttctgcagtcaaagccgaaaatgcacggaatgcgccgttccgccgtcatgcagggcaggggaaagggcaggcggaggcaaaatccccggatgtttcccaagggcagtccgtttcagacggcacagccgtccgcgatgcccgccgccgcgtttccgtcaatttgaaagaaccgaacaaggcaacggtttctgcggaggcgcggatttcgcgcctgattccggaaagtcggacggttgtcgggaaacgggatgtcgaaatgccgtctgaaaccgaaaatgttttcacggaaaccgtttcgtctgtgggatacggcggtccggtttatgatgaaactgccgatatccatattgaagaacctgccgcgcccgatgcttgggtggtcgaaccacccgaagtgccgaaagttcccatgcccgcaatcgatattccgccgccgcctcccgtatcggaaatctacaaccgtacctatgaaccgccgtcaggattcgagcaggtgcaacgcagccgcattgccgaaaccgatcatcttgccgatgatgttttgaatggaggttggcaggaggaaaccgccgctattgcggatgacggcagtgagggtgtggcagagcggtcaagcgggcaatatttgtcggaaaccgaagcgttcgggcatgacagtcaggcggtttgtccgtttgaaaatgtgccgtctgaacgcccgtcctgccgggtatcggatacggaagcggatgaaggggcgttccaatctgaagaaaccgatgcggtatccgaacacctgccgacaaccgacctgcttctgccgccgctgttcaatcccgaggcgacgcaaaccgaagaagaactgttggaaaacagcatcaccatcgaagaaaaattggcggagttcaaagtcaaggtcaaggttgtcgattcttattccggccccgtgattacgcgttatgaaatcgaacccgatgtcggcgtgcgcggcaattccgttctaaatctggaaaaagacttggcgcgttcgctcggcgtggcttccatccgcgttgtcgaaaccatccccggcaaaacctgtatgggtttggaacttccgaacccgaaacgtcaaatgatacgcctgagcgaaatcttcaattcgcccgagtttgccgaatccaaatccaagctgacgctcgcgctcggtcaggacatcaccggacagcccgttgtaaccgacttgggcaaagcaccgcatttgctggttgccggcacgaccggttcgggcaaatcggtgggtgtcaacgcgatgattctgtctatgcttttcaaagccgcgccggaagacgtgcgtatgattatgatcgatccgaaaatgctggaattgagcatttacgaaggcatcccgcacctgctcgcccctgtcgttaccgatatgaagctggcggcaaacgcgctgaactggtgtgttaacgaaatggaaaaacgctaccgcctgatgagctttatgggcgtgcgtaatcttgcgggcttcaatcaaaaaatcgccgaagccgcagcaaggggagaaaaaatcggcaatccgttcagcctcacgcccgacgatcccgaacctttggaaaaactgccgtttatcgtggtcgtggtcgatgagtttgccgatttgatgatgacggcaggcaagaaaatcgaggaactgattgcccgcctcgcccaaaaagcccgcgcggcaggcatccatcttatccttgccacacaacgccccagcgtcgatgtcatcacgggtctgattaaggcgaacatcccgacgcgtatcgcgttccaagtgtccagcaaaatcgacagccgcacgattctcgaccaaatgggcgcggaaaacctgctcggtcagggcgatatgctgttcctgccgccgggtactgcctatccgcagcgcgttcacggcgcgtttgcctcggatgaagaggtgcaccgcgtggtcgaatatttgaaacagtttggcgagccggactatgttgacgatattttgagcggcggcagcagcgaagagctgcccggcatcgggcgcagcggcgacggcgaaaccgatccgatgtatgatgaagccgtatccgttgtcctgaaaacgcgcaaagccagtatttcgggcgtacagcgcgccttgcgtatcggctacaaccgcgccgcgcgtctgattgaccagatggaggcggaaggcattgtgtccgcaccggaacacaacggcaaccgtacgattctcgtccccttggacaatgcttga

SEQ ID NO: 36377 - DNA, 738 bp, Neisseria meningitidis
atggctttgcaagatcgtaccggtcaaaaagtaccttccgtagtattccgcacccgcgtcggcgacacttggaaagatgtgtctaccgatgatttgttcaaaggcaaaaaagtagtcgtattctccctgcccggtgcatttaccccgacttgttcttcttcacacctgccgcgttacaacgaattgttcggcgcgttcaaagaaaacggcgttgacgcaatctactgcgtatctgtaaacgatacgttcgtaatgaacgcttgggctgccgaagaagaatccgacaacatctacatgattcctgacggcaacggcgaatttaccgaaggtatgggtatgctggtcggtaaagaagacttgggcttcggtaaacgctcttggcgttactccatgctggttaacgacggcgtggttgaaaaaatgttcatcgaacctgaagaaccgggcgatccgttcaaagtatccgatgcagatactatgctgaaattcgttgctcccgattggaaagctcaagagtctgttgccatctttaccaaacccggctgccaattctgtgctaaagccaaacaagctttgcaagacaaaggtttgtcttacgaagaaatcgtattgggcaaagatgcaaccgttacttccgtacgcgccattaccggcaagatgactacccctcaagtcttcatcggcggcaaatacatcggcggcagcgaagatttggaagcctacttggctaaaaactaa

SEQ ID NO: 36378 - DNA, 1212 bp, Neisseria meningitidis
atgaaccaactgaaacttgccgtttccggcgcgcagattttatttgtggcattcggcgcaatggtgctggttcccctgctgaccggtctgaatccggctcttgcgcttttgggcgcaggcttgggaacgctgctgttccaaatcacaaccaaacgcaaagtgccgatttttcttggttcttcgtttgcctttatcgcaccgattatctactccgtcggcgaatgggggctgccttccaccatgttcggactgtttgccgccggctttatgtattttgtgtttgccgcgctgatccgttggcgcggactggcagcggtacacaaactgctgcctccggtcgtcatcggccccgtcatcatggtcatcggtctgtctgttgccgtggcggcaagcagcatggcaatgggtcaggcggacggcaaacaggtcatcgactataccgattcgctgattctttccggctttacctttgccgttaccgccatcgtatcggttttcggcagcaggatgatgaagctgattcccatcttgatcggtgtcgcttcgggttatgttttggcactgctgatgggactggtggacacggcaagcattgcacacgcgccctggttcgccgttccccattttgaaacgcctcagatcaactggcaggctgcactgtttatgctgcccgttgccgtcgcccccgccatcgaacacatcggcggcatcatggcaatcggcaatgtgacggggaaagactatacgaaagacccgggcttggacaaaacccttgcaggcgacggtttgggcgtatgcgttgcgggtctgatcggcggcccgccggttacgacctacggcgaagtaacgggtgcggtgatgattaccaaaaacagcaaccccgtcatcatgacttgggcggcggtttttgccgtctgcatggcgtttttcggcaaattcaatgcgtttttggcttccattccgatgccagtaatgggcggcattatgctgctgctgttcggcacgattgcttctttgggcgtgaaaacgctgattgatgccaaagtcgatttgatgctgccgaaaaacctggtcatcgtcagctcggtactgaccacgggcatcggcggcatgacgctcaaattgggcagcttcagctttgccggcgtgggcttgtgcgccgtacttgccattatgttgaacagcctgctgcccgatccgaaagaatcctga

SEQ ID NO: 36379 - DNA, 729 bp, Neisseria meningitidis
atgaccgcctaccgtatcgcacccagtattttgtcggcagactttgcccgcctcggagaagaggtggaaagcgtcattgcggcaggtgcagatctgatccattttgacgtgatggacaaccattatgtgccgaacctgaccttcggccctatggtttgcgcggcgttgaagccttatgcaagcgtgccgatcgatgtgcatttgatggtcgaacccgttgacgacctgattcagtcgtttgccaaagcaggagcatcgattatcacttttcatcccgaagcgagccgccatatcgaccgcagcttgagcctgattcgtgatatgggctgtcaggcggggctggtgttgaatccggcaacgcccgtatatctgttggaaaacgtattggacaggctggatatggttttgctgatgtcggtcaaccccggattcggcggacaaagcttcatcccgcacacccttgaaaaaatccgccgggtgcgggcgatgctggatcggtacgaagcacaaagcgggcggcacatcgccatcgaagtggacggcggcatcaaaaccgacaatattgccgccgttgcccgagctggtgcggatacctttgttgccggttctgcgattttcggcaaaccagactataaggcggtgattgatgcgatgagggcggaactggaaaaaagcggcaggctgaaccttgcgccaatgattgaaatagaaatgccgtctgaaaattag

SEQ ID NO: 36380 - DNA, 219 bp, Neisseria meningitidis
atgagtatgcccgaaatgcccaaatggtacgacgatgacggacagatcgtgtcctgtaccgaaaaggtcaaagtgatgtccgaaaatatggccgagctgtatcagacggcacaagacgcgtttgaagacgcgctgctgatgggttgcggcgaacgtcagttgcgcgattacctgctcgcgctgattgaaggtttggaaaatccctaccgcaaagtctga

SEQ ID NO: 36381 - DNA, 777 bp, Neisseria meningitidis
atgaccctcatccacccgaccgccgtcatcgaccccaaagccgaactcgactccagcgtcaaagtcggcgcgtacaccgtcatcggccccaacgtccaaatcggcgcgaataccgaaatcggcccgcacgccgtcatcaacggccacaccagcatcggcgaaaacaaccgcattttccaatttgccagcctcggcgaaattccgcaggacaaaaaataccgcgacgagccgacccggctgattatcggcaacggcaacaccatccgcgaatttacgacgttcaatctcggaacagttactggcatcggcgaaacccgtatcggcgacgacaactggattatggcgtactgccacctcgcgcacgactgcgtggtcggcaaccacaccattttcgccaacaacgcctcgcttgccggacacgttaccatcggcgactacgtcgttttgggcggctacacgctggttttccaattctgccgcatcggcgactacgccatgaccgccttcgccgcaggcgtacacaaagacgtaccgccctactttatggcatcgggctaccgcgccgaaccggcggggctcaacagcgaaggcatgcgccgcaacggttttaccgcagagcagatttccgccgtcaaagacgtgtacaaaaccctctaccatcgcggcattccgtttgaagaagccaaggcagacattctccgccgcgccgaaacccaagccgagcttgccgtattccgagactttttcgcacaatcggcgcgcggcatcatccgctga

SEQ ID NO: 36382 - DNA, 198 bp, Neisseria meningitidis
atgccgtctgaaaaaatctattacggcgtattgattttcttatgtatcgcttctatgctgctgtcgccgtttttttatgcgggtgctttgaagcccaagaaggcggcattgcggaaggacgggcagtggaaactcatcttattgtccaataccgtggcggcggcggttttgttttggatgtggtggaaatggttttga

SEQ ID NO: 36383 - DNA, 264 bp, Neisseria meningitidis
atggcaaacagcgcacaagcacgcaaacgtgcccgccagtccgtcaaacaacgcgcccacaacgctagcctgcgtaccgcattccgcactgcagtgaaaaaagtattgaaagcagtcgaagcaggcgataaagctgccgcacaagcggtttaccaagagtccgtcaaagtcatcgaccgcatcgccgacaagggcgtgttccacaaaaacaaagcggcacgccacaaaagccgtttgtctgcaaaagtaaaagcactggcttga

SEQ ID NO: 36384 - DNA, 423 bp, Neisseria meningitidis
atgaaatatatgattaattttctaaaaaaaacatttgaattaatgagttgggtattagtcatactaataattgggacattttatgactattatcaaataaggcaatatgctgaattagaaaagaaatctatatcaaatatcttgctatatgcccaaaaagaaaaatttcgcttagagagtaaagataaatacatgcgaggaggatatacaaaatatgaatttattttttcagaatatagtaatactacttttttaaacttcataaatgacctgaaaaaagataattatttaccacttgacggctatggacatggttttctatgtagaaaaggagagtctatatcaatcaatatataccctgaaattaataaatttattttagtatggggataccctgaaaatctttgcgctgattctaattaa

SEQ ID NO: 36385 - DNA, 558 bp, Neisseria meningitidis
ttgcagcaatgcccaaaatgtcgaattcaagaatccgacctacaaaatcattccgagcataatactatgaaataccgtcgtttttaccgcaatggcggcacttacttttttacggttgtaaccaataaacggcagaagattttgaccgatgatgcggtgcgtttggctttgcggcaggcggtaatggcggtgcgcgaacggtatccgtttgaaattttggcatgggtgttgatgcccgatcatctgcataccatatggcggctgccggacaatgattctgcttattcggaacgctggcggcaaatcaagcggcacagccaatatttaatcggcggcaatctcaggctttggcaaaaacgcttttgggaatatactatccgcgatgaggccgattttgcctggcattttgattatctgcatttcaatccggtcaaacatggctatgtaggacaaatttccgattgggggttttctacgtttcaccgttatgtcaaacagggtatttatccgcataattggggtggcggcaatgcggacttttctattggatacgattga

SEQ ID NO: 36386 - DNA, 1578 bp, Neisseria meningitidis
atgagtaaagccgtcaaacgcctgttcgacatcatcgcatccgcatcggggctgattgtcctctcacccgttttcctgattttggcgtacctcatccgcaagaatctgggttcgcccgtcttcttcattcaagaacgccccggaaaggacggaaaaccttttaaaatggtcaaattccgttccatgcgcgacgcgcttgattcagacggcattccgctgcccgacagcgagcggctcacacccttcggcaaaaaactgcgtgccgctagtttggacgaactgcctgaattatggaatgtcttaaaaggcgacatgagcctggtcggcccgcgcccgctgctgatgcaatatctgccgctgtacgacaacttccaaaaccgccgccacgaaatgaaacccggcattaccggctgggcgcaggtcaacgggcgcaacgcgctttcgtgggacgaaaagttcgcctgcgatgtttggtacactgaccattacagtttttggctagatatgaaaatcctgtttttgacagtcaaaaaagtcttgatcaaagaaggcatttcggcggaaggggaagccactatgccttatttcactggaaatcaaactaaggaaaaaaataatatactgattctgtcggcaggtcgccgtgtcgaattggtgcaggacttccaaaccgaagccgcacgtttttcagacggcatcagcgtttttgccactgacctcaacccccgcatgtcttctgcctgccatgtttcggacggttcatttgaagtgccgccgattagtgccgattcatatatcgacagcattttcaatctggcggtacgcgaaaatatcggtttaatcatcccaaccatagacaccgaactgcaaaagctggcagacgagcgcgaacgctttgaagcggcaagtgtccacatcgtcgtttccgattcggacttcatcgcacaatgccgcgacaaacggaaaaccgccaccttgtttgcccgctacggcatacgctcacccgaaatttacgaccgcaagaagttggttttcccttgcttcgccaagccttatgacggcagccgcgccatcggtgcaaaacggattgacacacctgccgacctgacaccggaagtcttggcagacaccaaattaatgttctgtcagtttatcgacatcgaaaataaattttccgagtttaccgtcgatatgtattacgaccgtcaatgccgtctgaaatgcgccatcccgcgaaaacgcttggaagtgcgctccggcgaaatcagcaaaggcgttacctgcaaaaacagcctctaccaaacgctgctggaaaaaatgtcggtattgcagggcgcgcgcggctgtatcacggcgcagttcttctacaacgaagaaaccggcgaattctacggcgtggaaatcaacccccgcttcggcggtggcttcccgctgacgtatgccgcaggcggcaattatccgagccggttgatgcgcgaatacctcggcgacgaagaaatcccgttttcagacgactgggaaaacaacctcattatgttgcgctacgatgccaaggtcttggttcatgaaaacgattaa

SEQ ID NO: 36387 - DNA, 258 bp, Neisseria meningitidis
atgattgagctgaaattagtagatgagagcagttttcaggcagtgctggatttgaaaatatctgaagctgatgaacgagcacgttttgtggctccaaatgtacgctctttagctgacgcatggctctaccgggaaaatgaagatgtgtttccgagggcaatctattgggataagcaagtggttggctttctcctgctggaaatagacaaggatgaagcagaatactttatctggcggataatgattggtcagcagtga

SEQ ID NO: 36388 - DNA, 876 bp, Neisseria meningitidis
ttgtttacttcgcaacccggcatctccaaacaaatcaaattgctggaagaagaaatcggcattcagatttttatccgcagcggcaagcgcgtggtttcggtctcgcagccgggcaaggtggttttggatattgcagaacgtattttgcgcgatgttcagaacattaaaaatatcggcagcgagtttaccggacaggacagcggttcgctgacggttgccacgacgcatactcaggcacgctatgccctgcccttgattgttgccgattttgtgaaacgctatccgaaagtcaacctgaccatcaaacaggggagccctgccgccatcgcccaaatggttacttcgggagagtctgatttggcaattgttacggaacgtatagacgaccaccccgaactgggaagactttcctgctacgactggacacacgcggttatcgtaccgaacgaccaccccttgctcgaatgcagaaaccccctccgtattgaagatttggcgaggtttccgctgattacttatgaatttgcattcaatgcgggcagcagcatcgcgcgggcattttccaaagcccgtttggaacagccggatgtcgcattggcggcggcggatacggacgtattgaagacttatgtgcgcttgggtttgggcgtgggactgatggcgaaaatggcgtacaacccggatacggacggcgatttgcagcttgtggatgcggcacacctgttcgagccgtcgccgacgtggattgctttgcgcagcgatacttatttgcgcggatatgcctacgactttatccaagcgtttgcgccgcacctgacacgcgagaaggtggataggattctgtacacgcccatcagcgaggatttttcgatttag

SEQ ID NO: 36389 - DNA, 897 bp, Neisseria meningitidis
atggcgtttgaaaacattatttccgccgccgacaaggcgcgtatccttgccgaagcactgccttacatccgccggttttccggttcggtcgtcgtcatcaagtacggcggcaacgccatgaccgaacctgccttgaaagaagggtttgcccgagatgtcgtgctgctgaagctggtcggcattcatcccgtcatcgttcatggcggcgggccgcagatcaatgcgatgcttgaaaaagtcggcaaaaagggtaagtttgtccaaggaatgcgcgttaccgacaaagaggcgatggatattgtcgaaatggtgttgggcgggcacgtcaataaagaaatcgtgtcgatgattaacacatatggcgggcacgcggtcggcgtgagcggacgcgacgaccatttcattaaggcgaagaaacttttgatcgatacgcccgaacagaatggcgtagacatcggacaggtcggtacggtggaaagcatcgatacaggtttggttaaagggctgatagaacgcggctgcattcccgttgtcgcccccgtcggcgtaggtgaaaaaggcgaagcgttcaacatcaacgccgatttggtagcaggcaaattggcggaagaattgaacgccgaaaaactcttgatgatgacgaatatcgccggtgtgatggacaaaacgggcaatctgctgaccaaactcacgccgaaacggattgatgaactgattgccgacggcacgctgtatggcggtatgctgccgaaaatcgcttctgcggtcgaagccgccgtcaacggcgtgaaagccacgcacatcatcgacggcagggtgcccaacgcgcttttgctggaaatctttaccgatgccggtatcggttcgatgattttgggcggtggggaagatgcctga

SEQ ID NO: 36390 - DNA, 375 bp, Neisseria meningitidis
atgagaaaaagtcgtctaagccggtataaacaaaataaactcattgagctatttgtcgcaggtgtaactgcaagaacagcagcagagttagtaggcgttaataaaagtaccgcagcctattattttcatcgtttacgattacttatttatcaaaacagtccacatttggaaatgtttgatggcgaagtagaagcagatgaaagttattttgctgaacgacaaaaccatattaatggaattgagaacttttggaaccaggcaaaacgtcatttacgcaagtttaacggcattcccaaagcgcattttgagctgtatttaaaggagtgcgaatggcgttttaacaacagtgagataaaagttcttgttccatattaa

SEQ ID NO: 36391 - DNA, 1497 bp, Neisseria meningitidis
gtgaaaccgctgcgcagactgacaaacctccttgccgcctgcgccgtagcggcggccgcactcatacagcccgccctcgcggcggacttggcgcaagacccgttcattaccgataacgcccaacggcagcactacgaacccggaggcaaataccacctcttcggcgacccgcgcggcagcgtttccgaccgcaccggcaaaatcaacgtcatccaagactatacccaccagatgggcaacctgctcatccaacaggcggcaatccaaggcaatcttggttacaccgtccgcttttcaggacacggatacgaagaacacgcccccttcgacaaccatgccgccgacagcgcaagcaaagaacaaggcaacgtcaacgaaggctttaccgtataccggctcaactgggaaggacacgaacatcatcccgccgatgcctacgacggcccgaagggcggcaattaccccaaacctacgggtgcacgcgacgaatacacctatcacgtcaacggcacagcccgcagtatcaaactcaatccgaccgacacccgcagcatccggcaacgcatatccgacaactacaacaacctcggcagcaatttctccgaccgcgccgatgaagccaacagaaaaatgttcgagcacaatgccaagctcgaccgctggggcaacagcatggagtttatcaacggcgtcgccgccggcgcgctcaacccctttatcagcgcgggcgaagccttgggcataggcgacatactgtacggaacgcgctatgccatagacaaagccgcaatgcgcaacatcgcccccttgcccgccgagggcaaattcgccgccatcggcggcttgggcagcgtggcgggctttgaaaagaatacgcgcgaagccgttgaccggtggatacaggaaaatcccaatgccgccgaaaccgtcgaagccgtcttcaacgttgccgctgccgccaaagtcgcgaagctggcaaaggcggcgaaaccggggaaagctgcggttagcggggatttttctgctgcatacaatacaagaacaactagaaaagttactacagaaacagaggggttaaatagaatcagacagaaccagaaaaatagtaatatacatgagaaaaattatggaagagataatcctaatcatattaatgttttatctggaaattctatacaacatatactgtatggagatgaagcaggaggtgggcatctttttcctggcaaacctggtaagacaacattcccccaacattggtcagccagtaaaataactcatgaaattagtgatatcgttacatccccaaaaacgcaatggtatgcacagactggaacaggcggcaaatatattgctaaaggaagaccagccaggtgggtatcatatgaaacgagagatggaattcgtatcagaacagtttatgaacctgcaacaggaaaagtggtaactgcattccccgatagaacctctaatcccaaatataaccctgtaaaataa

SEQ ID NO: 36392 - DNA, 1071 bp, Neisseria meningitidis
atgaacctgatttcacgttacatcatccgtcaaatggcggttatggcggtttacgcgctccttgccttcctcgctttgtacagcttttttgaaatcctgtacgaaaccggcaacctcggcaaaggcagttacggcatatgggaaatgctgggctacaccgccctcaaaatgcccgcccgcgcctacgaactgatgcccctcgccgtccttatcggcggactggtctctctcagccagcttgccgccggcagcgaactgaccgtcatcaaagccagcggcatgagcaccaaaaagctgctgttgattctgtcgcagttcggttttatttttgctattgccaccgtcgcgctcggcgaatgggttgcgcccacactgagccaaaaagccgaaaacatcaaagccgccgccatcaacggcaaaatcagcaccggcaataccggcatttggctcaaagaaaaaaacagcattatcaatgtgcgcgaaatgttgcccgaccatacgcttttgggcatcaaaatttgggcgcgcaacgataaaaacgaattggcagaggcagtggaagccgattccgccgttttgaacagcgacggcagttggcagttgaaaaacatccgccgcagcacgcttggcgaagacaaagtcgaggtctctattgcggctgaagaaaactggccgatttccgtcaaacgcaacctgatggacgtattgctcgtcaaacccgaccaaatgtccgtcggcgaactgaccacctacatccgccacctccaaaacaacagccaaaacacccgaatctacgccatcgcatggtggcgcaaattggtttaccccgccgcagcctgggtgatggcgctcgtcgcctttgcctttaccccgcaaaccacccgccacggcaatatgggcttaaaactcttcggcggcatctgtctcggattgctgttccaccttgccggacggctcttcgggtttaccagccaactctacggcatcccgcccttcctcgccggcgcactacctaccatagccttcgccttgctcgccgtttggctgatacgcaaacaggaaaaacgttga

SEQ ID NO: 36393 - DNA, 375 bp, Neisseria meningitidis
atgaaaaattttaatgtagtaaaagaaagtttaagagagttaggaattaaacaaggatttgatctttatgagaaagccacaactgaaaaattgaatagtgaagatcctcttgacttacaatggctttctaactattcatctgattggaatgatgaattagaagaagactttgattctttttttcagcatatgaaggaatatcaatatgctattgacaatgaagacattaaatctgcatgtagttcactatgtgaagctatgctctatgttggtaatattaaaaatttttttgagtttctcaaaagcgatatgattagactgttgagaggtgaaagtaaaacaacagactttcaatggccgcaatttgatgaatag

SEQ ID NO: 36394 - DNA, 441 bp, Neisseria meningitidis
gtgaacatccgccgtgccgtttatgccgattgcgcggcactcgccgcactcgatgccgtctgcaacccgtccgcgtggacgcaacgccaatttgagtccgcattggtttcgccgtccgaacaggttttccttgcggaaaaagacggcaggttggccgcctttatcgtttggcagaacctgcccgacgaatccgaactgcacctgattgccaccgcgcccgaatgccgccgccgtggtgttgcgtccgccctactcgaatactggttcgccaacctgcccgaaggcacgcaacgcctgctgctcgaagtccgcgcgggcaacaccgctgcacaggcgctgtacgcggcacacggctttaccgatgcgggcaggcggaaaaactattaccgtacagccgacggtaaaaccgaagatgccgtcttaatggagaaaatatgttaa

SEQ ID NO: 36395 - DNA, 375 bp, Neisseria meningitidis
atgcaatatctgattgtcaaatacagccatcaaatcttcgttaccatcaccattttggtattcaacatccgtgttttcctactttggaaaaatccagaaaagcccttggcgggcttttggaaggcactgccccaccttaacgacaccatgctgctgtttacgggattgtggctgatgaaaattacccatttctccccgttcaacgcgccttggctcggtacaaaaatcctgcttctgctcgcctatatcgcattgggtatgatgatgatgcgcgcccgtccgcgttcgaccaagttctacaccgtttacctgctcgccatgtgttgcctcgcctgcatcgtttaccttgccaaaaccaaagtcctgcctttctga

SEQ ID NO: 36396 - DNA, 369 bp, Neisseria meningitidis
atgcggatattcaaaaaccaatggatagtgaaatttgccaagaaacataaaatcagtgattccgagctgctggaagcggtagagagggcggataacgggctgatagacgcagatttaggcggcggtgtgattaagcagcgcatagcaaggcaaggacaaggcagaagcggcggctatcgcagcctgatattgttcaaacaggcagatagggcatttttcgtttacgcctttgccaagaacgacagagaaaacatttcggataaagaactggacgtttaccgaaaagccgccgcatattatctgaaatacacgcgggcagagctggcggctttgaaagaagacggcattatcacggagatagaatcatga

SEQ ID NO: 36397 - DNA, 510 bp, Neisseria meningitidis
atgattatcctgcacaccaacaaaggcgacatcaaaatcgaactcgatttcgacaaagcccccgttactgctaaaaacttcgagcaatacgttaaagacggcttctacgacggcgtaatcttccaccgcgttatcaaaggcttcatgattcaaggcggcggcatggatgaaaacatgaacgaaaaagaaacccgcgatccgattcaaaacgaagcgtccaacggcctgcccaacgataaatacaccatcgccatggcacgcacttccgacccccattccgccagcgcgcaattcttcatcaacactgccgacaacgctttcctgaacttccgttctaaagagctgtacggcaaaaccgtcgtccaagactggggctatgcagtattcggtaaagtcgttgacggttttgacgttgtcgatgccatcgaaggcgtatccaccaaacgccacggctaccatgacgacgtaccgagcgaacctgtcgtcatcattaaagccgaagcggtataa

SEQ ID NO: 36398 - DNA, 1434 bp, Neisseria meningitidis
atgtctcaatatgatgtagtagtgattggtgcaggcccgggcggatacgttgccgccatccgtgccgcacaactgggtttcaaaactgcctgtgtcgatgcaggcgttaacaaagcaggcaatgcccctgcattgggcggtacttgcttgaacgtaggctgtatcccttctaaagccctgttgcaatccagcgaacatttccacgctgcgcaacacgattttgccgaacacggtatcactgtcggcgacgtaaaattcgacgcggccaaaatgattgagcgcaaagatgccatcgtgaccaaactgaccggcggcgtgaaattcctgttccaaaaaaacaaagtaaccagcctgttcggtactgcttcctttgccggtaaaaatggcgatgcttaccaaatcgaagtcgataacaaaggcgagaaaaccgttatcgaagccaaacacgtcatcgtagcgaccggttccgtaccgcgtccgctgccacaagtcgctatcgacaacgttaacgtattggacaacgaaggcgcattgaacctgaccgaagtacctgccaaactcggcgtgatcggttccggcgtgattggtttggaaatgggttccgtatggaaccgcgtgggttcagaagttaccattcttgaagccgcaccgactttcttggctgccgccgaccaacaaatcgccaaagaagccttcaaatacttcaccaaagagcaaggtctgagcatcgaattgggcgtgaaaatcggcgacatcaaatctgaaggcaaaggtgtttccgttgcttacgaaactgctgccggcgaagccaaaaccgaagtattcgacaaactgatcgttgccatcggccgtattccaaacaccaaaggcctgaacgcggaagccgtaggcttggaaaaagacgagcgcggctttatcaaagtagatggcgaatgccgtaccaacctgcctaacgtatgggcaatcggcgacgtggttcgcggcccgatgttggcacacaaagccagcgacgaaggcgttgccgttgccgaacgcattgccggtcaaaaaccgcatatcgacttcaacaacgtaccgttcgtgatttacaccgatcctgaaatcgcttgggtgggtaaaaccgaagagcagctcaaagccgaaggcgtggagtacaaaaaaggtacttcaggttttggtgcgaatggtcgcgcattggcaatgggcaaagccaaaggtacggttaaagtgttggcagacgccaaaaccgaccgcatcttgggcgtacacatgattggtccggttgtcagcgaattggttaccgaaggcgtgactgcgctcgaattcttcgccagcagcgaagacatcgcccgcattatccatgcccacccaaccttgtccgaagtggttcacgaagctgcattggcggccgacaaacgcgctttgcacggttga

SEQ ID NO: 36399 - DNA, 822 bp, Neisseria meningitidis
atgagcagtccgcgccatgtgttttacatttccgaccgtaccggtctgactgccgagaatatcggcgaggctttgctgaaccagtttggcaatctgtcgttcaaacgccatacgcatccgtttgtcgatacgccggaaaaggcgcgcgcggtggtggagaaggtcaatcggagccggcaggaaaacggtcagcgtccgattgcgtttgtcagtgtggttgatgacgaaatccgtcggattatcaaaggggcggatgcttttcagattaatttctttgagacttttttgggactgttggagaaagaactcaataccgaagccacggcatccgagcaggggcatcacagtatcggtaatacgaagcgttacgatgcgcgtatggaggcggtgaatttctcattgaaccacgatgacggggtcagcgataagaaccttcaggaagcggatgtaatcttgatgggtgtatcgcgttcgggcaaaacgccgacctgcctttacctcgccctgcaatacggcatccgtgcggcaaactatccgctgattcccgacgatttggaatcggccgatctgccgcgtatggtcaagccttatagggataagctgttcgggttgaccatccagccggaacgtttgcaggccatccgccaagagcgccgcccgaattcaacttatgccaaaatcgatacatgccgcagcgaggtggcggacgcgcagagtatgttcagacggcatgggattccgtttgcgaatacgacggataaatcagtggaagagcttgccgtacacatccttcaggcgtgcaagctcaaacgcaggttttga

SEQ ID NO: 36400 - DNA, 1635 bp, Neisseria meningitidis
atgataaaaccgaacctgaggccgaagctcggctcttccgcgctgattgccttcctttccctgtattcctcgctggtattgaattacgccttttttgccaaagttgtcgagcttcatccttttaacggcaccggggcggatatcttcctctatacgatgccggtggtgctgttttttttaagtaatttcgtttttcacgtcattgccctgcctttcgtgcataaggtattgattccgttaatattggttatcagtgcggcggtgtcttaccaagaaatatttttcaatatctatttcaacaagtcgatgttgaataatgtcttgcaaactacggctgccgaaagcgcgcgcctgattacgccgggctatgtgctgtggattgtatgtttgggcgtattgcccgcgctggcgtatatcgccgtcaaggttaaataccgcgtttggtataaggagcttttgacgcgccttgtgcttgccgccgtttcctttttgtgcgcgttgggcatcgcaatgttgcaatatcaggattacgcctcgtttttccgcaacaataaatcagtaacccatctgattgtgccgtctaatttcatcggcgcgggcgtgtcgaaatacaaagattggaagcgttccaatattccttatacgcaattggatatggcggtcgtgcaaaaccgcccggccggcagcctgcgccgtttcgtggtgctggtcgtgggcgagaccacgcgtgccgccaactggggtttgaacggttacagccgccaaactacgccgctgcttgccgcgcgcggcgatgaaattgtcaatttcccgcaggtcagaagctgcggcacatcgaccgcgcactccctgccgtgtatgttctcaaccttcgaccgcacggattatgacgaaatcaaagccgaacaccaagacaacctgctggacatcgtgcagcgcgccggcgtggaagttacctggttggaaaacgattccggctgcaagggcgtgtgcggcaaagtgccgaataccgacgttacctcgctcaacctgcccgaatactgccgcaacggcgagtgcctcgacaatatcctgctgactaagttcgacgaagccctcaacaaaaacgataaagacgcggttttaatcctgcataccatcggcagtcacggaccgacgtattacgaacgctacaccgaagccgaacgcaaattcacgccgacctgcgacaccaatgaaatcgacaaatgcgcccgcgccacgctgatcaacacttacgacaatacggttttgtatgtggaccagtttatcgacaaggttatccgcaaacttgaaaaccgcgacgatttggaaagcgtggtgcattatgtttccgaccacggcgaaagtttgggcgaaaacgggatgtacctgcacgccgcgccttacgccatcgcgccttccgggcagacgcatatcccgatggttatgtggttttccaaagccttccgccaacacgggggcatagatttccaatgcctcaaacaaaaagcggcggaaaacgaatattcgcacgaccactatttcagcacggtattggggctgatggacatttccaacagtcaaacctatcggaaggaaatggatatattggcagcctgccgccgtccgcgctga

SEQ ID NO: 36401 - DNA, 840 bp, Neisseria meningitidis
gtgaaacgaatttttctgtttttggctaccaatatcgctgttttggtcgtaatcaacattgttttggcggttttgggcatcaacagccggggcggcgcgggcagcctgttggcgtattccgccgtcgtcggcttcactggttcgattatttcgctgctgatgtccaaattcatcgccaaacaatcggtcggcgcggaagttatcgacacgccgcgcaccgaagaagaagcctggcttttgaacactgtcgaagcccaagcgcggcaatggaacctgaaaacacccgaggtcgccatctaccactcccccgaacccaatgcctttgccacgggcgcatcgagaaacagctccctgatcgccgtcagcaccggtttgctcgaccatatgacgcgcgacgaagtggaagccgtattggcgcacgaaatggcacacgtcggcaacggcgatatggttacgctgacgctgattcaaggcgtggtcaatacctttgtcgtgttcctgtcgcgcattattgccaacctgattgcccgaaacaacgacggcagccagtcccagggaacttatttcctggtcagcatggtattccaaatcctgttcggcttccttgccagcttaattgtcatgtggttcagccgacaacgcgaataccgcgccgatgcgggcgcggcaaaactggtcggcgcgccgaaaatgatttccgccctgcaaaggctcaaaggcaacccggtcgatttgcccgaagaaatgaacgcaatgggcatcgccggagatacgcgcgactccctgctcagcacccacccttcgctggacaaccgaatcgcccgcctcaaatcgctttaa

SEQ ID NO: 36402 - DNA, 2223 bp, Neisseria meningitidis
atgactaaatccaccattatctatacctacaccgacgaagctcctgcattggccactcaatccctgttgccaatcgtacaggcgtttacccgccatgccgatattgatgtcaaaaccagcgacatctctctctccggccgtattttggcggcgtttccagaatacctgaccgaagcgcaacgcgtacctgatgcgcttgccgaattgggcgaactggtgaaacaacccgatgcaaacgtaatcaaactgccgaacatcagcgcgtccgtacctcaactgactgccgcgattaaagaattacagtctaaaggctttgccgttcccgactatcctgctgaccctcaaaccgatgaagaaaaagccgtacgcgaacgctacgaccgcatcaaaggcagcgcggtaaaccctgtcctgcgtgaaggcaactccgaccgtcgcgcccctaaagcagtgaaaaactttgcgaaaaaacatccgcacagcatgggcgcatggacgaaagactcaaaaacccacgttgccaccatgcaaagcggcgactttttccataacgaacaatccgttaccgtacctgaagcgacttccgtatccatcgtattcaccgacaaacaaggcaacaaaaaagagctgcgcgcgcccgtcgccctgaaagccggcgaaatcatcgacgcgaccgtgatgagcaaaaaagccctgctcgccttccttgccgaacaagtgaaagacgcgaaagcaaaaggcgtattgttctcgctgcatatgaaagccacgatgatgaaagtgtccgacccgattatcttcggacacgccgtcaaagtgttctttgcgcctgtttttgaaaaattcggcgacaaattggctgccgccggcgtcaacgtcaacaacggcttcggcaacctgcttgccaatttggacaaactggatgcggacacccgcgcagccgttgaagctgaaatcgccgccgtttacgccgccaaccccgatttggcgatggttgattccgacaaaggcatcaccaacctgcacgttcccagcgatgtcatcgtcgatgcctctatgcctgcaatgattcgcaactccggccgtatgtgggataaagacggcaaagcgcaagacaccaaagccgtgattcccgacagtagctacgcaggcgtttatcaagcaaccatcgacttctgccgcgaacacggcgcattcgacccgacaaccatgggtaccgttcctaacgtcggtctgatggcgcaagcagccgaagaatacggttcacacaacaaaactttcgaaatcgaagccgacggccaagttcaagtcattgatgcagcgggcaaagtcctgatgcagcacgatgttgaagcaggcgacatctggcgtatgtgtcaaaccaaagacgcgcccgtcaaagactgggtacaactcgccgtcaaccgcgcccgtctgagcaatacaccagccgtattctggctcgatgaaaaccgtccgcacgacaagagcctgctcgccaaggttaaagcctaccttgccgaactggataccgacggcctcgacatccgcgtcctcgctcccgaagaagccgctaaattcagcttaggccgtctgaaaaacggcgaagacaccatctccgtaaccggcaacgtcctgcgcgactacctgaccgacttgttcccgattttggaactgggtaccagcgcgaaaatgctgtctatcgtcccattgatgaacggcggcggtatgtttgaaaccggcgcgggcggttctgcaccgaaacacgttcaacaattcctcgaagaaaaccacttgcgttgggactctttgggcgaattcctcgcactcgccgtatcgtttgaacatttggcgcaaaaaaccggcaacgccaaagcccaagtcctcgccgacactttggatgcagccaccgaaaaactgctgttgaacgacaaatcgcctaaacgcaaagcaggcgaactcgacaaccgcggcagccatttctaccttaccctctactgggcgcaagaattggcggcgcaagacaaagatgccgaactgaaagccgcatttacgccattggcagccgctttgaccgccgacgaagcgaaaatcgttgccgagctttccgccgtacaaggcaaagcggccgacatcggcggctactacgccgccaatcctgaaaaagccgcacaagtgatgcgtccgagcgtaacctttaatcaggcactaaacgccttataa

SEQ ID NO: 36403 - DNA, 1746 bp, Neisseria meningitidis
atggaacggcagacagatgaatttgcccaagcggcggcaagggcggcaatccggtttttggaacgctatgcgggttcgggcagcgaagtgcttgcaaactgtaccgaacgcctgtttcaggcattgcaaaacggtcattcgtttatccgtttgagcggtggcgaggctgacgcgctgtcggcactcgcacccgtggtcggaacatccgccgcgcctttgattttggaaggcagaaggctgtttttgggcaggatgtggcagttggaatacgatttggctgccgagataaaacgcttggcggcagccggcacgtccgcccccgacgcggcaggcgcgaggcaaaacctcgcaaaatggtttcaaggcacgggcagcgaagggcagcgcgatgccgccgccttggcactgttgcagtcttttatggtgattaccggcggacccgggacgggtaaaacgacaacggttgccaaactgctggcgctgatttgcggtgaagacgaaaatcttcccaacatcgcgcttgccgcaccgacgggcaaagcggcggcacatatggcgcgcgcgctgcaccgtgcaatcaacggttttgacgcgccggaggccgtccgccgccatttgctcaaactggaagggcaaaccgtccaccgactgctgaagctgcgcccgcccaaaatgcaggcggcgttcaaccctgtttacccgctgccgtttgacgtattggttatcgatgaagcctctatgctggatacggcattgatgctgcaacttttaaaagcggtcaaaaccggcgcgcgcgtgattctgctgggggatgaaaaccagctcccgtccgtcggaataggggcggtgctgtccgttttgtcacaaaaaaccgttttggacggagaaacgcaccaaaggctggccggcttccttccggaacacggtttcagcgtcagcgcaaatccacccgtgttggcgcaaaacaccgcccatctgtcgttcagccaccgcttcggcgacaacagcggcatcggctgccttgcccgtgccgccgtatcgggcgatgaaggggcgtgggcattgtttgaccggtttccggacgaactggaacattcggaatgcagtccgaacgctcgagtcgaaaggttgtaccgggcgcacaaagcctattggcaggcggtaaaagacggcaatatcgaagccgcatacgcaggcatctcggatatcgtggtcctggcagcttggcggcaggatgcggaagacttcaacgaagcctattgcagccatgtacgccgcaaaatgaacataccggaacatcaggcctatttcgccggagaaccgattatgatcagacagaacgactacgcgcttgaactgttcaacggcgacatcggattgattatggaagatgtcggacggcagggcagccttgccgcctattttgccgatgcggacggatttaaaaaggtagcggtaagctgcctgcccgatttcgaacccgcattcgccatgaccgtccacaaaagccaaggttcggaatatcgggaagtctggctgctgccgccttccgccgcaccttcggacgaaggggacgatgcattgtccggattgagtaaggagctgttatataccgccattacccgcgcgagggagaagttcgtattcttcggcggagaagaaaccttccggcaagctgccgccactgtcaaaacgcgtcagacggcattgggcagtatgctcgagcgggtattttcacaagaataa

SEQ ID NO: 36404 - DNA, 864 bp, Neisseria meningitidis
atgagtgagattggtttggtaaagatctattctggaaaagtgcgcgatttatatgaaatcgacgataaacgtatgctgatggtcgcttccgaccgcctgtccgcgtttgatgtgattttggacgacccgattccgagcaaaggggagattctgacgcagatttccaatttttggtttaaaaaactggcgcatattatgcccaaccactttaccggtcaaacggtttacgatgttttgcctgaaaacgaagccaaagttttagaaaaacgcgccgtcgtggctaaaaagctcactccggtgaaagtagaggcgattgtgcgcggttatctggcaggcagcggttggaaagattatcaaaaaaccggctcggtttgcggtattcggctgcccgaaggtatgcaggaagcgcaacaactgcctgaagtgatttttacgccatcgaccaaagccgcagtcggcgatcacgatgaaaacatcagctttgaagaatgcggacgcattatcggcaaagaattggcggaagaagtgcgcgccaaggcggttcggctttacaccgaagcggcggaatatgccaaatcgcgcggtattattatttgcgataccaaatttgaattcggtttggatacaaacggtacgctgacgctgatggatgaggtattgacccccgattcgagccgcttctggcctgccgaccaatataaagtcggcacaaatccgccgtcttttgacaaacaatttgtccgcgactggctggaacaaagcggttggaacaaaaaagcccctgcgccgaaagtgcctgccgatgtgattcagaaaactgtcgagaagtatcgggaagcattgactttgctgactcaggattga

SEQ ID NO: 36405 - DNA, 222 bp, Neisseria meningitidis
atgaacttcctattgtccaaactcctgctgggactgatacggttctaccaatattgcatcagcccgctgattccgccgcgctgccgttatacgccgacctgttcgcaatacgcggtcgaagcggtcaaaaaatacggcgcattcaaaggcggccggctcgccatcaagcgcattgcacgctgccaccctttcggcggacacggacacgaccccgtcccctga

SEQ ID NO: 36406 - DNA, 711 bp, Neisseria meningitidis
atgacctcatgtgaacctgttaatgaacaaaccagtttcaacaatcccgagccaatgacaggatttgaacatacggttacatttgattttcagggcaccaaaatggttatcccttatggctatcttgcacggtatacgcaagacaatgccacaaaatggctttccgacacgcccgggcaggatgcttactccattaatttgatagagattagcgtctattacaaaaaaaccgaccaaggctgggttcttgagccatacaaccagcaaaacaaagcacactttatccaatttctacgcgacggtttggatagcgtggacgatattgttatccgaaaagatgcgtgtagtttaagcacgactatgggagaaagattgcttacttacggggttaaaaaaatgccatctgcctatcctgaatacgaggcttatgaagataaaagacatattcctgaaaatccatattttcatgaattttactatattaaaaaaggagaaaatccagcgattattactcattggaataatcgagtaaaccaggctgaagaagataattatagcactagcgtaggttcctgtattaacggtttcacggtacagtattacccgtttattcgggaaaagcagcagctcacacagcaggagttggtaggttatcaccaacaagtagagcaattggtacagagttttgtaaacaatccaagtaaaaaataa

SEQ ID NO: 36407 - DNA, 2754 bp, Neisseria meningitidis
atgcggcatttgaggtacatttacagtatttacggcaatgagagaaaaatcatgcaactgcatattctgaacaatccaaaggacgcggctttggcggcggacgcggaatttctgaaacaatccctgttcaacctcctgcacgaagaagcctcgccattggttgtcgaaacggtcaaactcttgtccacttccgacgacagcgcggcattgattgaaaaagtattgccgcaattggacgaacaacaaacccacgatttaaccttggcctgcggcctgttcgcccagattttgaatatcgccgaagacgtgcaccacgaacgccgccgccaaatccacgaagaagccggacgcggcggcgcggaaggcagcctgacggaaaccgtccgcaggctcaaagcggggaaagccgacggcaaatcggtgcagcggcagttggacaatacgtccgttaccgccgttttgaccgcgcacccgaccgaagtgcaacgccaaaccgtcttaagcttcaaccgccgcatccgcgcactgttgccgcaacgcgaacgctgcaccaatgccgacgcgctggcacggctgcgccgcgaaatcgacactatcctgctgggcttgtggcagaccagcgaaacgcgccgccacaaactcagcgtcaacgacgaaatcaacaacggcgtgtccatcttcccgatgagctttttcgaagccctgcccaagctctaccgcaatatggaacacgactttcagatggtctatcccgatgtctgcgttccgaacatcctcaaaatcggcggctggatcggtggcgaccgcgacggcaatccgttcgtttctgccgaaaccttgcgttttgccttccgccgccacgccgatgccgtgttccgtttttaccgtggcgaactcgacaaactttaccgcgaactgccgctctccatccgccgcgtcaaagtcaacgacgacgtaatggcactggcagccctctcgcctgacgaagaacttgcccgcacggaagaaccctaccgccgcgccattgcttacatcatggcgcgcgctatgggcaaagcgcgcgcgctcggtttgggcatgggctgcaaattcggctttctcgagccttatgcttcggcacaagaatttctcgatgatttgaaaaaattgcaacgttcccttatcgacaacggcagccgcctgcttgccgaaggccgtctggcagacctcatccgttccgtgtccgtgttcggcttccacatgatgccgctcgacctgcgccaacacgcaggcaaacacgccgatgtggttgccgagcttttccaacacgcaggcttggaagactacaacagcctgaatgaagagcaaaaacaagccgccctgttgcgcgaattgagccatcaacgtccactgtacagtccgttcatcacatacagcgaccatactcgccacgaactggcgattttcaatgaagcgcgcaaaatcaaagacgaattcggcgaagatgccgttacgcaaagcattatttccaactgcgaacaacccagcgacctgctcgccttggcattgctgctgaaagaaagcggcctgttggcggtagaaaacggcaaaccgcaaagccgcatcaatatcgtgccgctgtttgaaaccatcgaagcgttggaaaacgcctgtccggtcatggaaaccatgttccgcctcgactggtacgatgccctgctcgaaagccgcggcaatatccaagaaatcatgctgggctactccgactccaacaaggacggcggctacgttaccagctcatggtgcctctatcaggcggaattgggcttggtcgaactcttcaaaaaatacgatgtccgcatgcgcctgttccacggacgcggcggcagcgtaggtcgcggcggcggcccttcttaccaagccattttggcgcaaccggccggcagcgtggcgggacaaatccgcattaccgaacaaggcgaagtcattaccgccaaatacgccgaccccggcaatgcccaacgcaacttggaaaccttggttgccgcgactttggaagccagcatcctgccggataaaaaagaccctgatgccaaactgatgcaggcattgtcggacgtatcgttcaaatactaccgcgaactgattacccaccccgacttcatcgactacttcctgcaaaccagcccgattcaggaaatcgccaccctcaacctcggcagccgtcctgccagccgcaagaccttagcgcggattcaagacttgcgcgcgattccgtgggtattttcctggatgcaaaaccgcctcatgctgcctgcttggtacggtttcggcagcgcggtggaaaccttgtgcgaagacaaacccgaaacgctcgccgccctgcgcgaacacgcccaaagcaacccgttcttccaagccatgctttccaatatggagcaagtgatggcgaaaaccgacatcaccctcgcggaaaactatgccggcttgagcgaatcgccggaaaaagccgccgtcatcttcggcatgattaaggaagaataccaacgcagccgcaaagccctgctcgacctgctgcaaaccgaagaacttttacgcgacaaccgcagcctcgcccgttcgcttgccttgaggattccctacctgaacgcgctcaacggcctgcaggtcgccatgctcaaacgcctgcgtaaagaacccgacaatccgcacgcgctgctgatggttcacctgaccatcaacggcgtggcgcaaggtttgcgcaatacaggctga

SEQ ID NO: 36408 - DNA, 1305 bp, Neisseria meningitidis
atgctggaaaatccggcatgggacaggattgccgatgtggtttcgggagaggatttctaccggcatgaacaccgcctgattttccgttccattgccaaattaatcaatgagagccgtcccgccgatgtgattacggttcaggaagatttgcagcggaacgaagaattggaagcggcaggcggatttgaatatctgattacgctggcgcaaaatactccgtctgccgccaacatccgccgctacgccgaaatcgtgcgcgagcgttccatcatgcgccaactcgccgaagtggggacggaaatcgcccgcagcgcctacaatccgcaaggcagggacgcggggcagcttttagatgaagcggaaaacaaagtattccaaatcgccgaaagcaccgccaaatccaagcagggctttttggagatgcccgatttgctgaaagaagtcgtacagcgcatcgatatgctctactcgcgcgacaatcccgatgaagttaccggcgtgccgacggggttcatcgacctcgacaaaaaaacctcgggccttcagcccggcgacctgattatcgttgccggtcgtccgtctatgggtaagaccgccttttccatcaatatcgccgaacacgttgccgtagaaggcaagctgccggttgccgtcttctcaatggagatgggcggggcgcaactggtcatgcgtatgctcggctcggtcggacgcttggatcaaagcgttttgaaaaccggcaggctcgaagacgaacactggggtcgcctgaacgaagcagtcgtcaaactctccgacgcgcccgtgtacatcgacgagaccccgggtttgactgcgctcgaactgcgcgcccgtgcccgccgtctcgcccgtcaatttaacaataagcttggattaatcgtcatcgactacctgcaactgatggcaggatccggccgttccgacaaccgagcttcggagctgggagagatttcacgttcgctcaaagcgttggcgaaagaattgcaagtccccatcatcgccctgtcgcaattgagccgtaccgtcgaatcgcgtaccgacaaacgcccgatgatgtccgacctccgcgaatccggtgctatcgaacaagatgccgacctgattatgttcatgtaccgcgacgaatactacaaccaagactcgcccatgaaaggccttgccgaatgtatcatcggcaaacaccgcaacggtcccgtcggtaaaatcttcctcacatggacgggacaattcaccaaattcgacaatgctgcctatattcccgaggaggcaaagatagaagattaa

SEQ ID NO: 36409 - DNA, 546 bp, Neisseria meningitidis
atgggcaaaaccgtaaccttaaccgctggacacagcaacaccgacccgggcgcggtcaacggaagcgaccgtgaggcggatttggcgcaggatatgcgcaacattgtggcttcaatcctgcgtaacgattacggcttaaccgtacgcaccgacggcacgggcaaaggcaatatgcccttgcgcgatgcggtcaagctgattcgcggctcggatgtggcgattgagtttcacaccaacgctgccgtcagcaaagcggcgacaggcatcgaagccttgagtaccgttaaaaacaaacgctggtgtcaggtgttgagcaaagctgttgccaagaaaaccggctggaaactgcgcggcgaagacggctttaaacccgacaatgcgggtcggcattcgcgcctggcttatgcgcaagccggcggcattgtgtttgagccgttttttatcagcaacgacactgatttggccttgtttaagacgaccaaatggggcatctgccgcgcgattgcggacgcgattgcgatggaattgggggcggcaagagtatga

SEQ ID NO: 36410 - DNA, 213 bp, Neisseria meningitidis
atgcctgcaatccgcgtaaaagagaatgaaccatttgaagtcgctatgcgccgtttcaaacgcgccgtagaaaaaaccggcctgctgaccgagctgcgcgcccgcgaagcctacgaaaaaccgactaccgaacgcaaacgcaaaaaagcggcagccgtaaaacgcctgcaaaaacgcctgcgcagccaacaactgccgcccaaaatgtactaa

SEQ ID NO: 36411 - DNA, 336 bp, Neisseria meningitidis
atgtttaaagattggaaagaacataccgcattggttaaaaaatcgttcggcgagctgggtaaggcgcatcctaaaatgctgcaggcctacggcgcattggaacaggccgccgccgccgaagcacttgatgccaaaacgcgcgaactgattgccatcgccgttgccattaccacacgttgtgagagctgcatcagtgttcacgccgccgccgccgccaaagccggtgcgaccgacagcgaaatcgcaggcgcattggcaaccgccatcgccctgaatgccggtgccgcttacacttacgccctgcgtgcattggaagcggttgaaacgcaaaaataa

SEQ ID NO: 36412 - DNA, 435 bp, Neisseria meningitidis
ttggccgaaggtcaaaaatcagccgtcacagagtattacctgaatcacggcaaatggcccggcgacaacagttctgccggcgtggcaacctccaccgacatcaaaggcaaatatgttcaaagcgttgaagtcaaaaacggcgtcattaccgccacaatgctttcaagcggcgtaaacaacgaaatcaaaggcaaaaaactctccctgtgggccaagcgtcaaaacggttcggtaaaatggttctgcggacagccggttacgcgcgccgacgccaacggcgccaacaacgacgaagtcaaagccgccaccggcaccaccggcaccaccggcaccaccggcaacatcgacaccaagcacctgccgtcaacctgccgcgacgcagcatctgtcgtttgcatagaaacaccacctacggctttctataaaaatacctaa

SEQ ID NO: 36413 - DNA, 441 bp, Neisseria meningitidis
atgatgcagactttccgaaaaatcagcctgtatgccgcaaccttgtggctcggtatgcagattatggcgggttatatcgtcgcgccggtgctgttcaaaatgctgcccaaaatgcaggcgggcgaaattgccggcgtattgttcgacatcctctcttggagcgggcttgccgtttggggcgcggtactggctgccgcctttgccgccctaacccggcggcaaaccgccctgctgctttttttattgtccgcccttgccgccaaccgattcttgattacacccgttatcgaggcactgaaatacggacatgaaaattggctgttgtcgtttgtaggcggatccttcggaatgtggcacggcatttccagtattgtttttatggcaaccgccctactttcagcagttttaagttggcggctttccggcaaagatgccgtctga

SEQ ID NO: 36414 - DNA, 483 bp, Neisseria meningitidis
atgaacctgctgacactgttacgccccgccaccgtgcaagactgcaaagacatcttcaaagtccacctgcactccgtccaatacacctgcatcctcagctacaacgaacacgccctaaaagtatgggaaggcttgttaaacacagaaagctacctgccgaccatttcagatcccgacaaagcactttgggttgccgaatacaaaggcaacatacagggatttttccaaatcgactgccaagaagcacaactcgatgcgctttacgtccaccccctgttccacaacctcggactgggcactgccctacttcatcaggcggaaaccatcgcccacaaatccggtttgagctttctgaaactctacgcatcgctcaactccgtcccgttttaccttctcaaccgctacgaatcgctcggttcggcagtattgcagcttgaccccagcatcaaaatcaaatgcgaactgatgcgcaaacacctctaa

SEQ ID NO: 36415 - DNA, 663 bp, Neisseria meningitidis
atgtcaaaccaacaagccttggtcatcttttcgggcggtcaggattcgaccacctgcctgattcaggcaatccaaacctacgggcgcgaaaacgtccaagccatcactttccaatacgggcaacgccatgccgtcgagctggaacgcgcccgctggattgcgcaggatttgggcatcaaacaaaccgtactcgacttgagcctgatgcggcagattacgcacaatgccctgatggacgataccgccgccatcgaaactgccgaaaacggcgttccgaatacctttgtagacggccgcaacgcgcttttcctgctctatgccgcgatttacgccaaagggcaggggatacggcacatcatcgcgggcgtgtgcgaaaccgacttctccggctatcccgactgccgcgacgtgtttgtcaaatcgatgaacgttacccttaatttggcgatggactatgattttcaaatccacacgccgctgatgtatctgaccaaggcgcaaacttgggcgttggcggacgaaatgggcgcgctggactatatccgcgagcaaacccacacctgctataacggcatcgtcggcggcggctgccgcgaatgcccgagctgtatcttgcgcgaacgcgggctggcggaatatctggaaagtaaaaaggccgtctga

SEQ ID NO: 36416 - DNA, 156 bp, Neisseria meningitidis
atggacgctaaacatcggctgaaaaaatacgtttaccacctgttggtagccatcgaccaactgttcaacgccctaaccggcggcgcggcggacgaaaccctctcaagccgcacctatcgcggcgcgcggctcgcccaaaagcccaaaacccgctga

SEQ ID NO: 36417 - DNA, 1287 bp, Neisseria meningitidis
atgacggcacaacaccaaaccccgctccgcttcattaccgccggcagcgtcgatgacggcaaaagcaccctaatcggacgactgctctacgacagcaaagccctgctgtccgaccaaatcaaaaccttggaatccggcaaaagcaaaggtttgaaagaaaccatagacttctccatcctgaccgacggactggaagccgaacgcgaacagggcattacgatcgatgtggcataccgctatttttccacggcgaaacggaaattcatcatcgccgacacgccggggcacgaacaatacacgcgcaatatggttacgggcgcaagcaccgcttcggcggcagtcgtgctggttgacgcatcccaactggatttcggcgcgcagcccttgcagcttctgccgcagaccaaacgccattccgccatcctccgccaactcgactgcccgcatattgtggtggcggtcaacaaaatggacctgctggattacagcgaagacaaattcaacgccattgtggaggcataccgccgacttgccgaacagctcggtttgaaagacgtgcatttcgtaccggtgtccgcactcttgggcgacaacattgtttaccccggcggcaatatgccttggtataaaggcgaacccttattgtccattttggaaaccctgccgggggcggacgaagtcagccgcaccgccgacgatttttatttccccgtgcaactggtcgtccgccaagatgccgacaaggccgatgatttccgaggctatcaggggcgcatcgaacgcggttcggtcgccgtcgggcaaaccgtccgcatcgaaccgaacgggctgaccgccgaagtgtccgaaatcatcacgccgaaaggggaagtggcgcaggcttttgccggcgaggcggcaaccctccggctggaccgcgacatcgatgtttcgcgcggcgacctttttgtcgataaaaattccccgctcgccccgcaaaaacatctggaagccacgctttgctggtttgacgaacgtccgctcaacaccgcgcgcaaatacctgctcaagcacggcacgcaaaccgtgccggcaaaagtcggggaaattgaaagcgttttggatgtccgcacgctggaacaagaggccggcgcggaatccttgaagatgaacgacatcgccaaagtccgcatcaaccttcaaaaacccgttacggcaacgccttatgcggaaaacaccgccgccggttcgtttatcctgatagacgaagcgacatacggcactgttgcggcaggtatgattttatga

SEQ ID NO: 36418 - DNA, 1215 bp, Neisseria meningitidis
atggataaatttcccaagtctgcaaagctcgatcacgtctgttacgacatacgcgggccggttcacaaaaaagcccttcagttggaagaggagggcaataaaatccttaaactcaatatcggcaaccctgcgccgttcggctttgaagcccctgatgaaatcttggtcgatgtcatccgcaacctgccgacttcgcaaggctattgcgattctaaagggctgtattccgcccgcaaagccattgttcactactatcagaccaaaggtttgcgcgatattacggttgatgatgtctatatcggcaacggcgtgtccgagctgattacgatgtctatgcaggcattgctcaacgacggcgacgaaatcctgattcccgcgcccgactaccctttgtggacggcggcggcaacgcttgcgggcggtacggtacgccattatctgtgcgacgaagaaaacggctggttccccaaccttgccgatatggaagccaaaatcacgcccaaaaccaaagccatcgtcgtcatcaatcccaataatccgacaggcgcggtgtacagcagggaaatcctgttggaaatcgccgaactggcgcgcaagcacggtttgattattttcgccgacgagatttacgataaaatcctttatgacggcgcggttcaccaccacatcgccgcgcttgcccccgaccttttgacggtaacgttcaacggtttgtccaaatcctaccgcgtcgccggcttccgccaaggctggatggtgctcaacgggccgaaacatcacgcaaaaggttacatcgagggtttggatatgctctcgtccatgcgcttgtgtgccaatacgccgatgcagcacgcgattcagacggcattgggcggctatcagagcattaacgaatttatcctgccgggcgggcggcttttggaacagcgcaacagggcgtgggaactggtcagccaaatccccggcgtgtcctgcgtcaaaccgatgggcgcgatgtatatgttcccgaaaatcgataccgaaatgtaccgcatccgcgatgacatgaaattcgtttacgatttgctggtgcgcgaaaaagtcttgctggtgcagggaacggggtttaattggattaaacccgaccatttccgcattgttacgctgccttacgtccatcagattgaagaggcgatgggcaggctggcaagattcctgcaaacctaccgccaataa

SEQ ID NO: 36419 - DNA, 252 bp, Neisseria meningitidis
ttgcacatttacaatgtcgaagatgtatccgataaacatatccccaatcatgtcttgattttatgggatgatgcctgcaccatagccgcattgtgtatcaacgactacattcatgccgtctatgattttgtcgaacaggcaggatattgccgcaacggcttccctgaagcacaaggcgaatggccgaaagtcacagaccgcgtattggacgatgaattgcaggacaaaatcctatcccgaaaacctacataa

SEQ ID NO: 36420 - DNA, 870 bp, Neisseria meningitidis
atgaagcacatctttttgcccgccttgcccgccatcctgcctttatccgcttatgccgacctgcccttgacgattgaagacataatgaccgacaagggcaaatggaaactgaaaacttcccttacctacctgaacagcgaaaacaaccgcgccgaacttgccgcaccggtttacatccaaaccggcgcaacctcgtttatccccattccgaccgaaatccaagaaaacggcagcaataccgatatgctcgttggcacgctcggtttgcgctacggactgaccgggaataccgacatttacggcagcggcagctatctgtggcacgaagaacgcaaactcgacggcaacggcaaaacccgcaacaaacggatgtccgacgtatccctcggcatcagccacactttccttaaagacgacaaaaaccccgccctaatcagctttcttgaaagcacggtttacgaaaaatcgcgcaacaaagcctcgtcgggaaaatcctggctcatcggcgccaccacctacaaagccatagatccgattgtcctttccctcaccgccgcctaccgcatcaacggcagcaaaaccctttcagacggcatccgctacaaatcgggcaactacctgctgctcaaccccaacatctcatttgccgccaacgacagaatcagcctgaccggaggcatccaatggctgggcacacagcccgaccgcatagacggcaaaaaagaaaccgcaagaaacacatccacctacgctcatttcggcacaggtttcggtttcaccaaaaccacggctttaaacgcatccgcacgtttcaacgtttcagggcaaagcagttccgaactgaaatttggcgtacagcatacattttaa

SEQ ID NO: 36421 - DNA, 624 bp, Neisseria meningitidis
atgaaacgattgactttattggcctttgttttggctgccggtgcggtttccgcctctcccaaagcagacgtggaaaaaggcaaacaggttgccgcaacggtttgtgcggcttgccatgcagcagacggtaacagcggcattgcgatgtatccgcgtttggcggcacagcatactgcttacatctatcatcaaactatcggcatccgcgacggtaaacgcacccacggttcggcagctgtgatgaaaccggtggtaatgaatttgagcgatcaggatattttgaacgtatccgcattctatgccaaacagcagcccaaatccggtgaagccaatcctaaggaaaatcccgaattgggtgcgaaaatctatcgcggcggtttgagcgataaaaaagtgccggcgtgtatgtcctgccacggtccgagcggtgcgggtatgccgggaggcggaagcgaaattcaggcttatccgcgtttgggcggtcagcatcaggcatatattgttgaacagatgaatgcctacaagtccggtcagcgtaaaaataccatcatggaagatattgcaaaccgtatgtctgaagaagatttgaaagcggtcgccaactttatccaaggtttgcgttaa

SEQ ID NO: 36422 - DNA, 993 bp, Neisseria meningitidis
atgaaaacgcacgaaataagcaaagattcggtcagcttgataggggttgccgaacatgaggcgggtcaacgccttgataactatctgataaaaatcctcaagggtgttcccaagagccatatccaccgcattatccgcgccggcgaggtgcggttgaacaagaaacgctgcaaacccgacagccgtattgcggagggggatacggtgcggattccgcctgtgcgcgtggcggagaaggaaatgccgtctgaaaggcgtgccgccgtaccggcgcgtgcgtttgacgttgtttacgaagacgatgcgcttttggtcatcgacaaaccgtccggcgttgccgtccacggcggcagcggcgtgagtttcggcgttatcgaacagttgcgccgcgcccgtccggaggcgaagtatttggagttggttcatcgtttggacaaggatacgagcggcttgttgatggtggcgaagaaacgcagcgcgctcgtcaaacttcacgaagccatccgtaacgaccaccccaaaaaaatctaccttgcgctgggggtgggcaaactgccggacgacaatttccatgtcaaactgcccctgttcaaatataccggcgcacaaggcgaaaagatggtacgcgtcagcgaggacgggcagtcggcgcacacggtgttccgtgtgttaagccgtttttcagacggcattttgcacggtgtcgggctgtcgcacctgactttggtgcgggcaacgctgaaaacgggtcgtacgcaccaaatccgcgtccacctgcaatctcaaggctgtccgattgcgggcgacgaacgctacggcgattatcaggcgaaccgtcgtttgcagaagttgggtttgaagcggatgtttttgcacgcgtccgagctgcacttgaaccatccgctcacgggcgagccgctggtgttgaaggcggagctgccgccggacttggcacagtttgcggtgatgttggaaaacgggacgaaaatgtga

SEQ ID NO: 36423 - DNA, 1443 bp, Neisseria meningitidis
atgaaacaattggccatgtacatcaacggacgctttgaaaacgatttcaacggcgaatggcgcaacgtattgaacccgtccaccgaagaggccatcgcccgcgaacccaaaggcggcaaagcagacgttgaccgcgccgtagcggcggcgcgtgcggcgcaaccggcttgggagcgtctgcctgcggtcgaacgcggcgcgtatttgcgcaaaatcgcccaaggcatacgcgaacgcgccgacgagctgaccgacaccattgtcgccgaaggcggcaaaaccaaagacttggcgcgcgtggaagtgatgttcaccgccgactatctcgattaccaagccgaatgggcgcgccgttacgaaggcgaaatcatccaaagcgaccgtccgcgcgaaaatattttattgttcaaacgtccgctgggcgtaattgccggcattttgccgtggaacttccccttcttcctgattgcccgcaaaatgggccccgctttggtaacgggcaataccatcgtcgtcaaacccagcagcgtaaccccgatcaactgccacatcttcgccgaaatcgtcgatgcggtcggactgcccgccggcgtgttcaacgtggtgaacggcccgggcgcggaaatcggcaatgccttgtccgcccatcccgcagtcgatatggtcagcctgaccggctccgtcgaagcgggccgccaagtgatggaagccgcttccgccaacatcaccaaagtttcgttggaactcggcggcaaagcccccgccatcgtgttgaaagacgcggatttggatttggcggtgaaatccatcttggcttcgcgcgtcggcaacaccggtcaaatctgcaactgcgccgagcgcgtctatgtccacagccacctgaaagacgcgtttatcgaaaaaatgaccgccgcgatgaaaggcgtgcgctacggcaaccctgccgaagccgaagcaggcgcattggaaatgggcccgctgattgaagagcgcgccgtcaaagccgttgccgaaaaagtggaacgggcagtcaaacaaggtgcgaaattggtttgcggcggcaaacgcgccgaagggcgcggctatttcttcgagccgaccctgctgaccgacaccgacaacagtatggacattatgaaagaagaaaccttcggccccgtgctgcccgtttccgctttcgacacgctcgaccaagtcatcgcactggctaacgattgcgagtttggtctgaccagttctgtttatacgactaatttaaacgaagccttctacgttacccgccgcctgcaattcggcgaaacctacatcaaccgcgaaaacttcgaagccatgcagggtttccacgccggttggaaaaaatccggtatcggcggcgcggacggcaaacacggtttggaagaatatctgcaaacccaagtcgtttatttggaaaccgacatttaa

SEQ ID NO: 36424 - DNA, 1176 bp, Neisseria meningitidis
gtgtttaaagtgaaattttatattcgtcacgcagtattattatggtgtggaagtttaattgtaggatgctctgcgattccttcatcaggccccagcgcaaaaaaaattgtctctttagggcaacaatctgaagttcaaattcctgaagtggagctgattgatgtgaatcatacggttgctcagttattatataaggctcagataaatcagtcattcactcagtttggcgatggttatgcttcggctggtacgctaaatattggtgatgtattggatattatgatttgggaagcgccgccggcagtattgtttggtggtggcctttcttcgatgggctcgggtagtgcgcatcaaactaagttgccagagcagttggtcacggcacgtggtacggtttctgtgccgtttgttggcgatatttcggtggtcggtaaaacgcctggtcaggttcaggaaattattaaaggccgcctgaaaaaaatggccaatcagccacaagtgatggtgcgtttggtgcagaataatgcggcgaatgtgtcggtgattcgtgctgggaatagtgtgcgtatgccgctgacggcagccggtgagcgtgtgttggatgcggtggctgcggtaggtggttcaacggcaaatgtgcaggatacgaatgtgcagctgacacgtggcaatgtagtacgaactgttgccttggaagatttagttgcaaatccgcgacaaaatattttgctgcgtcgcggtgatgtggttaccatgattaccaatccctatacctttacgtctatgggtgcggtggggagaacacaagaaatcggtttttcagccagaggcttatcgctttctgaagccattggccgtatgggcggtttgcaagatcgccgttctgatgcgcgtggtgtgtttgtgttccgctatacgccattggtggaattgccggcagaacgtcaggataaatggattgctcaaggttatggcagtgaggcagagattccaacggtatatcgtgtgaatatggctgatgcgcattcgctattttctatgcagcgctttcctgtgaagaataaagatgtattgtatgtgtcgaatgcgccgttggctgaagtgcagaaattcttgtcgtttgtgttctcgccggttaccagtggcgcgaacagtattaataatttaactaattaa

SEQ ID NO: 36425 - DNA, 990 bp, Neisseria meningitidis
atgaaaattaccgttatcggcgcaggttcgtggggtacggcgctcgccctgcacttttcccaacacggcaaccgcgtatccctgtggacgcgcaacgcagaccaagtccgccaaatgcaggaagcgcgtgaaaacaaacgcggactgcccggcttttcctttcccgaaaccttggaagtgtgtgcggatttggcagacgcgctcaaagacagcggacttgtccttatcgtaacctccgttgccggattgagaagcagcgcagagctgctcaaacagtacggcgcgggacacctccccgtcctcgccgcctgcaaaggattcgagcaggatacagggctgctgacctttcaagtattgaaagaagtattgcccgacaataagaaaatcggcgtactctccggcccgagttttgcacaggaactcgccaaacaactgccctgcgccgtcgtcctcgcctccgaaaaccaagagtggattgaagaactcgtaccgcagctcaacacgaccgtcatgaggctttacggcagtaccgatgttatcggcgtggcggttggcggcgcggtaaaaaatgttatggcgattgccaccggattgtccgatggcctagagtacgggcttaacgcccgtgccgcactggttacgcgcggattagctgaaatcacccgccttgcctccgcaatgggcgcacagcccaaaaccatgatggggctggcaggcatcggcgacctcatcttgacctgcaccggcgcactctcacgcaaccgccgcgtcggcttgggtttggcagaaggcaaggaactgcatcaggtgctggtcgaaatcggacacgtttccgaaggggtcagcacgatagaagaagtcttcaatactgcctgtaagtaccaaatcgacatgccgattacccaaaccctgctgcaactcatccgcaaagaaatgacccctcagcaggtcgtcgaaaggctgatggaacgtagcgcgcgttttgaataa

SEQ ID NO: 36426 - DNA, 213 bp, Neisseria meningitidis
atgtctggtatctacctaccccgcctattcccgccccatatcgccgaacgcggcctgttgtattttcagcagggcaaggttctcgatgtccgaaaaacttccgccgggcattatcgggcggaggtgtgcggttcggaaaactattgggtatggctgaagctggatagtgatttgtatattaaagacgaaagctgcgattgcccttatgtctaa

SEQ ID NO: 36427 - DNA, 2427 bp, Neisseria meningitidis
atgtcggcacaaaccgatccgggctactttttcatgcccaaccacattattctgataggcgcgagcgaacgtccgtacagcctgggcgaacgcgtactcagcaacctgctgagtacgccctttcaaggaaaaatcacccccgtaaacccgcgccaccacaccatagccgggcttcccgcctacaccagcctcaacaaaatccccggcagtgcagacctgattattgccgttaccctacccgacagttacgacaccctcttcaaaacctgccgcaaaaagcagctccgacacatcatcctcatacaggactgggacagcctgcctgccgcagaactgcacaccgccgaaactgccatccgcaaacaccacggcaacggactcaacatcaccgcctgcaccaccgcaggcatccaactgccctcactcggacttaacatcagtacccaagacggatacgccgcaggccataccgccatactgaccggcaatgccgccgtcagccgccaaatcgacaacatcctgaacaaactccgtcaaggcacatcccgccacatcagcctgcatcccggcatcagccccatcacttcctcagactggctcaaccgcttcggacacagcctgcacaccaaaaccgccgtcctacaccacaaccctgaagaggatcagcgcaaactgttcagcgcaatccgccaatttacccgccatacgccgctgattctccacatcacctgccgcacgacagaaaccgaccgtgccgtactgcactgcctcgcccgacactgcaacttcctcatcagtttcaacgccgacgaccttgaagccgcactgcgcgcccaactgtccgaccttccacccctgtcccgactcgacatcctgtccgacacgcctgccgaatggctgaacgcgcacgcgccaaaaaccctcgccctccactttcccaaccttccccaccacatccgcaacggacacctgaccggcacacccacaccctcaatctgccacgacatcgcctcacgtcagcttgcccgccccgacacccaagccgtcctgaccatcctcagcccctccggacacgaggattacaaaaaaacagcacgcgcccttatccgcctgtccgaacagaccgccaaacccctgctcgtcagcagccccttttcagacggcataacccatttcgacacccccactcaggcaatccgcaccctttcctaccgcaacaccgccgccgccctgaaacaggcacagctcgacattgcaccgccgcaaccgtgccgtctgaaaacaccgcaaccccaaaacatcaaaaaagccctcgaagccgccgaccccgccctgctcgccgaagccctgcacctccccccctaccggcacactacccataacgccgtccaattccaattcggcagccaccccctctatggcgacatcctgaccgcatgctgcaacggacaaaccactgccgtactcccgccgtttaccacgctcgacagccgccaccttgcccgctttgccgaactcgacggcacacaaaccctcgaccagttcctgcacacactgaccgtcattcccgaataccgccaacacattctcggcatcaccctcaacctcaacggcggacaatacagcagcgatttcatcttaaagacacccgaaacacacgacacgcccaaacgcaagaacacaggcaaagccgcccaaaccctcgaacatgccgccgcaaaaatgcagagtgccgccgcatacctgaaacacaaaaacccgacagccgccgaatttctccgccacacaagcgaagccgccgcagaactgctcggcagcaaaaccgaaaccggagcagccgtacccaacgtacttgccccctatcccgcagcacacctcaaaacactgtccctaaaaaacaacacgaccgttaccattaccccccttttgcccgaagacgcagaagccaaacagcagttcgtccgcagcctcagccccgaagcacggtacacacgcttcatgacccacaccaacgaactgcccgcagccacgttggcacgcctgtgcaaccccgactaccactgtgaagccgcatggacggcaagggatgccgacagcaacatcgtcgccgtcgtccgccacagccgcctgaaccgcaacgaatgcgaattcggcatcacactggcggaacatatgcgcggcagcggactggcacagaaaatgatggaactcatcatccaaaccgccgcacagcaaggctaccggactatgagtgccgacattctcaaaaccaatactcccatgatcaaacttgctgaaaaatcaggatttaccctcaaggaatcggacaccgaaaaaaacctgtaccgcgcatatctgaaccttgcggcagacaaaacaacagaaaaaacaaataaaaacttgcgcaccgaccacaaaataacctaa

SEQ ID NO: 36428 - DNA, 717 bp, Neisseria meningitidis
atgttgttccgtaaaacgaccgccgccgttttggcggcaaccttgatgctgaacggctgtacgttgatgttgtggggaatgaacaacccggtcagcgaaacaatcacccgcaaacacgttgacaaagaccaaatccgcgccttcggtgtggttgccgaagacaatgcccaattggaaaagggcagcctggtgatgatgggcggaaaatactggttcgtcgtcaatcctgaagattcggcgaagctgacgggcattttgaaggccgggctggacaagcccttccaaatagttgaggataccccgagctatgcccgccaccaagccctgccggtcaaactcgaatcgcccggcagccagaatttcagtaccgacggcctttgcctgcgctacgataccgacaggcctgacgacatcgccaagctgaaacagcttgagtttgaagcggtcgaactcgacaaacagactatttacacgcgctgcgtctctgccaaaggcaaatactacgccacaccgcaaaaactgaacgccgattaccattttgagcaaagtgtgcctgtcgagatttattatatggttaagggagaatataccgacaaactcaagctgtttggaaatatcttatatacgccccccttgttgatactggatgcggcgggcgcggtactggccttgcctgcggcggctctgggtgcggtcgtggatgccgcccgcaaatga

SEQ ID NO: 36429 - DNA, 630 bp, Neisseria meningitidis
atgagtgaaaccgaaaatcaagcattgacatttgccaaacgcttgaaggcggataccacggcggttcacgacagcgtggataacctcgttatgtctgtccaaccgtttgtcagcaaagaaaactacattaaatttttgaaactccaatccgttttccacaaggccgtcgaccacatctataaagatgccgaattaaacaaagccattcccgagctggaatacatggcgcgatacgatgccgtaacgcaagacttgaaagacttgggcgaagagccttacaaattcgacaaagaattgccacacgaaaccggcaacaaagcaatcggctggctttattgcgccgaaggatccaatttgggcgcggcatttttgttcaaacacgcccaaaaactcgattacaacggcgaacacggcgcgcgccacctcgcaccccatcccgacgggcgcggcaaacactggcgcgccttcgtcgagcatctgaacgctttgaacctgactcccgaagccgaagcggaagccatccaaggcgcgcgcgaagcctttgcattctacaaagtcgtgttgcgcgaaaccttcggcttggcagccgatgccgaagcaccggaaggaatgatgccgcacaggcactaa

SEQ ID NO: 36430 - DNA, 822 bp, Neisseria meningitidis
atgaatccagcccccaaaaaccttctcttctcttctcttctcttctcttctcttctcttctcttctcttctcttctcttccgcagcgcaggcggcaagtgaagacagcagccgcagcccgtattatgtgcaggcggatttagcctatgccgccgaacgcattacccacgattatccgaaagcaaccggtgcaaacaacacaagcacagtaagcgattatttcagaaacatccgtgcgcattccatccacccccgggtgtcggtcggctacgatttcggcgactggaggatagcggcagattatgccagttacagaaaatggaacaacaataaatattccgtcaacacaaaagaggtatcaagaaacaatagcaatggcaatgacacctggcaagaactgaagacggaaaatcaggaaaacggcagcttccacgccgtttcttctctcggcttatccgccatttacgatttcaaactcaacgataaattcgataaattcaaaccctatatcggcgcgcgcgtcgcctacggacacgttaaacatcaggttcattcggtgagaaaagaaaccacgactgttttcagtaaaccaagtggtagcgctacaaagccaggccagatcccaagtttggttaccaaacctgcctatcacgaaagccacagcatcagcagcttgggtcttggtgtcatcgccggtgtcggtttcgacatcacgcccaagctgaccttggataccggataccgctaccacaactggggacgcttggaaaacacccgattcaaaacccacgaagtctcattgggcgtgcgctaccgcttctga

SEQ ID NO: 36431 - DNA, 1281 bp, Neisseria meningitidis
atgtttaaacgcagtgtgattgcaatggcttgtattgttgccctttcagcctgtgggggcggcggtggcggatcgcccgatgttaagtcggcggacacgccgtcaaaaccggccgctcctgttgttgctgaaaaagagacagaggtaaaagaagatgcgccacaggcaggttctcaaggacagggcgcgccatccacacaaggcagccaagatatggcggcagtttcggcagaaaatacaggcaatggcggtgcggcaacaacggacaaacccaaaaataaagacgagggaccgcaaaatgatatgccgcaaaatgccggcaatacggctgcccaaggtacaaatcaagccgaaaacaatcaagtcggcggctctcaaaatcctgccccttcaagcaatcctaatgccacgaatggtggcaattttggaagggttgatttggctaacggtgttttgattgacggaccgtcgcaaaatataacgttgacccattgtaaaagcgattcttgtaatggtgataatctattaagcgaagaagcaccgtcaaaatcagaatttgaacaattaagtgatgaagacaaaattaagaaatataaaaaagatggagaaaagtttaccggtttggttgctgataggttacagatgaaaggaaccaatcaatatattattttttacaaacctaaaaccacttcatctgcgcgattcaggcgttctgcacggtctaggaggtcgcttccggctgagatgccgctgatccccgtcaatcaggcggatacgctgattgtcgatggggaagcggtcagcctgacggggcattccggcaatatcttcgcgcccgaagggaattaccggtatctgacttacggggcagaaaaattgtccggcggatcgtatgccctcagtgtgcaaggcgaaccggcaaaaggcgaaatgcttgctggcacggccgtgtacaacggcgaagtgctgcatttccatacggaaaacggccgttcgtacccgaccaaaggcaggtttgccgcaaaagtcgatttcggcagcaaatctgtggacggcattatcgacagcggcgatgatttgcatatgggtaagcaaaaattcaaagccgccatcgatggaaacggctttaaggggacttggacggaaaatggcggcggggatgtttccggaaggttttacggcccggccggcgaggaagtggcgggaaaatacagctatcgcccgacagatgcggaaaagggcggattcggcgtgtttgccggcaaaaaagagcaggattga

SEQ ID NO: 36432 - DNA, 309 bp, Neisseria meningitidis
atgaacaaaaacattgctgccgcactcgccggtgctttatccctgtctttggccgccggtgcagttgctgccaacaaaccggcaagcaacgcaacaggcgttcataaatccgcccatggctcttgcggcgcgtccaaatctgccgaaggttcgtgcggcgcggctggttctaaagcaggcgaaggcaaatgcggcgagggcaaatgcggtgcgaccgtaaaaaaaacccacaaacacaccaaagcatctaaagccaaggccaaatctgccgaaggcaaatgcggcgaaggcaaatgcggttctaaataa

SEQ ID NO: 36433 - DNA, 267 bp, Neisseria meningitidis
atggcacgcatggtattctgcgtcaagctcaacaaagaagccgaaggcatgaaatttccaccgcttcccaacgaattgggcaagcgcatttttgaaaacgtatcgcaagaagcgtgggcggcgtggacgcgccaccaaacgatgctgattaacgaaaaccgtttaagcctcgccgatccgcgcgcgcgcgaatacctggctcagcagatggagcagtatttcttcggcgacggcgcggatgccgttcagggatacgttccgcaataa

SEQ ID NO: 36434 - DNA, 789 bp, Neisseria meningitidis
atgaaacaagctatgaaaaattggtttgctgccttgctgttggcagtacccatgggtgcggcatttgcttcgggcggtcatgcacactatgagaaagtcgatatcgatttgcgcgaccaagtcagcctgcagcgcggcgcacaaatctttaccaactattgcctgtcctgccactcggcaagcggtatgcgtttcaaccgtttgaaagacatcggtttgactgacgaagaaatcaagaaaaacctgatgtttaccaccgataatgtcggcgatgtcatgcattcggcgatgaacccgaaagatgcggcaaaatggtttggtgctgctccgcccgatttgacattgattgcgcgttccaaaggtgcagactacctttacgcttatatgcgcggcttctataaagatccgacccgtccgagcggctggaacaatactgtattcgataaagtcggtatgccccacccgttgtgggaacagcaaggcgttcaagccgttgagttggatgccaaaggtcagccggttatggtaaaagacgaacacggcgagatgaagcctaagctgtattgggaatctaccggtttgcacagccgccgtctgcctaacggcaaagtgatccaaaaagagtacgacgcatatgtacgcgatttggtcaattaccttgtgtacatgggcgaacctgcacaactgcaacgcaaacgtataggctatgtcgtgatgattttcctatttgcggttatgctgcctttggcgtatttcctgaaaaaagaatattggaaagacgtacactaa

SEQ ID NO: 36435 - DNA, 1233 bp, Neisseria meningitidis
atgggcttgaaacattttctggaaaaaatcgaaccgcacttcctgccgggcggcaaacatgaaaaatggtatgccctctacgaagcggcggcgacgattttctacacatccggtgcggtaacgcgcaaagcggcacacgtccgcgacgcgctcgactccaagcgcatgatgattttggtgtggctggctttgttccccgccatgttttacggcatgtacaacgtcggcgcacaggcattcggtgccttaacgcccgatttgctgcaacaaagcatcgccaacgactggcattacacccttgccgacgctttgggcatcaatatgtcgtctgaagcgggcgtgttgggcaaaatgctgttcggcgcgatttacttcctgccgatttacgcgaccgtatttgccgtcggcggtttctgggaagtcttgttcgccaccgtacgcaaacacgaaatcaacgaaggtttctttgttacctcgattctgtttgccttaatcgttccgcccacgctgccgctgtggcaggcggctttgggtatttctttcggcgttgtggttgcgaaagaagtattcggcggtacgggtaaaaactttatgaaccctgcgctggcaggccgcgccttcctgttcttcgcctaccccgccaacttgagcggcgatgcggtttggacggcggttgacggctattccggcgcaaccgcgctggcgcaatgggcggcacacggtgcagacggcctgaaaaacgccgtaaccggtcaaaccatcacttggatggacgcgtttatcggcaaactgcccggctccattggcgaagtctccactttggcactcttaatcggcggcgcgtttatcgtgtttgcccgcatcgcttcttggcgcattattgccggcgtgatgatcggtatgattgcgatgtcttcgctgttcaacttcatcggttcggacaccaacgccatgtttgctatgccttggtactggcatttggtcgtcggcggcttcgccatcggtatgctgtttatggcgaccgaccccgtttccgcttcctttaccaatgtcggcaaatggtggtacggcgcactgatcggtgtgatgtgcgtattaatccgcgtggtcaatccggcttaccccgaaggcatgatgttggcgattctgtttgccaacctgtttgccccgattttcgactatttcgtcgcacaagcgaacatcaaacgcagaaaggcgcgcagcaatggctaa

SEQ ID NO: 36436 - DNA, 579 bp, Neisseria meningitidis
atgaatattttattattagacggcggcaaggcgttcggacattctcacggcgggttaaaccgcacgcttcacaaaaaagcgaaagaagttttgaccgcgctcggacacaatgttcaagaaaccgtgattgatgccggctatgatgttgaggcagaaatcgaaaaattcgtttggatggatgccgtgatttggcagatgccgggctggtggatgcacgagccttggacagtgaaaaaatacatagacgaagtattaaccgctggacacggcaaactctaccaaagcgacggcagacaccgcgtcaatccgactgagggctacggcacaggcggcttgttgcaaggcaaaaaacatatgctttcactgacttggaatgcgccgattgaggcgtttacccgcgaaggcgatttctttgaaggcaaaggcgttgatgttttgtatatgcacttccacaaagccaacgagtttttgggtatgacccgcctgtcgacattcttatgtaacgatgtggttaaaaatccgcaagtggaaaaatacttggcagattatcaggcacacttggaaaaagtgttcggctaa

SEQ ID NO: 36437 - DNA, 591 bp, Neisseria meningitidis
atgtcggaaaagataatactgccggtcttgtcgttgggtggcgtacggctcgaaccgttggatgtgcatcatgaaacgggtttgcgcgaggcggtttgcgatggggaagtttggaagctgggagtaacgtccgcgccccatccggatagggtggcagactatatcgggacagcattggcaacgcgtttggcgtttgcggttgtcgatgaagaggcgggcagggtggtcgggacaacggcgtattatcattttgaaccgcagattccgcgtttggatattggattcacatggtatgcggcatcggcacggcggacacggataaacacctgttgcaaaatcatgctgttggattacgcatttgatgttttggcttgccgttgcgtgggatggcgcacggatattctgaaccttgcctcgcaacgtgccatcgaacggctgggtgcggaaaaagacggcgtgctgcgtatgcatatgctccgtaaagacggcagtgtgcgcgatacggtcgtgtacagtatgctgagggaagattggtgcaaaaacagggaaatcctgaccggcaggttggcagggtatggcgtgcaggtgtga

SEQ ID NO: 36438 - DNA, 3909 bp, Neisseria meningitidis
atgaatgagggtgaagttgttttaacaccagaacaaatccaaaccttgtatggttatgctttccgtggcgatacctatggcggttggcgttatttggctaatttgggtgaccgttatgcggatgatgctgccgcaattgtcggtaaggatacaaacttaaatggtttgaatttatggatgaaaaaaggtgtggaaaacctatgggatgatacggtcggtaaaaagacccgtttagagaaatttgatcgggttgcactgcaacatttcagccaatatgtagatctaattaatgaaaataatggtagattacctaacactagtgaaattgagagaagttactataaagccgttaccgaaaatggtgtttcttctagtgcagctattgatttagttattaatcgttcacttccggatatggcggatggttattgggcattaggtttggggatagaagccgaacgtatccacaatgagcaagcagtaaataatccgaacggtagcgaatgggataatagaaagcagttaatatctgctttagataaaggatttgatggatcttttaaagagaagccttttacttttttacaatctgtgataatggatgtaacaaagttaggtgttgaatatacaatagatggttggcaaaaaattggaggttggggtaatgggataatcaatgatttatataaaagtgttgcaaaaagagagtggactggaatatttgagatcgttaataataacatcaagcaatttagagatctgttcccaaatccggaaggctggatcgatgatggtcaccaatgtttcgctccttgggttaaagaaactaaaaaacgcaatggcaaatatcatgtctacgaccccctcgccctagatctagacggcgacggtatagaaaccgttgccaccaaaggctttgcaggtgcattgttcgaccaccgcaatcaaggcatccgcaccgccaccggttgggtttctgccgatgacggtttactcgtccgcgatttgaacggcaacggcatcatcgacaacggtgcggaactcttcggcgacaacaccaaactggtagacggttcttttgccaaacacggctacgcggctttggccgaattggattcaaacggcgacaacatcatcaacgcggcagacgccgcattccaaaccctgcgtgtatggcaggatctcaatcaggacggcatttcccaagctaatgaattgcgtacccttgaagaattgggtatccaatctttggatctcgcctataaagatgtaaataaaaatctcggtaacggtaacactttggctcagcaaggcagctataccaaaacagacggtacaaccgcaaaaatgggggatttacttttagcagccgacaatctgcacagccgcttcaaagacaaagtggaactcactgccgaacaggcaaaagccgccaatcttgcgggcattggtcgtctgcgcgatttgcgcgaagctgccgcattgtccggcgatttggccaatatgctgaaagcttattctgccgccgaaactaaagaagcacagttggcattgttagataatttgattcacaaatgggcggaaaccgattcgaactggggcaaaaaatcgccaatgcgactttcaaccgattggacgcaaacggctaatgaaggtattgcactgacaccatcccaagtagcacaactaaaaaagaacgctttagtttccctttctgataaagctaaagcagctattgacgccgcccgcgaccgcattgccgtgcttgatgcctacacggggcaggattccagcacactctattacatgagcgaggaagatgcgcttaatatcgtcaaagtaaccaacgatacatacgaccatctcgccaaaaacatctaccaaaacctgttgttccaaacccgtttgcagccatatttgaatcaaatcagtttcaaaatggaaaatgatacgttcactttggattttagtggtcttgttcaagcatttaaccatgtcaaagaaactaatccgcaaaaagcttttgtggatttggccgagatgcttgcatatggcgaacttcgttcttggtatgaaggccgaagactaatggccgattatgtggaggaggcaaaaaaagcaggtaaatttgaagattaccagaaagtgttgggtcaggagaccgttgcattattagctaaaacatcgggtacgcaagcagatgatatcctgcaaaatgtaggctttggtcataataaaaatgtttctttatatggtaatgacggcaacgacactctgatcggcggtgccggtaatgattacttggagggcggcagcggttcggatacttatgtcttcggcaaaggcttcggtcaggatacggtctataattacgactacgctaccggacgcaaagacatcatccgctttaccgacggtattacagccgatatgctgacttttacccgagagggcaaccatcttcttatcaaggcaaaagacggcagtggacaagtgactgttcagtcctatttccagaacgatggctcaggtgcttaccgtatcgatgagattcatttcgataacggcaaagtactggatgttgccactgtcaaagaactggtacagcaatccaccgacggttcggacagattgtatgcctaccaatccggaagtaccttaaacggcggattgggcgatgactatctgtacggtgccgacggggatgacctgctgaatggtgatgcaggcaacgacagtatctacagtggcaatggcaatgatacgctcgatggaggagaaggcaacgacgccctgtacggctataatggtaacgatgtactgaatggtggcgaaggcaatgatcatttgaacggcgaagacggtaacgacactctaatcggcggtgcaggcaatgattacttggagggcggcagcggttcggatacttatgtcttcggcgaaggcttcggtcaggatacggtctataattacgactacgctaccggacgcaaagacatcatccgctttaccgacggtattacagccgatatgctgacttttacccgagagggcaaccatcttcttatcaaggcaaaagacgacagtggacaagtgactgttcagtcctatttccagaacgatggctcaggtgcttaccgtatcgacgagattcatttcgataacggcaaagtactggatgtcgccactgtcaaaaaactggtacagcaatccaccgacggttcggacagattgtatgcctaccaatccggaaataccttaaatggcggattgggcgatgactatctgtacggtgccgacggggatgacctgctgaatggtgatgcaggcaacgacagtatctacagtggcaatggcaatgatacgctcgatggaggagaaggcaacgacgccctgtacggctataatggtaacgatgtactgaatggtggcgaaggcaatgatcatttgaacggcgaagacggtaacgacactctgatcggcggtgcaggcaatgattacttggagggcggcagcggttcggatacttatgtcttcggcgaaggcttcggtcaggatacggtctataattaccatgtggataaaaactctgacactatgcactttaaaggatttaaagcagcagatgttcattttatccgttccggaagtgatttggtgcttagcgcttctgaacaagacaacgtacgtatttccggattcttctatggtgaaaaccatcgtgtagatacatttgtctttgatgatgcagctatcagtaatccagattttgccaagtatattaatgctggcaataatttggtacagtctatgtctgtgttcggttctaatactgctgcgacaggaggaaatgtggatgccaatacacaatccgtacagcagccgttattggtaacgccatctgcataa

SEQ ID NO: 36439 - DNA, 1050 bp, Neisseria meningitidis
atgtcatctaaccaatatatccagtcgcttgagttgacaaactttaccgttcttccaaacgatacttttgaattttctgaaaatctcaatgttattgttgccgaaaacggttgtggcaaaacacatttgttaaaaattttatacagcctgctagaagtaacatctaacaccaaaaacagattactgaaaacagaattgcaaaaaagttttgccgataaattactgaatgttttccgtcccgattccttgggcaggttgagcaaacgtttgcaggggcgcgggcgtacggaaatcgttttaaaactgcaaaacggcactacgcatagtagtctgaatttttccagtaactcatcatcgcaagtcaatgttcaaagcatcggattgaaagaaaatgaatatactccgacacctatcttcttacccagccgcgaattaattacactttgcccttggttcacttctttgtatcaaaaccaaagcatccctttcgaagaaacttggtttgatgcctgtatgcaattaaatcacccgcttgccaaaggccccagagaaacaaaaattcgagaattgctcgaacctattgagaacgcgatgggcggaaaagtatctgaagaacaaggaaggttttatctatcgctgacaaatacgggcggtaagattgaagcacctttggtagcagagggtttgcggaaatttgtcatgattgcccggttaatcgcaacaggggcattgctggataaaggctatctattttgggatgaaccggaagctaatctgaatcctaaattgatcaaagtggctgcccgtattatttggtctttatctcaacagggtattcaggtttttattgcaacacactctttattcttattgagagaattggaacttttgaagcttgaaaataacacggatttacctgtacgttttttctcgttgattgcttccgatgatggaacaaaagtggagcaagggaacagtattaatgatttgaacacattgatattgttagatgaaaacattatgcaggcagacaggtatctgaatatttga

SEQ ID NO: 36440 - DNA, 870 bp, Neisseria meningitidis
atgtccgcaaacgaatacacacaaatcggctggataggcttagggcaaatgggtctgcctatggtaacgcggctcttggacggcggcatcgaagtcggcgtatacaaccgctcgcccgacaaaactgcccccatctccgccaaaggcgcaaaagtttacggcaacaccgccgaactcgtccgcgactatcccgtcattttcctgatggtttccgactatgccgccgtgtgcgacatcctgaacggagtccgcgacggattggccggcaaaatcatcgtcaacatgagcaccatctccccgaccgaaaaccttgccgtcaaagaacttgtcgaatctgccggcggacaatttgccgaagccccagtttctggttcggtcggtccggccaccaatggcacgctgctcattctgttcggcggagacgaaactgttttaaacccgttgcagaaagtgttttcccttgtcggcaaaaaaactttccacttcggcgaagtgggcaaaggctcgggcgcgaaactcgtcttaaactcgctcttaggcattttcggcgaagcgtacagcgaagcgatgctgatggcgcggcagttcggcatcgataccgacaccatcgtcgaagccatcggcggctcggcaatggactcgcccatgttccaaaccaaaaaatccctgtgggcaaaccgcgaattcccgcccgccttcgccctcaaacacgcctccaaagacctcaacctcgccgtcaaagagcttgaacaggcaggcaacaccctgcccgccgtcgaaaccgttgctgccagctaccgcaaagcagtcgaagccggctacggcgaacaggacgtttccggcgtttacctgaaactggcagaacactga

SEQ ID NO: 36441 - DNA, 1014 bp, Neisseria meningitidis
atgaaaaataaaatacaaaatcaattagataatatagttaccttaaataatgagaaatttacttttattgatttatttgcgggaataggtggttttcgcattgcaatggagaatgttggtgggcgatgtgtattttctagtgaatgggatgataaagcccgtcaaacctaccaagtaaattttaatgatattccttatggagatattacattaaaggaaaccaaagcagctattccaagtaagtttgatgtattaacagcaggattcccgtgtcagccattctctatagctggtgtttcaaagaaaaaaagcctaggacgagaaacaggcttcttagataaggcgcagggaactctattttttgatgttgctgaaattattggaaaacatcgacctaaaatttttcttttagagaatgtgaaaaaccttgtttcgcatgacaaaggaaatacatttaaagtaattaaagggactttagaagagcttgactatcagatattttatcaagttatgaatgcaaaatattatgttcctcaaaatagggagcgtatttttattgtaggttttgatagacaatattttaataaggaaataaatttcaattttccttccccaccagaatcacaaccaaaattaaagcaaattttggaagatgatgtagataattcttttactctttctgataacttatggctttaccttcaaaattacgctaaaaaacataaggcaaagggtaatggatttggttttggattagttgatttagatggaatatcacgaactctatctgcacgatattacaaagatggttccgaaatactcatccctcagaaaggaaaaaatcctaggaagctgacacctagggagtgctcgcgtttaatgggatttcctaaagattttgttattgatgcagtatccaagacagctgcatacaagcagtttggcaattcaattgctgtaccgttggttcaagctattgctaaacaaattataaatgagttaaaaaatgaatga

SEQ ID NO: 36442 - DNA, 1386 bp, Neisseria meningitidis
atgtcttcaggactcgtaacagcggcgtatatcgttgccgcaattttattcatcttctcactggcggggctgtccaaacaggaaaccgccaaacagggctgctattccggtatcgccggtatggcggtcgccctttttgtaactgttttttccgacaatacccacggactgggctggatcatcatcgccatgctcatcggcgcggcaatcggcatctacaaagccaaaaaggtggaaatgaccgaaatgcccgaactgattgccctgctgcacagcttcgtcggcctagcggcggttttggtcggcttcaacagctatatcgcgccgggcaacgtttcgcacgatatgcacaccatccatctggtcgaagtctatttgggcattttcatcggcgcggtaacctttaccggctcgctggtcgcattcggcaagctcaacggcaaaatcagcagcagcccgctgcaactgcccgccaaacacaagctcaacgcactggcacttggcgtatcgtttgtgttgctgctcgtattcgtcggcattgacggcagcggcttcatcctgctgattatgaccctgattgccctcgcattcggctggcacttggtcgcctccatcggcggcgcagatatgcccgtggtcgtatctatgctcaactcctactccggctgggcggccgcagcggcaggctttatgctctccaacgacctgctcatcgttaccggcgcgctggtcggctcaagcggcgcaattctgtcctacattatgtgcaaagccatgaaccgctcgtttgtctcggtaattgccggtggtttcggcagcgacagcggcacatcatcttccggcagccaagagataggggaataccgagaagtcaaagctgccgatgttgccgaaatgctgaaaggcgcaaacagtgtcatcattaccccgggctacggtatggcagtcgcacaagcgcaataccccgttgccgaaatcaccgagcttttgcgtaaaaacggcacagaagtacgcttcggcatccaccccgtcgccggccgcctgcccggtcatatgaacgtactgcttgccgaagccaaagtcccctacgacatcgtgttggaaatggacgaaatcaacgacgacttccccgaaaccgatgtggtcttggtgattggtgcgaacgataccgtcaatcctgccgcccaaaccgacccgaacagcccgattgcgggtatgcccgtgttggaagtatggaaggcaaaagaagtcgtcgtcttcaaacgctcgatgaataccggctacgcaggtgtacaaaacccgctgttcttcaacgaaaacagcgtaatgtgtttcggagatgcgaagaaaaccgtggatgacattctgtccgaactgaaaaaataa

SEQ ID NO: 36443 - DNA, 762 bp, Neisseria meningitidis
atgatgggcgattccgtcatttattatgtagaacaggcagacaaaccggtaaaccgtgccggcgaacgcgcccgtaaaacattcaaatatttttggcgcgagcttttttgggaacgccgccgcatcattcccgccttagattttgccatggtcaaagccccttttttccaagacggcgaagacggcgaaatttgcgaacatatgtggatcgacgatatttattttgacggtctttacatttatggcgtgctgaacaatgaacccggcgaactgaccaatgtcgaacaaggcgaaagcgtttgcgttccggttgacgacatcagcgactggatgttcgtgtgcaacggcattccctacggcggctttaccatacaggcaatgcgtggacagatgacggaagaggagcgtaccgaacacgatgccgcatggggaatcgatttcggcgatcccgggcaggtattgctggtgtatgaagaaaaagaacatcccgaaaatctggaagagcatccgatgtgccggaactgtattgacgattttcggcaacagttgtcccaaaatccggattttctgcatgagcaggacgaagacggctatacgccgcttcatcatgaagccatcgcaggaaatgcacttatggttcaagccatgcttgaatacggcgcaaatcctgcctcaaagacatcggaaggctataccgccctcgattttgcccgcctggcgggctggcaaaatgttgccgacctgctcgaaccgcgacattag

SEQ ID NO: 36444 - DNA, 198 bp, Neisseria meningitidis
atgcctatatctttatttaatttgacatttatttttcggacgcgcgcgctgctttttcaggcgaagtccgggctgattccgtgcggcttgaaaaataaaatcatatatagattaatcaaatcgggcttatgccgactacacgctattacattttgtcgggaaattggttatagtaatgagcgaaatgcacgcccctga

SEQ ID NO: 36445 - DNA, 1458 bp, Neisseria meningitidis
atgtccgagtggcgaagtttcaatcgaaaaggaaatacgatgaatattcacgccctgctctccaaacaatggacgctgccgccattcctgccgaaacggctgctgctgtccctgctgatactgctggcccccaatgcggtgttttgggttttggcactgctgaccgccaccgcccgcccgattgtcaatttggactaccttcccgccgcactgctgatcgccctgccttggcgtttcgtcaaaattaccggcgtattggcgttttggctggcggttttgtttgacgggctgatgatggtgatccagcttttcccttttatggacctcatcggcgccatcaacctcgtccccttcatcctgaccgcccccgccctttatcagataatgaccgggctgttgctgctgtatatgctggcgatgccgtttgtgttgcagaaagccgccgccaaaaccgacttccgacacattgccgcctgtgccgccgttgtggcggcagccggctatttcaccggccatttgagttactacgaccgggggccgatggccaatatcttcggcgcaaacaacttctattacgccaaaagtcaggcgatgctctacaccgtcagccaaaatgccgactttattaccgccggcctggtcgatcccgtcttcctccccttgggcaatcaacagcgtgccgccacgcatctgaacgagccgaaatctcaaaaaatcctctttatcgtcgccgaatcttgggggctgccggccaatcccgaacttcaaaacgccacttttgccaaactgctggcgcaaaaagaccgtttttcggtttgggaaagcggcagttttcccttcatcggcgcgacggtcgaaggcgaaatgcgcgaactgtgtgcctacggcggtttgcgcgggtttgcactgcgccgcgcgcccgacgaaaaatttgcccgctgcctccccaaccgtttgaaacaagaaggttacgccacctttgcgatgcacggcgcgggcagttcgctttacgaccgcttcagctggtatccgagggcgggctttcaagaaatcaaaaccgccgaaaacctgatcggtaaaaaaacctgtgccattttcggcggcgtgtgcgacagcgagctgttcggcgaagtgtcggcatttttcaaaaaacacgacaagggactgttttactggatgacgctgaccagccacgccgactatcccgaatccgacattttcaaccacaggctcaaatgcaccgaatacggcctacccgccgaaaccgacctctgccgcaacttcagcctgcacacccaattcttcgaccaactggcggatttaatccaacgccccgaaatgaaaggcgtggaagtcatcatcgtcggcgaccatccgccgcccgtcggcaacctcaatgaaaccttccgctacctcaaacaggggcacgtcgcctggctgaacttcaaaatcaaataa

SEQ ID NO: 36446 - DNA, 996 bp, Neisseria meningitidis
gtgaacctgaaaaaccgccattttctgaaacttttagacttcacgccggaagaaatcaccgcctacctcgaccttgccgccgaattgaaagccgccaaaaaagcagggcgcgagattcagcggatgaaagggaaaaacatcgccctgatttttgaaaaaatctctactcggacgcgctgcgcgtttgaagtcgccgcgcgcgatcaaggcgcgggagtgacttatttagagccgtccgccagccaaatcgggcataaggaaagcatcaaagacaccgcccgcgtgttgggcaggatgtacgatgccatcgaatatcgcggtttcggtcaggaagttgttgaagaattggcgaaatacgcgggcgtacccgtgttcaacgggctgaccaacgagttccatcccacacaaatgcttgccgacgcactgactatgcgcgaacacagcggcaaacctttgaaccaaaccgcgtttgcctacgtcggcgacgcgcgttacaacatgggcaattccctgctgattttaggggcaaaattggggatggacgtgcgtatcggcgcaccgcaaagcctgtggccgtctgaaggcattattgccgccgcacacgccgccgccaaagaaaccggcgcaaaaattaccctgaccgaaaacgcgcatgaagccgtgaagaatgttgattttattcataccgatgtgtgggtcagcatgggcgagccgaaagaagtctggcaggaacgcatcgatttgctgaaagattaccgcgttacgcccgaactgatggcggcatcgggcaatccgcaagtcaaattcatgcactgcctgcccgccttccacaaccgcgaaaccaaagtcggcgaatggatttacgaaaccttcgggctgaacggtgtggaagttacagaagaaatattcgaaagccccgccagcatcgtgttcgatcaggcggaaaaccgtatgcacacgattaaagcggtaatggtcgcggctctgggcgactga

SEQ ID NO: 36447 - DNA, 1929 bp, Neisseria meningitidis
atgtccaaaaaccaaaatcacgaagaataccaagacgatgcccgccccctgacgattgaggaacaacgcgcgcgcctgcgccaactcatcattatgggcaaagaacgcggctacatcacctactccgaaatcaacgacgcactgcccgacgatatgtccgatgccgatcaaatcgacaacatcgtcagtatgatttccggtttgggcatccaagttaccgaacacgcccccgatgcggaagacatattgttaagcgacaatgccgccgttaccgacgatgatgccgtcgaagaagccgaggccgccctttccagcgcagattccgagttcggcaggacgaccgaccccgtccgcatgtatatgcgcgaaatgggacaggtcgacctgctgacccgcgaagacgaaatcatcatcgccaaaaaaatcgaaaacgccctgaaaaatatggttcaggccatctccgcctgcccgggatccattgctgaaatcttagaactcatcgaaaaaatccgcaaagacgaaatccgcgtcgacgaagtcgtagaagccattatcgacccgaatgaagtattgctcaacgaattgggcttggggcacttggaaaccacagcgcccgagaaaccttccaacgacaattcggacgaaaacgaagacgacgaagaatcggaagaagatgcggatgaaatctcggcagccaatctcgccgaattgaaacaaaaagtcatcggccactttgcccaaatcgaaaaagactacaaaaaaatgatcggtcgtttggaaaaacaccacagccggcacaaagactatctcgcctaccgcgacgcgattgccaacaaactgctggaagtccgtttcgccacccggcaaatcgacagcctcagcagcagcctgcgcggaaaagtagaaaacatccgcaaactcgaacgcgaaatccgcgacatctgcctcgaccgcgtccatatggagcgcgactacttcatccaaaacttcctgcccgaaatcaccaatctggaatggattgaagaagaaatcgccaaaggcagggtttggagcgacgcgctcgaccgcttccgccacgccatcctcgaaaaacaaaccgagttggcagatatggaaaaagaaacccgcatttccatcgaagagttgaaagaaatcaacaaaaatatggtgtcgagcgaaaaagaaaccgcagccgccaaacaggaaatgattcaggcaaacttgcgcctcgtcatttccattgccaaaaaatacaccaaccgtggcttgcagttccttgatttgattcaggaaggtaacatcggcctgatgaaagcggtcgacaagttcgaataccgccggggctacaaattctccacctacgcaacctggtggatccgccaggcaatcacccgttcgattgccgatcaggcgcgtaccatccgcattccggtacatatgattgaaaccatcaacaagatgaaccgcatctcgcgccaacaccttcaagaaaccggcgaagaacccgattccgccaaacttgccgaactgatgcagatgcccgaagacaaaatccgcaaaatcatgaaaatcgccaaagagccgatttcgatggaaacccccatcggcgacgacgacgattcgcacttgggcgacttcatcgaagatgccaacaatgttgcgccggccgatgcggcaatgtacaccagcctgcacgaagtaaccaaagaaatcctcgaaagcctgacaccgcgtgaggcaaaagtcctgcgtatgcgtttcggcatcgatatgaacaccgaccacacgctggaagaagtcggcagacagtttgacgtaacgcgcgaacgcatccgacaaatcgaggcaaaagcactccgcaagctgcggcatccgacaagaagcgaccgtttgagaagtttcttggacagcgaagacagcaagctgtaa

SEQ ID NO: 36448 - DNA, 786 bp, Neisseria meningitidis
atgttttcgggcaggcggcgttccgtctgcttagacaatcgtcctttaaaacaggtagaatccgccccaacgggaaacacatccttcagacggcaaaacccataccccaaaccatcaggaatcccccttatgaacagacaaaaagtcatcgccatcgacggcccgggcgcatcgggcaaaggcacggttgccgcccgcgttgccgccgcattgggatacgattatctcgataccggcgcactctaccgcctgaccgccctatatgcacaaaaacaaggcgtggaatggcacgatgaagaaaacgtttccaaactggcaaaaaaactgcccgccgtattttcaggcagccgcatcctgctcgacggcgaagacgtttcagacggcatccggacagaagccatcggcatgggcgcatccgcagtcgcacagttgcctaaagtccgcgccgccctgctgcaacgccaacgcgattttctgaccgaaaaaggactggtcgccgacggacgggacaccggatcggtcgtcttcccccaagccgaacttaaaatcttcctgacggcagagtccaaaatccgtgccgaacgccgcgccaaacaaatcggcatcccctgcgaaggtttggcattcgagcgcatcctgtccgacatcgaagccagagacgaggcagaccgaaaccgcaaggttgcccccctgaaacaacaacccgatgccctgcttttggatacgagccgcctgactatagaagaaactgtaaaaaaagtgcttgattggtatcgtaaagtttaa

SEQ ID NO: 36449 - DNA, 2115 bp, Neisseria meningitidis
atgttcctcttttcagacggcctacaatctattaataacaataatcgacgaaaacgcattgtgaaaaacgcctacatcccctctcgcggcatccgcaaaatcccccatctctccaccctattgcccgagtttcatatctacaaagacggaaaaggagcagaggctgttgtcggctggggtttgcgcccgacgacacacaaagcgcgtgcttttgccaccgaacaccagcttccctttattgctttggaagacggctttttacgctcgctcggactgggcgtctccggttatcccccctactccatcgtctatgacgacatcggcatctactacgacactacccgcccttctcgtttggaacaactgattcttgccgccgataccatgccgtctgaaaccttggctcaggcgcggcaggcgatggatttcatcctgcaacaccatctgtccaaatacaaccacgcgcccgaactttcagacgatcatcctttacgctccccatccaagtctgaaaccgtcctcattatcgaccaaaccttcggcgatatggctatccaatatggcggtgcagacgcctctacgtttgaattgatgtttcagacggccttaaatgaaaacccgcaagccgatatttgggtcaaaacccatcccgatgttttgtgcggcaaaaaacaaggctatctgacccagcttgtgcagcaacaccgcgtccatcttctggcagaagacatcaatccgatttctttgttgcaaaacgtcgataaagtttattgcgttacctcgcaaatgggttttgaggcgcttttgtgcggcaagccgctgaccactttcggcctgccgtggtatgccggatggggcgtgagtgacgaccgccacccaaaaatcggcagccttattcaaacccaacgccgcgccccccgcaacttgctgcaactcttcgccgcagcctatctgcaatacagccgctacctcaatcccaataccggcgaagcaggcagcctctttgatgtcatcgactatctggcgacggtcaaacgtaaaaacgacaaattgcgtggcgagttatattgcgtcggtatgtctttgtggaaacgcgcggttgccaaaccgttctttaacgtaccctcttgccgtctgaaatttatctcttccacccaaaaactggcaagggtcaaactgtccgacgatgcacgcatcctggcttggggcaacggcaaagaggccatcgtccgctttgccgaacaacaccacatccccctgctgcgcatggaagacggctttatccgctcggtcggactcggctccaacttagtgccgccgctgtcgctcgttaccgacgatatgagcatttatttcaatgccgaaaccccgtcccgtcttgaatacatcctacaaaaccaaaacttcgacgatcaagactttcagacggccttgaagctgcaaaaaatgctgaccgaaaaccacatcagtaaatacaacgtcggcagctcagacttcaccgccccgtcaaccgacaaaaccgtgatcctcgttcccggccaggttgaagatgatgcgtctatccgctacggttcgccccaaatctaccgcaatctggatttgctccgtaccgtacgcgaacgaaaccccaatgcctatatcatctacaaaccgcatcccgatgtagtcagcggtaaccgcatcggccatatttcccctgaagatgctgcacgatatgccgaccaaaccgccgagcaaaccgacatcctgacctgtctccaatacgcagacgaagtacataccatgacttcgctgaccggttttgaagccttgttgcgcggcaaaaaagtcagctgctacggcctgcctttttacgcaggctggggacttacccaagatctgctccccattccgcgccgtagccgcagacttgagctttggcagctgattgccggcacgctcatccactatcccgactacatccaccccgaaacccatcaggccataaatgcagaaaccgcagcccaaatcctgatacgacaaaaaaatatgcaaaaaaacaacaacggattacatcgcgggtactttgccaaaaaattaggtaaaatcaaacaactatatcgatctttcaaataa

SEQ ID NO: 36450 - DNA, 441 bp, Neisseria meningitidis
atgccgaaagccaccttttacacgcacgttgcccaagttccgattttcacctgccgcctgattgcccgtgcgattcgggacggcggcaggatactggtgtggtccgattcgttcgggcagcttcaggaattggacaaaatgctttggcaatacgaggccgagagttttattccgcacgaaatttgggaaacggaagaagccatgccgtctgaaacattcgtcctgcttgcctgcggcggcaatctgccccgaattcccgaaggcatggccgttttgaacctgtccgacggtttttggaacaccgctccggtcttgcccgcgcgcgttttggaaatcgtcggcaacagcttggaagagctcgccgacgcgcgcgaacgctttaccgcctaccgccgaagcggttttgccatcgaacatcacggcatggagggcaaggcataa

SEQ ID NO: 36451 - DNA, 795 bp, Neisseria meningitidis
atgaccacgattttggctttcgatattgaaaccgtacccgatgtgcagggtatccgaacattgtacgagctgccgtcctcgctgcccgacgatgaagtggtgctgtttgcccagcaaaaacgccgtgctcagacgggtggggattttatgcagcatcatcttcatcagattgtggcgatttcgtgctgcatgcgttgggggcaggataaagtccatgtcggtaccatcggcgagatggacgatggcgaagaagtcgtgattgccaaatttttcgagttgattgaaaaacatacgccgcaactggtcagttggaacggcggcggtttcgacctgccggttctgcattaccgttcgctgctacacggcatcaacgccgcgcgctattgggatatgggtgacggcgatttcggcgacagccgcgatttcaagtggaacaactacatcagccgctaccaccaacgtcattgcgatttgatggatttgctcgcgctttaccagccgagggcaaacgtgccgctggacgatatggcgaaactgtgcggttttccaggcaagctgggtatggacggcagcaaggtgtgggatgcgttccacgcgggcaggctgaaggaaatccgcaattattgtgaaaccgatgccgtgaatacgtatttgatgtatctgcgtttctgtctggtcagcggcagattcgacgcggacgaatacgaaatggaaatcaagcggatcagaaactatctttccgcccaaacagaagacaaaccgcattgggcagaatttgtccaagcgtggaaataa

SEQ ID NO: 36452 - DNA, 846 bp, Neisseria meningitidis
atgctcagttacagacacgcattccacgccggcaaccacgccgatatgctcaaacactttaccttgtttttagtgctgcaatatttcaaccgcaaagacaagccctactggtacatcgacacgcacggcggcgcgggtgtgtacaatctcgaaggcagcaaagcacagaaagtcggtgaataccgccaaggcatcgccctgctccgacaggcgcaaaacctgcctgccgaactctctgactttgccgcgcacatacaaaaaatcctgccctcgcccaaactttactgcggttctccgtggctggcgcaatcgctgacccgtgtcggcgacaaattgcgcctgtttgagctgcaccccaccgattttgtccatctgaaaaacaatatgggcgaagcaggattgggcaaacgtggacaagtattgcgcgaagacggttacaaagggctgatttccctgctgccgcccccgccgcgccgcgccaccgtcctcatcgacccgccctatgaggaaaaacaggactaccggcgtgtaacggaaacgctgaaagccgctttaaaacggtttgagtccggctgttatctcatttggtatccctgcctcagccgcgaagaaagccgcaagctgcccgaagaattgaaaaaactcctgcccgacaactaccttcacgccgaacttcacgtccacgcgccgaaagccgacggtttcggtatgcacggcagcggaatgttcgtcatcaatccgccctatctgttggcggaacaattggcggcaaacctccccgccctgacgcggctgctggcgcaagacgaaggcgcgcgctaccttttggacagcaaaatccgctga

SEQ ID NO: 36453 - DNA, 654 bp, Neisseria meningitidis
atgaagataacgcactgcaaattaaagaaaaaagtacagaaagagctgctccgtttttttgtactcgaagttaccgcccgttctgccgccgatattttgggtatccatcccaattcggcagcactgttctaccgtaaaatccgcacggttatcaaccatcatttggccttggctgccgatgaggtttttgagggccctgtcgagccggacgaaagcgatttcggcggacggcgtaaaggcagacgtggtcgcggtgcggcaggaaaagtggttgttttcggcattctgaaacgcaacggacgggtctataccgttgtcgtaaacaatgccaagtctgaaacgttactccctgtcatcaaaaagaaaatcatgccggacagtattgtttataccgatagtctgagcagctgcgacaagttggacgtgagcggttttatccattaccgcatcaaccattccaaggagtttgcagaccgtcagaaccacattaacggcattgagaacttttggaatcaggcaaaacgcgtcttgcgaaaatacaacggaatcgatcgtaaatctttcccgctgttcttgaaagaatgcgaatttcgatttaacttcggcacaccgtctcaacagcttaaaatcctgcgggattggtgtggaatttag

SEQ ID NO: 36454 - DNA, 1179 bp, Neisseria meningitidis
atggaatttgtttacgacgtggcagaatcggcagtcagccctgcggtgattaaagtaatcggcttgggcggcggcggttgcaatgcaatcaataacatggttgccaacaatgtgcgcggtgtggagtttatcagtgccaatacggatgcgcagtctctggcaaaaaaccatgcggcgaagagaatccagttgggtacgaatctgacacgcggtttgggcgcgggcgcgaatcccgatatcggccgtgcggcagcccaggaagaccgggaagccattgaagaagccattcgcggtgcgaatatgctgtttatcacgaccggtatgggcggcggtaccggtaccggttccgcgccggttgttgctgagattgccaagtctttgggcattctgaccgttgccgtggttacccgaccgttcgcatatgaaggtaagcgcgtccatgtcgcacaggcagggttggaacagttgaaagaacacgtcgattcgctgatcatcatcccgaacgacaaactgatgactgcattgggtgaagacgtaacgatgcgcgaagccttccgtgccgccgacaatgtattgcgcgatgcggtcgcaggcatttccgaagtggtaacttgcccgagcgaaatcatcaacctcgactttgccgacgtgaaaaccgtgatgagcaaccgcggtatcgctatgatgggttcgggttatgcccaaggtatcgaccgtgcgcgtatggcgaccgaccaggccatttccagtccgctgctggacgatgtaaccttggacggagcgcgcggtgtgctggtcaatattacgactgctccgggttgcttgaaaatgtccgagttgtccgaagtcatgaaaatcgtcaaccaaagcgcgcatcccgatttggaatgcaaattcggtgcggctgaagacgagaccatgagcgaagatgccatccggattaccattatcgctaccggtctgaaagaaaaaggcgcggtcgattttgttccggcaagggaggtagaagcggttgctccgtccaaacaggagcaaagccacaatgtcgaaggtatgatccgcaccaatcgcggtatccgcacgatgaaccttaccgctgcggatttcgacaatcagtccgtacttgacgactttgaaatccctgcgattttgcgtcgtcaacacaattcagacaaataa

SEQ ID NO: 36455 - DNA, 1185 bp, Neisseria meningitidis
atggctaaggaaaaattcgaacgtagcaaaccgcacgtaaacgttggcaccatcggtcacgttgaccatggtaaaaccaccctgactgccgctttgactactattttggctaaaaaattcggcggtgctgcaaaagcttacgaccaaatcgacaacgcacccgaagaaaaagcacgcggtattaccattaacacctcgcacgtggaatacgaaaccgaaacccgccactacgcacacgtagactgcccggggcacgccgactacgttaaaaacatgattaccggcgccgcacaaatggacggtgcaatcctggtatgttccgcagccgacggccctatgccgcaaacccgcgaacacatcctgctggctcgccaagtaggcgtaccttacatcatcgtgttcatgaacaaatgcgacatggtcgacgatgccgagctgttggaactggttgaaatggaaatccgcgacctgctgtccagctacgacttccccggcgacgactgcccgattgtacaaggttccgcactgaaagccttggaaggcgatgccgcttacgaagaaaaaatcttcgaattggctgctgcattggacagctacatcccgactcccgagcgtgccgtggacaaacctttcttgttgcctatcgaagacgtattctctatttctggtcgtggtacagtagtaaccggtcgtgtagagcgcggtatcatccacgtcggtgacgagatcgaaatcgtcggtctgaaagaaactcaaaaaaccacttgtaccggtgttgaaatgttccgcaaactgctggacgaaggtcaagcaggcgacaacgtaggcgtattgctgcgcggtaccaaacgtgaagacgtagagcgtggtcaggtattggccaaaccgggtactatcactcctcacaccaagttcaaagcagaagtgtacgtactgagcaaagaagagggcggccgccataccccgttcttcgccaactaccgtccccaattctacttccgtaccaccgacgtaaccggcgcggttactttggaagaaggtgtggaaatggtaatgccgggtgagaacgtaaccattaccgtagaactgattgcgcctatcgctatggaagaaggcctgcgctttgcgattcgcgaaggcggccgtaccgtgggtgccggcgtggtttcttctgttatcgcttaa

SEQ ID NO: 36456 - DNA, 1977 bp, Neisseria meningitidis
atgccacgcattgccgccctgcccgaccatctcgtcaaccaaatcgccgccggcgaagtagtcgaacgccctgccaacgccttgaaagaaatcgttgaaaacagtatcgatgcaggcgcaacggcgattgatgtcgagctggacggcggcggcatccgcctgattcgcgtcagcgacaacggcagcggtatccatccggacgacatcgaactcgcgctccaccgccacgccaccagcaaaatcaaaaccttaaacgatttggaacacgttgccagcatgggctttcgcggcgaaggcttggcaagcatcgcctccgtcagccgcctgaccctgaccagccgtcaagaagacagttcgcacgcaacccaagtcaaagccgaagacggcaaactcagcagccccaccgccgccgcccaccccgtcggcaccaccatcgaagctgccgaactcttcttcaacacccccgcgcggcgcaagtttctcaagtccgaaaacaccgaatacgcccactgcgccaccatgctcgaacgcctcgcgctggcgcatccgcacatcgccttctcactcaaacgcgacggcaaaccagtgttcaaacttcctgcccaaagcctgcatgaacggattgccgccattgtcggcgatgactttcagacggcatccctggaaatcgacagcggcaacggcgcattgcggctctatggcgcgattgccaagccaacctttgccaaaggcaaaaccgacaaacaatactgcttcgtcaaccatcgttttgtccgtgacaaagtcatgctccatgccgtcaagcaggcataccgcgacgtattgcacaacgcgctgacgcctgctttcgtcctctttctcgacctgccgcccgaagccgtggatgtcaacgtccatccgaccaaaaccgaaatccgcttccgcgacagccggcaggtgcaccaactcgtgttccacacgctcaacaaagcccttgccgacacgcgcgccgacttgaccgaaagcgtcagcaacgcaggcgaagtgttgcatgacattaccggcgttacgcctgccccaatgccgtctgaaaacgacagcgaaaatctgtttgatagcgcatccgactacccgacaggcaacaaacccgatacacgcaatgcctttggttcatcaggcaaaaccgcgcccatgccttaccaagccgcgcgtgcgccgcaacaacacagcctgtccctgcgcgaaagccgcgcggcaatgaatacttacgccgagctttacaaaaaaaccgacgacatcgaccttgagttaagccgattagagcaggcgcgtttcggcaatatgccgtctgaaacgcctatcccaaaaacagatacgccgctttcagacggcatcccgtcccaatccgaactgccgccgctcggcttcgccattgcccaattattgggcatctacatcctcgcccaagccgaagacagcctgctgctcatcgatatgcacgctgccgccgaacgcgtcaactacgagaaaatgaaacgccaacggcaggaaaacggcaagctgcaaagccaacgcctgcttattcccgtaacctttgccgcgtcccacgaagaatgcgccgcccttgccgattatgccgaaacgctggcaggcttcggcttggaattgtccgatatgggcggcaacaccctcgccgtccgcgcagttcccgccatgctcggtaaagccgacgttgtttcgctggccaaagatgtattgggcgaactcgcccaagtcggcagcagccaaaccatcgaagaacacgaaaaccacatcctcgccaccatgtcctgccacggctccgtccgcgccggccgccaactgaccttgcctgaaatgaatgcgctcctgcgcgatatggaaaacacgccgcgcagcaaccagtgcaaccacggcaggccgacttgggtcaaactgactttgaaagaattggacgcactgttcttgcgcggacagtaa

SEQ ID NO: 36457 - DNA, 1332 bp, Neisseria meningitidis
atgctgttcaaccacaccgcttccgaacttctcgacctctgccgccgcacgctcgacttggcaaaagcagcgggcgcgaccgccgccgaagccgatttcagcgaatccatcggacaaagcgtcagcgtgcggctgggcgaaatcgaacaaatcgagttccagcaggacaagtcgctggacattaccgtttacgtcggcaaacgcaaaggccgcgctggcaccgccgatttctccgaacaagccctgcgcgacaccgtccgcgccgccgccgacatcgcccgccacaccgccgaagacggttgcgccggacttgccgaccccgagttgatggcgcaacacatcggcgaccccgacctttaccacgaatgggatttggatacggaagccgccgtcggctttgcaaaacaatgcgaacaagccgccctgaacgaggatgagcgcatcgaaaactccgaaggcgcggcggtgcaaaccggccattaccaatacgtttacggcaacacccacggttttgccgcacaccggcaaggcacgcaccacagcatttcctgcagcgtcgttgccgccgacgaaaacgggatgcagcgcgactactggtacgattccgcctgccgccatccggatatggacagccccgaaaccatcggtcaaaccgccgcccgccgcactttgcgccgactcggcagccgcagcatcccgacaggcagctaccccgtcctcttcgataccaccgtttcgggcggtcttatcggacacctcgtcggcgcactctccggcggcgcgctctaccgccaaagcagtttcctgatcgacagcatcggcaaaaaagtcctgcccgatttcctcaacctgcgcgaagaaccgcacatcccccgctctttccgcagcagctattttgatgcggaaggcgttgccaccgcgccgcgcttcgtgattcaaaacggcattgtcgaaggctatttcctcagcagttacagcgcgcgcaaactcggtatgcagaccacgggcaacgccggcggcgcgcacaacctgtatttgaaccatacgcacgaaacgcaatccgacctgctgaaagaaatggggacgggattgttggtaaccgaactgatgggacagggcgcgaacaccattaccggtgactactcgcgcggcgcggcgggtttttgggtggaaaacggcgtgattgcctaccccgtccacgagattaccgtagccggacgcttgcaggatatgtaccgcgacattgtcggcgtggcggatgacgctttgcggcgttcgtccaacaaaatcggctcgattctgattgcggggatgacggttgccggaagctga

SEQ ID NO: 36458 - DNA, 549 bp, Neisseria meningitidis
atgcgaagaaaccttgcgtacagcttggcgatgggtgccgaccgtgcaattcatgttgaaaccgatgcgaaattggagccgctggcagttgccaagttgctgaaagccgttgcggacaaagaaaatccgcaaattttctttttgggtaaacaagcgattgatgacgatgctaatcaagtggcgcaaatgctggcagctttgttgaatgcggcgcaaggtacgtttgcttcaaaagtacaaattgaaggtgatgaagtacagattgtgcgcgaaattgatggcggcgaagaaaccatagcattgaaattgcccgctgttatcagtgcagatttgcgtttgaacgagccgcgcttcgtcaaactccccaatattatggcggcgaagaaaaaacctttggaaaaactggctcctgccgatttggttgctgacatttcacctcgtctgaaaacggtgaaattcgccgagcctaaagcgcgtcaggcaggcgtaaaagtagcaagcgttgccgaattagttgaaaaattgaaaaacgaagccaaagtgatttga

SEQ ID NO: 36459 - DNA, 1017 bp, Neisseria meningitidis
atgtatcggaaactcattgcgctgccgtttgccctgctgcttgccgcttgcggcagggaagaaccgcccaaggcattggaatgcgccaaccccgccgtgttgcaaggcatacgcggcaatattcaggaaacgctcacgcaggaagcgcgttctttcgcgcgcgaagacggcaggcagtttgtcgatgccgacaaaattatcgccgccgcctacggtttggcgttttctttggaacacgcttcggaaacgcaggaaggcgggcgcacgttctgtatcgccgatttgaacattaccgtgccgtctgaaacgcttgccgatgccgaggcaaacagctccctgctgtatggggaaacgtcttttgcagacatcgtgcggcagaagacgggcggcaatgtcgcgtttaaagacggcgtattgacggcagccgtccgcttcctacccgtcaaagacggtcagacggcatttgtcgacaacacggtcggtatggcggcgcaaacgctgtctgccgcgttgctgccttacggcgtgaagagcatcgtgatgatagacggcaaggcggtaaaaaaagaagacgcggtcaggattttgagcggaaaagcccgtgaagaagaaccgtccaaacccacgcccgaagacattttggaacataatgccgccggaggggatgcagacgtaccccaagccgcagaaggcgcgcccgaaccggaaatcctgcatcctgacgacggcgagcgtgccgataccgttaccgtatcacggggcgaagtggaagaggcgcgcgtacaaaaccagcgtgcggaatccgaaattaccaaactttggggaggactcgataccgacgtgcaaaaagagttggtcggcgaacaacgcaagtgggcgcaggaaaaaatcagcaactgccgacaagccgccgcgcaggcagaccggcaggaatacgccgaatacctcaagctgcaatgcgacacgcggatgacgcgcgaacggatacagtatcttcgcggctattccatcgattag

SEQ ID NO: 36460 - DNA, 1194 bp, Neisseria meningitidis
atgcaaaactatctgacccccaatttcgcctttgccccgatgattcccgaacgtgcttcaggcagccgcgtttgggatacggaagggcgtgaatatattgatttttcaggcggtatcgccgtcaatgcgctgggacactgccaccctgcccttgtcgatgctttaaacgcgcagatgcacaagctgtggcacatttccaatatctatacgacgcgtccggcgcaggaattggcgcaaaaattggttgcaaacagttttgccgacaaggtttttttctgcaactcgggcgcggaagcgaatgaggcggcgttgaagctggcaaggaaatatgcgcgcgaccgtttcggcggaggaaaaagcgaaatcgtcgcctgtatcaacagtttccacggacgcacgctgtttaccgtgtccgtcggcggccagccgaaatacagcaagggttatgcacccctgccgcaaggcattacgcacgttccgttcaacgatattgccgcgctggaagctgccgtcggcgaacagacctgcgcggtcatcatcgagccgatacagggcgaaagcggcatcctgcccgccactgcggaatatttgcaaaccgcgcgccgtctgtgcgaccggcacaatgcgttgttgattttggacgaagttcaaaccgggatggggcatacgggcaggctgtttgcctatgaacattacggcattgttcccgatattttgagttcggcaaaagccttgggctgcggctttccgatcggcgcgatgctggcgacagaaaagattgccgccgccttccaaccgggcacgcatggctcgactttcggcggcaacccgatggcgtgcgcggtcggcagccgcgccttcgacatcatcaacgcgccggaaaccttgcacaacgtccgcagccaggggcagaaacttcagacggcattgctggatttgggcaggaaaacaggcttgttctcacaggttcgcgggatgggactgctgctcggctgcgtgttggacgcgccttatcgcggacgcgcatccgaaataaccgccgccgccttgaaacacggcgtgatgattttggttgcgggtgcggacgtattgcgtttcgcgccttcgctgctgttggacgatgaggatacggcggaaggtttgcggcgtttggaacacgtgctgacggaatttgccgccgcaaaccgcccctag

SEQ ID NO: 36461 - DNA, 849 bp, Neisseria meningitidis
gtggagggcagctaccgtttcgatactttgtccaacggcatttccatccacggcggcacggtaacggcacggtgcgatttttgcagcagccgcctcgccgaaccttatgtgtcgttcgtgctcttgctggaaggcagtttggacttcggcatcaaccgccgccgcttccaaatcgatgcggatggcggcaagatcgtcctaattgctgtcggggaagaggtcctgttcagccgctatctttaccgaggcggcaaaacggtcaaaatgaccattaaaggtatggaacaatggctgctgcgtccggagtatgcgcgtttcgcacccctgctttaccgcgaaccggtcagaatatggaatttgtccccaaacctgcgcggcttggcggcatcctgcctgaaagctgtcccaaaggggcatttgggcgaaacattgcgccgcgaggcggacgttttgcggctgctgtcggacttgtgggacacggtttcagacggcatcgggccggcggcggggcaaacggcggaagcagacgctatgccgtctgaagacttcagccgcatcctgaatgccgcgtttgccggcggcgcacatcaagtcaaccggctggcagacacgctgaacatcagcgaaaggacgctgcaacgccgtatgcgcgaccatttcggcattacggcaagcgaatggctgcaccacaaacaaatgcagcacgcgctctatctgttgcaaaacgggggaaaaagcataggcgaaaccgcatatttatgcggctaccgccacgtttccagctttactcaggcattcaggcaatatttcggcagcacgcctgcggaaaccaaaaaagaaaaccggtaa

SEQ ID NO: 36462 - DNA, 2121 bp, Neisseria meningitidis
atggcctatcaagttctcgcccgaaaatggcggcccaaaacctttgccgacttagtcggtcaggaacacgtcgtcaaagccctgcaaaatgccttggacgaaggcaggctgcaccacgcctacctgctgaccggtacgcgcggcgtgggcaaaaccaccatcgcccgcatccttgccaaaagcctcaactgcgaaaacgcgcaacacggcgaaccttgcggcgtgtgccaaagctgcacccaaatcgatgccggacgctatgtagatttattggaaatcgatgccgcttccaacacaggcatcgacaacatccgcgaagtattggaaaacgcccaatacgcgccgaccgccggcaaatacaaagtctatatcatcgacgaagtgcatatgctttccaaaagcgcgttcaacgctatgctcaaaacgctggaagagccacccgaacacgtcaaattcatccttgccacgaccgatccgcacaaagttcccattaccgtcttgagccgctgcctgcaattcgtcttgcgcaatatgacttcgcagcaggttgccgaccacctcgcccacgtcctcgacagcgaaaaaatcgcctacgaaccccccgccctgcaacttttgggacgtgccgccgccggatcgatgcgcgatgccttgagcctgctcgaccaagccatcgccctaggttcgggcaaagttgccgaaaacgatgtccgccaaatgattggcgcggttgacaaacaatacctttacgaactgctgacaggcatcatcaaccaagacggcgcagccctgaccgccaaagcgcaggaaatggcggcgtgtgccgtcggctttgacaacgccttgggcgaactggccatactgctgcaacaactcgccctgatacaggcagtgccgaatgccttggcgcacgacgaccccgattccgatattttgcaccgcctcgcccaaaccataagcggcgaacaaatccagctttactaccaaatcgccgtccacggcaaacgcgacctgggcctcgcccccgacgaatacgccggctttatgatgaccctgctgcgtatgctggcgtttgcgcccttggcagcagcatcgtgtgatgcaaacgccgtgattgaaaataccgaacttcaatccccatcggcacaaaccgccgaaaaggaaaccgccgcaaaaaagccccaaccgcaccctgaagcggaaaccacccaaacgcccgttcagacggcatccgcagcggcaatgccgtctgaaggcaaaactgccgaacccgtttccaatcaagaaaacaacgatgttccgccttgggaagacgcgccggacgaagcccaaaccgcagccggcacggcgcaaacgtcggcaaaaagcattcagacggcatccgaagccgaaacatcgcctgacaatcaagtttccaagaacaaggcagccgacaacgaaaccgagacttccttgtccgaagtgccgtctgaaaaccccattcaggcaacaccgaatgatgaagccgttgaaacggaagcatttgcgcacgaagcccctgcagaacctttctacggttacggctttccggataatgactgccccccggaagacggcgcagaaatcccgccgccggattgggaacacgccgcccctgccgatgcggaagaagaaaacaacgccgacgaaggcagcaacgacgaaaacaacacgccgtccgccccgccgcccgaattttccaccgaaaactgggcagccatcgtccggcatttcgcccgcaaactcggcgcggcgcaaatgccggcgcaacactccgcgtggacggaataccatcccgacaccggcctgatggttttggcgatgaccgccgaagcccgcgccaccgccgacaaaaaacgcctcgacaaaatccgcgacacccttgcccaagcctacgggctgcaactcaccctgcaaacccaagactggcgtgacgaagccggcagagaaacccccgcgatgcaggacaagcgcgtccaagccgaagacaggcaaaaagcacaagcattgctcgaagccgaccccgccgcacaaaaaatcctccaagcattcggcgcgcaatggcagcccgaatcactggaattggcggcaaaccggccataa

SEQ ID NO: 36463 - DNA, 333 bp, Neisseria meningitidis
atgagcagcgaattaatcgtacacaccggcgatgccgctttcgagcaagatgttttgaaatccgacctccccgtcctgctggacttttgggctccgtggtgcggcccctgcaaaatgattgccccgattttggacgacatcgccgccgaatttgaaggccgtctgaaagtagtcaaaatcaacatcgacgacaacgaagccaccccgtcccgtttcggcgtgcgcggcattccgaccctgatggtgttcaaaaacggcgacgtcgtcgccaccaaagtcggcgcattggcaaaaggtcagctgaccgcctttgtcgaagcctctatcgcctga

SEQ ID NO: 36464 - DNA, 231 bp, Neisseria meningitidis
atgaacatcgttaaaaaatatgctgtaaaagcattgttggcagctggtatcttcacaccggctattgttatggcagatggctttgatgcatccgcgattggtacgcaagtggcgaatgtaatcatgggttttgtggcaatggtttccgccgtgggtatggcggccattacggtcatcttggcaatccaaggcttcaagatggcttggagcatgatcaaatctgtcaaataa

SEQ ID NO: 36465 - DNA, 1458 bp, Neisseria meningitidis
gtgctatcgttttcgcacaacttaaaaaaacctgacaattttgtacttttattacagagaaaggctttacaaatggacggctggacacagacgctgtccgcgcaaaccctgttgggcatttcggcggcggcaatcatcctcattctgattttaatcgtcaaattccgcatccacgcgctgctgacactggtcatcgtcagcctgctgacggctttggcaactggtttgcccacaggcagcattgtcaacgacgtactggtcaaaaacttcggcggcacgctcggcggcgtggcgcttctggtcggcctgggcgcgatgctcggacgtctagtcgaaacatccggcggcgcacagtcgctggcggacgcgctgatccggatgttcggcgaaaaacgcgcaccgttcgcgctgggcgttgcctcgctgattttcggcttcccgattttcttcgatgccggactaatcgtcatgctgcccatcgtgttcgccaccgcacggcgcatgaaacaggacgtactgcccttcgcgcttgcctccatcggcgcattttccgtcatgcacgtcttcctgccgccccatccgggcccgattgccgcttccgaattttacggcgcgaacatcggccaagttttgattttgggtctgccgaccgccttcatcacatggtatttcagcggctatatgctcggcaaagtgttggggcgcaccatccatgttcccgttcccgaactgctcagcggcggcacgcaagacaacgacctgccgaaagaacctgccaaagcaggaacggtcgtcgccatcatgctgattcccatgctgctgattttcctgaataccggcgtatcggccctcatcagcgaaaaactcgtaagtgcggatgaaacctgggttcagacggcaaaaataatcggttcgacaccgatcgcccttctgatttccgtattggtcgcactgtttgtcttgggacgcaaacgcggcgaaagcggcagcgcgttggaaaaaaccgtggacggcgcactcgcccccgtctgttccgtgattctgattaccggcgcgggcggtatgttcggcggcgttttgcgcgcttccggcatcggcaaggcactcgccgacagcatggcggatttgggcattcccgtccttttgggctgtttccttgtcgccttggcactgcgtatcgcgcaaggttcggcaaccgtcgccctgaccaccgccgccgcgctgatggctcctgccgttaccgccgccgactttaccgactggcagctcgcctgtatcgtattggcaacggcggcaggttcggtcggttgcagccacttcaacgactccggcttctggctggtcggccgcctcttggacatggacgtaccgactacgctgaaaacctggacggtcaaccaaaccctcatcgcactcatcggctttgccttgtccgcactgctgttcgccatcgtctga

SEQ ID NO: 36466 - DNA, 921 bp, Neisseria meningitidis
atgaagaagagggttcgcaaacctgccgccgtccgttccgatgcggatatcgccgcccttttccacgcccaccgtatgaagcaggcgcagcagagccgtattctgaatatgcttgccgttgaaatccgccccggttttgtgttggacaacaaacgcgcgcccgatatacgcgccgccctgctcgacgtgtacggagaggcggacggcaaaccgtttttcctgccgctcaatctgctgctggggtttatgggtgcgcacgagtggcataagaaaggggttgccgttccgcagctgggcggcagcatacacgttcctttcggcgtattctcgccgttgcgcggcgaatacctcgacctgctcgcccatgcgccgtcaacgggttttcagacggcattcgatatcgggacgggctcgggcgtgcttgccgccattttggcgaaacagggcattccttccgtcatcggcacggataccaatccgaaagccgtcgcctgcgcccgtgccaatattgcccgtttgggctttgaaaaacaggttgagatacgggaaaccgatctgtttcccgaagggtttgccgatctgattgtctgcaatccgccctggcttcccgccaagccgacttccgccgtcgaatccgcgttatacgaccccgaatctgcgatgctggctgcgtttttgcgggatgcgccgaaacatctgaatcccgacggagaaatccgcctgattatttccgaccttgcagagcatttggggctgcgccctgccgattttttggaaaaggcatttatccgggcgggtttgcgtgttgccgatatgatgaaaaccaagccgaagcacaaaaaagccgcgaatccgagcgatccgcttgcttttgcgcgaacccgggaaaccactttcctataccgtttgaaaaaggcataa

SEQ ID NO: 36467 - DNA, 852 bp, Neisseria meningitidis
atgattatccatccccaattcgatcccgtcctcatcagtatcggcccgcttgccgtccgctggtatgccctaagctacatcctcggatttattctttttacctttctcggcagaaggcgcatcgcgcaaggcttgtccgtttttaccaaagaatcgcttgacgacttcctcacttggggcattttgggcgtaatttttggtgggcgtttgggttacgtcctgttttacaagttttccgactacctcgcccatccgcttgatattttcaaggtatgggaaggcggaatgtcgttccacggcggctttttgggtgtagttattgccatatggttgttcggtcgcaaacacggcatcggcttcctcaaactgatggacacggtcgcaccgctcgttccactgggtctcgcttcgggacgtatcggcaacttcatcaacggcgaactttggggacgcgttaccgacatcaacgcattttgggcaatgggcttcccgcaggcgcgttacgaagacctcgaagccgccgcgcacaatccgctttgggcagaatggctgcaacaatacggtatgctgccgcgtcatccctcgcagctttatcagtttgcacttgaaggcatctgcctgttcgccgtcgtttggctgttctctaaaaaacagcggccgaccggacaagtcgcctcactcttcctcggcggctacggcatattccgcttcattgccgaatttgcacgccaacccgacgactatctcgggctgctgaccttggggctgtcgatggggcaatggttgagcgtcccgatgattgttttgggtatcgtcggctttgtccggttcggcatgaaaaaacagcactga

SEQ ID NO: 36468 - DNA, 447 bp, Neisseria meningitidis
atgaatgtcagttttgctcccctgtttctggttacgctgattctgttgggggtggtcagcaacaacaattcgattaccatctcggcaaccatattgctgctgatgcagcagacggcattgatacagtttgtcccgttggtcgagaagcacgggttgaatctcggtatcattcttttgaccataggggttttgagtccgttggtttcaggaaaggcgcaggttcctcccgttgccgaatttttgaattttaaaatgatatccgccgtttttatcgggattttcgtggcttggctggcgggacgcggcgtgcctttgatgggacagcagcctgttttaattacagggctgttaatcgggacggttatcggggtggcatttatgggcggtatccctgtcgggccgctgattgcggccggcatcttgtcttttgtcgtcggaaagggttaa

SEQ ID NO: 36469 - DNA, 606 bp, Neisseria meningitidis
atgatgaccctctattccggcattacctgccccttcagccaccgctgccgcttcgttttgtacgaaaaaggcatggattttgaaatcaaagacgtcgatatttacaacaagcccgaagacctcgccgtcatgaacccgtataaccaagttcccgtgctggtcgagcgcgatttggtgctgcacgagtccaacatcatcaacgaatacatcgacgaacgcttcccccatccgcagcttatgcccggtgatcccgttatgcgcggcaggggccggctggtgctgtaccgtatggaaaaagaattgttcaaccacgtccaagttttggaaaaccccgccgccaccaacaaggaacaggcaaaagcgcgcgaagccatcggcaacggtctgaccatgcttgccccttcgttcagcaaaagcaaatacatcctcggcgaagatttttctatgattgatgtcgcccttgctccgctgctgtggcggctcgaccactacgatgtcaaactgggcaaaagtgccgcgccgctgctcaaatacgccgagcgcatcttccagcgcgaagcctttatcgaagcactgacacccgccgaaaaagccatgcgcaaataa

SEQ ID NO: 36470 - DNA, 219 bp, Neisseria meningitidis
atgttggacgcaagcccaccgcaagagcggggtagccgccgcgaaacgcgcagccaaaaaaaagcgtcacaaataaccgcctttttccgatggctgggcggcttggtctctaatccggccacaggaaaaatcagccataccaaactatgggcaaacgtcgccgcagccgccatgacttggaagttcgtgcaggcggcggacgcgcccgaatggctctag

SEQ ID NO: 36471 - DNA, 723 bp, Neisseria meningitidis
atgaaacccgcctatttcatctccgacctgcatttgagcgaaaagcaccccgaactgaccgcgctgttgctgcgttttttacgttcttccgccgccgggcaggcgcgggcggtttacattttgggcgatttgtttgatttttgggtgggcgatgacgaagtttccgagttgaatacttcggttgcgcgtgaaatcaggaaattgtccgacaaaggcgttgccgtgttcttcgtcaggggcaaccgcgacttcctgatcggtcaggatttttgccggcaggcgggcatgacgctgctgccggattactcggttttggacttgttcggctgcaaaaccctcatctgccacggcgacactctgtgtacagatgacagggcataccaacgtttccgcaaaatcgtgcatcggaagcggctgcaaaaactgttcctgatgctgcccctgaagtggcgcacgcgccttgccgccaaaatcaggcgtgtcagcaaaatggaaaaacaggtcaagcccgccgatattatggatgtcaatgccgcctttaccgcgcggcaggttcgcgcctttaacgcggaaaggctgatacacgggcatacccaccgcgagcatatccatcacgaaaacggctttacccgcatcgttttgggcgactggcataacgactatgcttcaatcctccgcgtagacggtgacggcgcggtattcgtgccgctggaaaaatactga

SEQ ID NO: 36472 - DNA, 984 bp, Neisseria meningitidis
atggctgcgtacgacagtttgatggtatttacaggcaatgccaatcccgaattggcacaacgtgttgtcaggcatttggacatttctttgggcaatgcttccgtatccaagttttcagacggcgaagttgccgtcgaactgttggaaaacgtacgcgggcgcgatgttttcatccttcagccgacctgtgcgccgaccaatgacaacctgatggaaatcctgacgatggcggatgcactgaagcgtgcttcggcaggtcgtattaccacagccattccgtatttcggctatgcgcgccaagaccgccgtccgcgttccgtccgcgttccgatttctgccaaactggtggcaaatatgctgtattcggcagggatcgaccgtgttttgactgtcgatttgcatgccgaccagattcaaggtttcttcgatattccagtggacaatatttatgccaccccgattctgttgaacgacatcaaacaacagcggattgaaaatctgaccgtcgtcagcccggacatcggcggtgtcgtccgcgcccgcgccgtggcaaaatccctgaatgccgacttggcaatcatcgacaaacgccgcccgaaagccaatgtggcggaagtcatgaacatcatcggcgatattcaaggcagaacctgtctgattgtggacgatatgattgacactgcaaatacgctgtgcaaagccgccgtcgctctgaaagagcggggggcggaacgtgtcttggcatatgccagccacgccgtattctccggagaggcggtcagccgtatcgcctcatccgaaatcgaccaggtggtcgtaaccgataccattcctttgtctgaagcggctaaaaactgcgaccgtatccgtcaggtaacgattgccggtctgttggccgaaaccgtccgccgcatcagcaatgaagaatccgtttcatatctctttaatgaagaagtgatgacaggcagtatgttgctgccataa

SEQ ID NO: 36473 - DNA, 756 bp, Neisseria meningitidis
ttgccacgctctacccgagccggcgcgcgtcaaaaacccaaccggcggaggctttgcgttatgagtgagttgattttgaaatgcgaaggcgtgggcaaacgctatcgggacggcggtttggacgttcgggtgctgcacggcttggatttggaaatccacgcaggggaaagcaccggcatcatcggttcttcgggcagcggcaaatcgacgctgctgcatattttgggcgggctggatatgccgtctgaaggcagggtgctgctgatgggcgaggatttgcgtaccttaaaccagcggcgtttgggcgatttacgtaaccgccatctcggtttcgtgtaccagttccaccatcttctgcctgaattttcggcactggaaaatgtgatgatgccgcttctgatcggcaaaaaaagccgtgaagaggctgcggaggcggcaatggcgatgctggaaaaggtcggactgaaacaccgttcgacgcaccgcgcgggcgaactttcaggcggtgagcggcagcgtgccgccattgcacgcgccttggttacccaacccaaatgcctgcttgccgacgaaccgaccggcaatctcgatcgtgcgaacgccaggaatgttttggatatgatgctggaactgaaaacggaattgggaacggggctggtggtcgtaacgcacgacgacgaactcgccagccgcttcgagcgcgtgatggtcatgaaagacggcagcctgcaccccaaacagggcgcaaacgcctaa

SEQ ID NO: 36474 - DNA, 519 bp, Neisseria meningitidis
ttgagaatgaagatgtttgaacaagaagacgaatgggtcagcaaaacccaaatgaaaaagcagatgaacggtttgcaggatttgggtatggagctgaccaagctctcaagcgacacgttgaaaaaaatcggcttggacgaagatttgtacgaagccgtcgttacctataaaaaaatcacatccaacggcgcgctcaagcggcaggcgcaatttatcggcagactgatgcgcgataccgatcccgcgcccatcgaggcatttcttgccaagctgcgcggcgacgatgcggcgcacaacgcctttttgcaacgtgtggagcggacgcggatggagctgctggcagacgacggcgcgttgacgcagtttatgtcggattttccgcatgcggacgcgggcaagctgaggacactcatccgcaataccaaaaaagagcaggagcaaaacaaaccaccaaaaaatttccgcgccctgtttcaagagttgaaaaccgtgatggaaaacggggacgcggaaatttag

SEQ ID NO: 36475 - DNA, 1092 bp, Neisseria meningitidis
atgaacgcccaaaccctgattgccaacgttgccgaactcgtcaaaaccaagctcaaacccttagtggacgacatcgaccgcaaaggatactaccccgaagcatttatgcgcgaactcggcgcaatcggtggattcggcgcagtcggtacagaagccgaaggcggcaacggcttgggtttggcaacgcaaatcgccgtattgcgcgaaatcggcaaagaatgcggcgcaacctctttcagtgcgtggtgtcaggcggcttgcgcgtggtatctgcaccaaacgcccaaccgggccgtcaaagacaaataccttgccgacatcctgcaaggcaaagtattggcgggtacgggcatgtccaataccgtcaaacaccttgccgacatcgaaaaacacaacctccaagccgaacgcgtggaaggcggctacacagtcaacggcgcgctgccgtgggtgtccaacatcggcgaagaccacatttgggcgaataccgcccaaatcggcggcggctacgtcatgttcatcacaggcggacaatgggaaggcgtaagcctgcaaaactgccccgaattttgcgccctcgaaggtacgcgcaccttcagcctgaatttcaaagacgtatttatccccgacgaagacatcatcgccgcgcccgaacagtttgccgactacatccaaagcatcaaagcaggctttatcctcctgcaaatcggcatcggcgcgggcgtaatcgacggcagcctcggcatcatccgcctcgccaacgtcgtcaacgccgaagtcaacaactacctcaacgacggctacgacagcctcaaaacaaggctggacggcgcgtgggcagaaaccgaacggctcgccggcttggcttggagcggcacgcccgacaaccttgctaccctcaagctgcgcgaagccgccgccgtactggcacttgccgccgcccaatccgccgccctgcattccggcgcaaaaggctacctgatgcgcagtcccgcccaaaggcgcgtccgcgaagcaatgtttgttgccatcgtaacccccgctatcaaacacctacgcaaagaaatagcggcaatcgaagccgcaaaataa

SEQ ID NO: 36476 - DNA, 1467 bp, Neisseria meningitidis
atggctgaagcgacagacgttgtcttggtgggcggcggcattatgagcgcgactttgggcgttttgctcaaagaactcgaaccgtcttgggaaatcaccctgattgaacgcttggaagatgtggcgttggaatcgtcaaacgcgtggaacaacgccggcacggggcattccgcgctgtgcgaattgaactatgcgccgttgggtgcaaatgggattatcgatccggcgcgcgccctcaatattgccgaacagtttcatgtcagccgccagttttgggcgacgctggtcgcggaaggcaagttggaagacaattccttcatcaatgccgtgccgcatatgtctttggtgatgaatgaagaccattgttcttatcttcaaaaacgttatgacgcgtttaaaacccaaaaactttttgaaaatatggaattttccaccgatcggaacaaaatttccgattgggctccgctgatgatgcgcggccgggacgaaaaccaacccgtcgccgccaactactccgccgaaggtacggatgtcgatttcggacggctgacgcgccaaatggtgaaatatttgcagggcaagggcgtaaaaaccgagttcaaccgccacgtcgaagacatcaaacgcgaatccgacggcgcgtgggtgctcaaaaccgccgatacccgcaaccccgacgggcagctcaccctccgtacccgcttcctcttcctcggcgcgggcggcggcgcgctgaccctgctgcaaaaatccggcatccccgaaggcaagggctacggcggcttccccgtgtccggcctgttcttccgcaacagcaaccccgaaaccgccggacaacacaacgccaaagtgtacgggcaggcttccgtcggcgcgccgccgatgtccgtcccgcacctcgacacacgcaacgtggacggcaaacgccaccttatgttcggcccttacgcaggcttccgttccaacttcctcaagcaaggctcgcttatggatttgccgctgtccatccatatggacaacctctatcctatgctgtgcgccggctgggcgaatatgccgctgaccaaatacctgctgggcgaattgcgtaaaaccaaagaagaacgcttcgcctccctgctggaatactaccccgaggcaaaccccgacgactgggaactcatcaccgcagggcaacgcgtccaaatcattaaaaaagactccgaaaaaggcggcgtgctccagtttggtacggagattgtcgcccacgccgacggctcactcgccgcattgctgggcgcgtcgccgggcgcatcgaccgctgtgccgctgatgatccggctgatgcaccaatgcttccccgagcgcgccccgtcttgggaagaccgtctgaaagagctggtaccgggttacggcatcaagttgaacgaaaaccctgaaagggcggatgaaattatcgcctataccgcgaaagtattggatatttaa

SEQ ID NO: 36477 - DNA, 453 bp, Neisseria meningitidis
atgcaaattattctgttagaaaaaatcggcggtctgggcaacttgggcgacatcgtaaccgttaaaaacggttatgcccgcaacttcttgattcccgcaggtaaggcaaaacgtgctactgaagcgaacatgaaagagtttgaagcacgccgtgccgaattggaagccaaacaggccgaaattttggcagatgcccgagcccgtcaggaaaaattggacggtcaaaccgttaccgttgcacaaaaagccggtgtggacggccgcctgttcggttccgttaccaatgccgacattgctgctgcaatcgttgctgccggcatcgaagccgtgaaagcaaatgtacgtctgccgaacggtcctctgaaagccgttggcgagtacgaagtggaagtggctttgcacactgatgccgttgctaaaattaccgttgccgtcgttgccgcaaccgagtaa

SEQ ID NO: 36478 - DNA, 657 bp, Neisseria meningitidis
atgaccattaaaattatcctgatagacgaccatacccttttccgcagcggcatcaaggcacttttgtcgcgccaacatgattttgaggtcatcggcgaagccgcagacggcctctcgggcattaaaatgatcaaccggctgcaacccgatgtcgtcctgcttgaccttgatatgcccggtatgaacggacgcgaagcactctcccaaatcatcagcatcaatccgcagcaggcagtgattatgctgaccgtttccgaagacaacgacgacttgaccgaatgtatgcgcatcggcgcgcgcggctacctgctgaaaaacatcaacgccgactttctgctcgaaagcatacgcaaagccgccgaaggcgataatgtattctcgcccgagatgaccgccaaactcgttaaaagcctgatttccccccaacctgcccaagggacacaggcactctcctctcttacccctcgcgaactggaaatcttgggctatctcgccgcaggacacagcaacaaaatcatcgcccgccacctcgatcttgccgaatccaccgtcaaagtccacgttcaaaacctgctccgcaaactcaacctcagcagccgggtgcaggccgctgtttacgccatccggcacaacgtcccccaacccgtgctggaataa

SEQ ID NO: 36479 - DNA, 1344 bp, Neisseria meningitidis
atgtttcacagtgtcaatgtatttacgggcgaaacgctttaccgccgccccgcccaagattatgcggagtttgaacggcggctggcggatttgaaaatgcgcggcggggcgttcgcgcaactgggcgtaaccgaacgtgccgcgcgtctgcaaaaatttgccgaccgtttggaggcggagaaagagcgttttgcggaaatggtgtgcgaagaagtcggacgctgcctgcacgaatgccgcgcggaaatcggcaagtctatcgagctgatacgctattacgcccgcctcgcccccgaactgctcgcccacaaaaccatcgcgacgcaggcgagtttgagtcaggtaaggtttgagcctttgggcgtggtgtttgccgtcatgccttggaactatcctgtctggcaggttttgcgtttcgccgttcccgctatgtgcgcgggcaacgcgtgtgccgtcaaacccgcgcccagcgtggcacgcgtcagtcaggcgttgttcgatttggcttcagacggcattcctttggcaggcgcgtggctggacaatcaagacacactcaaagccatcgaacacaccgatgcaatggcgtttaccggttcgacgcacacagggcgcatccttgcggcacacgcgggcgcaaacctcaaaaaaaccgtgttggagctcggcggcagcaacgcctttatcgtgatgcccgatgccgacttggaacgcgccgccgcagaagcctgttattcccgtttccgcgatgcggggcaatcgtgcaacgccgccaaacgcatcatcgtaaccgaagccgcagccgatcgttttatcacgctgtttcttgccgaatgcgccaaattgaaaatgggcgaccccaaacatcccgatactacgcttgcaccgctgcaccgcgaagatttgcgggacagggttcacgggcaggttgaagatgccgtttcaaacggcgcggtatgcctgaccggcggaaaaatcccacaagggcgaggctggttttatcccgcgacggttttagacagggtaaatcctgcctgccgcgtctggagagaagaagtattcgggccggccgccctgattttgcgcgccgaaaacgaagaacatgccatcgcccttgccaatgattccccgttcgggctaggtgcctgcatttataccgccgataccgaacgcgcttggcggtttgccgaaaaaatacaggcgggatcggtgtttatcaaccgccataccagcagcgatttgcgcctgcctttcggcggagtcaaagattccggttacgggcgcgaattgtccgaattcgggctgtacgagttcgtcaacgtcaaaacctactggcagaaataa

SEQ ID NO: 36480 - DNA, 354 bp, Neisseria meningitidis
atgatagtccttcacggcatcccaaattgcgatacggtcaaaaaagccaaaaacaggcttgccggatacggcttggagtttgaatttcgggatttcaaaaaacagaggccgtctgaagcggaaatcagcctgtggctggagcaggtgcctttggagatactgctcaacaaacgggggactacatggcgcaaacttaatgcactgatgcaggaggaagccctgtcctcaaaggaaggtgcggtcagaataatgtccgaaatgcccagccttatcaaacgtcccgtactggaatacggcggaaaggttcatgtcggcttcagcgatgaatcttatcgagagatattcaaacgttag

SEQ ID NO: 36481 - DNA, 432 bp, Neisseria meningitidis
atgatggcgttcgaaaaagttgaacatttattgccggataccgtgttggacattgtggatgtcatcggactggcagcgacggaacagctggtcaaggcgattggcggggcgcggtttaaatttggtaagggcaaggtggacaccgagcgtttggcaattttggtcgaagccatcggcgaagtgaaaacacatgagctgttgcaggtatatggtggcgaggaattgtatgtcccacggtgcggtaaggcgttaatacagttgagaaaccataggttttatcaggagtttgtcaaattgcgcgatattgataaggagagcgggcttatggcgatgacgaagctatgccctaaatacggcatctcttcacgaacgggatatacgattatcaatgaaatgagccgacctgcggcacagcaggcagctttattttag

SEQ ID NO: 36482 - DNA, 1254 bp, Neisseria meningitidis
atgcagacttacctcgtcggcggcgccgtccgcgattatcttttgggcttgcccgtcaaagaccgcgattgggtggtcgtcggcgcagacgcgcaaaccatgctggcgcaaggcttccagcctgtcggcaaagactttcccgtgtttctccatcccgaaacgcacgaagaatacgccctcgcccgcaccgaacgcaaaaccgccaaaggttacgccggtttcagtttccacgccgacaaagacgttacgctggagcaggatttgatgcgccgcgacctgaccatcaacgcgatggcgcaagatgcgggcggcaagattatcgaccctttcggcggacaacgggatttggcggcaggcattttgcgccacgtttccccggccttcgccgaagaccccgtccgcatcctgcgtactgcccgctttgccgcgcgttacaggtttgaaatcgccgaagaaaccataaagctgatgcggcagatggtggaaaacggcgaagcggacgcattggttgccgaacgcgtctggcaggagttggcgaaaggtttgatggaaaaaaatccgcgcaaaatgattgaagtgttgcgcgaatgcggtgcgctcaaagtcttgctgcccgaagtcaatgccctcttcggcgtgccgcaacgcgccgactaccatcccgaaatcgacagcggcatccataccctgatgacactgcaacgcgccgccgatatgggtttgagcctgcccgaacgctatgccgccctgctgcacgacttgggcaaagccaaaacgccgcccgacatcctgccgcgccaccacggacacgacctcgccggtgtcgaacccgtgcgcgaagtcaatcaaaggttgcgcgcgccgaaacattgcgccgagcttgccgaattggtttgccgttggcacattattttccaccaagtcggacagcttaaaagccaaaccattctgaacgttttgaaaaaaaccgacgctttcagacgacccgaacgctttcagacggcattgaacgtctgcattgccgacacgcaaggccgtctgaaccgcgaacacacgccctacccgcaacgcgcgcactggctcgccttactcgaagccgccaatcaggcggattcgggcaaaatcgccgccgaatgccgggcgcaaggaaaagcgcaccttatcgccgaacaaatcgaccggatgcggctggcacaaatcgccccgctgcaaaaagcgtttcaagcggcgcaagacaaaacagaaaaacattaa

SEQ ID NO: 36483 - DNA, 1527 bp, Neisseria meningitidis
atggattatccaccgcttaagggtgcggcattggcgtgggttacgctgtctttggggcttgccgtatttatggaagttttagatacgactatcgccaatgtcgccgttcccgtcatcgccggcaacctcggtgcggcaaccacgcaggggacgtgggtcattacttcttttgctgtggcaaacgccgtttccgtgccgttaacgggctttttggcaaaacgtatcggcgaggtcaaactgtttaccgccgccgctgtcggtttcgtcatcacatcatggctgtgcggcatcgcgcccaaccttcaggctttggtgtttttccgcatcttgcagggttttatcgccgggccgctgattcccctgtcgcaaagcctgttaatggcatcctatccgcccgcaaaacggacgctggcactggcattgtgggcaatgaccgtcgttgtcgcccctgttctcgggccgatattcggcggctggatttccggaaactggcattggggttggattttcttcattaatatccctatcggtatcatatcggcatggattacatggaaacatttgaaatatcgggaaacggaaaccgttaaaatgccgaccgactatgtcgggcttacattgatggtagtcggtatcggcgcgttacagatgatgctggacaggggtaaggaactcgactggttcgcttcgggagaaatcattaccttgggcgtaaccgcactggtgtgcttgtcgtattttattgtttgggaattgggagaaaaatatccgattgtcgatttatcgctgtttaaagatcggaattttaccgtcggcatcattgccacatcattgggttttatggtgtatatggggacgctgaccctgctgccgttagtgttgcagaccaacctgggctatacctccacgtgggcggggcttgccgccgcacccgtcggcatcctgcccgtcttcctgtctccgttaatcggcaggttcggcaataaaatcgatatgcgcctgctcgtaaccgccagcttcctgacttttgccttcactttctattggcgcaccgatttttatgccgacatggatatcggcaacgtcatctggccgcagttttggcagggagtaggcgttgccatgttcttcctgccgctgaccaccatcacactgtcgcacatgaagggcggacagattgccgccgccggcagcctgtcgaatttcctgcgcgtgctgatgggcggtgtcggcgtatccgtcgttagtaccctgtgggaacggcgtgaagcgttgcaccatacacgctttgccgaacacatcacgccctattccgcaacattgcacgaaacggccgctcatttgtcccagcacggcgtttccgacattcaaaccctaggcatcatcaacaataccattacccagcagggttttattatcggctcgaacgaaatctttatggcgggcagcttgttattcattatcatgatacccgtcatatggctggcaaaaccgccgttccacaacggcggcggcggtggacattga

SEQ ID NO: 36484 - DNA, 1122 bp, Neisseria meningitidis
atgagtaatcaagatttttatgcgacgctgggtgtggcaagaacagctaccgatgatgagattaaaaaagcctaccggaaattggcgatgaaataccatcccgaccgcaatcctgacaataaagaggcggaagagaagtttaaagaagtacaaaaggcgtatgaaactttgtccgacaaggaaaagcgcgctatgtacgaccagtatggtcatgcggcgtttgaaggcggcggacaggggggcttcggagggtttggcggatttggcggtgcgcagggttttgactttggggatattttcagccaaatgtttggaggcggttcggggcgcgcccagcctgattatcagggtgaggacgttcaagtcggtatcgaaatcacgcttgaagaagccgcaaaaggtgtgaagaaacgcatcaatattccgacttatgaagcgtgtgatgtctgtaacggcagtggcgcgaaaccggggacatccccggaaacctgcccgacttgcaaaggttcgggtacggtgcacatccagcaggcgattttccgtatgcagcagacttgtccgacctgccacggtgcgggcaaacacattaaagaaccttgcgtcaaatgccgtggcgcggggcggaataaggcggtcaagacggtggaagtcaatattcccgccggtatcgatgacgggcagcgtatccgtttgagcggcgaaggcgggccgggtatgcacggtgcgcctgccggcgacttgtatgtaaccgtccgcattcgggcgcataagattttccaacgcgacggtctggacttgcattgcgaactgccgatcagttttgccacggctgctttgggcggggagttggaagtgccgaccttggacggaaaggtcaagctcaccgtccccaaagaaacccaaaccggcaggaggatgcgcgtgaagggtaagggtgtcaaatctttacgcagcagcgcgaccggcgatttgtactgccatattgttgtcgaaacgcctgtcaatttgaccgaccgtcaaaaagagcttttggaagaatttgagcggatttctaccggcttggaaaaccaaacaccgcgcaagaaatcgtttttagacaagctgcgcgatttgtttgattga

SEQ ID NO: 36485 - DNA, 510 bp, Neisseria meningitidis
gtgcgccgcaacgatgatattacgttggaggaaatcgaagccttaaagccgcaatatcttgtaatcggccccggaccgtgttcccctaaggaggcagggatttcagtagaagccatgcgccattttgccggccggctgccgattatgggcgtgtgcctcgggcatcagacgataggcgaggcgttcggcggcaggatagtccgcgccaaaacgctgatgcacggtaaggtgtcgcccgtgtcccattcgggcaaggggatgtttaagggtttgcccaatccggttacctgtacgcgttatcacagcctcgttattgaacgcggcacactgcccgaatgtttggaaatcacggcatggacggaagacggcgagattatgggcgtgcgccataaggaatatgccgtcgagggggtacaattccaccctgaagctctgctgaccgaacacggacatgatatgttaaacaattttttagttgaatttcaaaacttcaaaccgcaaaaaatctga

SEQ ID NO: 36486 - DNA, 540 bp, Neisseria meningitidis
atgtcccaagtttttaaagattttgatttgtcctccgtatgggaatccgacagttgggcagatgaaaactaccaagaagccccgtttacccctgaaattttggctgccgtagaaagtgaactgggctataaattgccgcaaagttttattgaattgatggcggtacaaaacggcggaatatttgtcaaaaactgttttccgaccacacagagaaattcgtgggcggaaaatcatgtgcaaatttgcgaggtatcgggcatcggctttgaaaaagaagggagtttgtgcggcgaaacagggcaaaaactttggctggaagaatgggaatatccgcccatcggcgtgtattttgccaacgacccgtcaggcggtcatgccctgtttgccttggactatcgggcgtgcggcaaagacggcgagccgaaagtggtgtttgtcgagcaagaatcggattttgaaatcgtcgaacttgcccccgattttgaaacctttatccgcagcttgcggcatgaagatgagtttattgacgaggaaatataa

SEQ ID NO: 36487 - DNA, 1005 bp, Neisseria meningitidis
atgagcattaaagtagcgattaacggtttcggccgcatcggccgcctcgcattgcgtcaaattgaaaaagcccacgacatcgaagtcgtcgccgtcaacgacctgacccctgccgaaatgctgctgcaccttttcaaatacgacagcacgcaaggccgtttccaaggtactgccgaattaaaagacgatgccatcgtggtaaacggcaaagaaatcaaagtttttgccaatccgaatcccgaagaattgccttggggcgagttgggtgtggatgtcgtcctcgaatgtaccggcttctttaccaataaaaccaaagccgaagcacacatcagggccggcgcgcgcaaagtcgtgatttccgcacccggcggcaatgatgtgaaaaccgtcgtatatggcgtaaaccaagacattttggacggcagcgaaaccgttatctccgctgcttcctgcaccaccaactgccttgccccgatggcggcagtcctgcaaaaggaattcggcgtagtcgaaggcctgatgaccaccatccacgcctacaccggcgaccaaaacacccttgacgcgccgcaccgcaaaggcgatttgcgccgcgcccgcgccgccgcgctcaacatcgtgcccaacagcaccggtgccgccaaggccatcggtctggttatccctgaattgaacggcaaactcgacggctccgcccaacgcgtccctgttgccaccggctcgctgaccgaattggtttccgtcctcgaacgccctgtaaccaaagaagaaatcaacgccgcgatgaaagccgccgccagcgaatcttacggctacaacgaagatcaaattgtttcttccgacgttgtcggcatcgaatacggttcgctcttcgatgcgacccaaacccgcgtgatgaccgtgggcggcaaacaattggtgaaaactgttgcctggtacgacaacgaaatgtcctacacctgccaactcgtccgcactttggaatactttgcaggcaaaatctaa

SEQ ID NO: 36488 - DNA, 1290 bp, Neisseria meningitidis
atgaaaaaactcaacacccaatcgcccgatttccaagccggactcaaagccctgctggcttttgaaaccgcgcaaaaccccgaaaccgaacgcatcgtcgccgacatttgcgccgacgtgcaaaagcgcggcgatgcggctttgattgaatacaccaacaaattcgatcagacaaacgctaaaagcatcgatgatttaatacttacgcaagccgatttgaacgcggcgttcgagcgcattccgaacgacgttcagacggcattgcagaccgccgccctccgtgtcgaaagctaccaccaacgccaaaaaatggaatcgtggagctacaccgatgaagacggcacgctgttgggacaacagattaccccgcttgaccgcgtcggcatttacgtccccggcggcaaggcggcatatccgagttccgtcatcatgaacgccatgcccgcccacgtcgcaggcgtgaaagaaattattatggtcgtgccgacaccgaaaggcgaacgcaacgacatcgtgcttgccgccgcatacgtcgccggcgtaaccaaagtcttcaccgtcggcggcgcgcaggcggttgccgccctcgcctacggcacggaaaccatcccccaagtcgataaaatcaccggtccgggcaacgccttcgtcgccgccgccaaacgccgcgtgttcggcgtggtcggcatcgacatggtggcggggccgtctgaaatcttggtcatcgccgacggcacgacacctgccgattgggtggcgatggatttgttcagccaggccgaacacgacgaaattgcccaagccatcttaatcggcacgtcgcaagcgtatctcgacgaagtagaagccgctatggacaggctcatcgaaaccatgccgcgccgcgacatcatcgaagcctcgctcggcaacaggggcgcgatgatactcgccaaagacttggacgaagcctgcgaaatcgccaactacatttcccccgaacacttggaattgtcagtcgaaaatccgcaggaatgggcgaaaaaaatccgccacgccggcgcgattttcatgggacgctacaccggcgaaagcctcggcgactactgcgccggcccaaaccatgtgttgcccaccagccgaaccgcccgcttttcctcgcctttggggacatatgatttccaaaaacgctccagcctgattcaggtttcggaacagggcgcgcaaaaattaggcgaaaccgccagcgtgctggcacacggcgaaagcctgaccgcccacgcccgcgcggcagagttccgtatgaaataa

SEQ ID NO: 36489 - DNA, 273 bp, Neisseria meningitidis
atgaagaaaaccggcaaatatcttatctatgctgcggcatttaccgcattctgctttgccttccaagaaaaccgttctgaagccaaacagcctgacatcactttatccgcatccctgtgcgaacaattcaacatactgaacgccaaagatatggatgcagaacaagtctccctttccaaagaatgcgacatcatcgagtcttcacacgactgggaaaaagagtacggcaacttgaacgaacaggaaatgctcgccggcatcgtctatgaataa

SEQ ID NO: 36490 - DNA, 1923 bp, Neisseria meningitidis
atgattgaaatcaaaaacctcaccctgcaacgcggtttgaaagtcctgctcgacaaagccaacgctaccgtcaatcccggtcagcgcgtcggtttgatcggcaaaaacggaacgggcaaatcgagcctgtttgccttaatcaagggtgaaatcactcaggacggcggcgatgtctcgattccgaaaaactggcggctcgcttccgtttcccaagaaacgcccgatttggatatttccgctttggattacgttttgcagggcgatgccgagttgcaggcttttcagacggcattgaggcaggcagaagcgcaaaatgacggcatgaagcaggcggaatatcatgctaaattggaagaaatcgacgcttataccgcgccggcccgcgcggcaaaattgttgaacgggctgggtttttcgcaagaagaacacagccgccccgtcaaatccttttccggcggctggcgtatgcgcctgaatcttgcgcaagccctgatttgccgcgccgatttgctcttgcttgacgaaccgaccaaccacttggatttggaaaccgtcttgtggctggaaaaccaccttgcttctttaccctgcacgcaaatcatcatttcccatgaccgcgattttctcaacgcggcaactacccaaaccattgaattatcgcagcaaaaactcacgcaatacggcggcaattacgatttttaccaaaacgaacgtgcgcagcgtctcgcgcaacaacaagctgcctatgtcaaacagcaggcgcaaatcaaacatttgcaatcctttatcgaccgcttcaaagccaaagccaccaaagccgttcaagcgcaaagccgcatgaaggctttggcgaagctcgaacgcatcgctcccgcgcatctggacagcgagttttcctttgagttttaccatcccgaccatctgcccaatcctttgttaaagctagaacacgctgatttgggttacgaaggcaaaactgttttgcacgacattaccctgtcgctggaaagcggcgcgcgctatggtttattgggtgtcaacggcagcggtaaatctacgtttatcaaagccttggcgggcaaaatcgatttgctctccggcagcatcgtccgttccgaaaaactcaatatcggctattttgcccaacaccagctcgacaccatccgcgccgaccaaagccctgtttggcatattcagcagctttcgcccgaaatgcgcgaacaagaaatccggaatttcctcggcggcttcaattttgtcggcgatatggcgttgcagaaaaccgaacctttttccggcggtgaaaaagcccgcctcgcccttgctatgattatctggcaaaagccgaacctgctgctgcttgacgagccgaccaaccatttggatttggatatgcgccacgccttgacgctcgcgttgcaaagtttccaaggcgcattaatcgccgtatcgcacgaccgcagcctgcttgaagcgactaccgacagcttcctcctgatcgacaaaggccgtctgaagaacttcgacggcgatttgaacgattaccgccaatggcgtttggcacaggaaaacgccgccgccgcacccgcagcatccgcacaaagccaaagccgcaaagacaccaagcgcatcgaagcgcaaatccgtcaggaaaaagcccgacgcggcaagccgatacagcagaaaatagaccgtgccgaaaaagaaatggcgcagctttccgaaattcagacggcatgtgaagcatttttagcacaagaagacgcttaccttgaagcaaacaaagaaaaattgcaaaataccttatccctgctggcaaaagtcaaaacacaacttgcccaaatcgaagaggtttggctggcttgtcaagaagaattggaacggattgaaactgaaatcgagaaacagtttgccgagcgataa

SEQ ID NO: 36491 - DNA, 558 bp, Neisseria meningitidis
atggatgctttaaaattattgacgaaccgccgatcttccaaaaagctgaagcaccccgcccccgatgcggcggagttggagcaaatatttcaggcggcaacccaagttcccgatcacggcaatatgcgcccgttccgttttaccgtgattcaaggcgaggtaggattgcaacgttttcgcgatgtgttgaagcaaacggttgccgaattgaatttcggcgacgatgcgatgaaaaaggcggaaaaagtaggcaatatggcgccgatggttatcggggtaacgtttgcgccgaaccgcgatgtgcctaagccgaaaccggaatgggagcagatgctgacggcgggttgtgcggcgtatgcgctgcaactggcggcaacggcgcaaggtttcgataatgtgtggataacggggatgtgggtcaacagccccctgttgcgtgaggctttcggatgtgcggataaggataaaatcatcgggctgatgatggtcggcacgccgacagaggaagtgcataagcccaagaataccgatttggaagcgtttgtcagccattggtaa

SEQ ID NO: 36492 - DNA, 1143 bp, Neisseria meningitidis
atgaaaaaatccgtattagccgttttggccgcgctgtctctggcagcctgcggcggcagcgaaaaaaacgccgtgcaacctcaagcagacgctgcgtctgctgccaatgccgaagccgctgccaccgatactctgaacatctacaactggtcgaactatgttgatgagagtacggtcgaagactttaaaaaagccaacaatctgaagctcacttacgacttgtacgaaaacaatgaaacgctggaagccaaaatgctgaccggcaaatccggttacgatttggttgtgccgggcatcgccttcctaccgcgccaaatcgaggcgggcgcgtatcaaaaagtcaacaaagacctgattcccaactataaaaacatcgatcccgaactcttgaaaatgctggaaaccgccgacccgggcaaccagtatgccgtcccctatttctccggcgtgaacacgattgcgattacggcgaaaggcaaagagcttttaggcggcaagctgcccgaaaacggctgggatttgctgttcaaacccgaatacacccacaagctgaaatcctgcggcatcgccctgtgggacaccccgagcgaaatgttcccgattttgctgaactacttgggcaaagaccccaaaggttcgaatcctgaagatttgaaggcagcggcggaagtgttgaagtctatccgtccggatgtcaaacgtttcagcccgtccatcatcgacgagctggcgcgcggcgacatctgcctggcggcaggcaacggcggcgatttgaacttggcgaaagcacgttccgaagaagtgaaaaacaacgtcggcatcgaagtgctgaatccgaaaggcatgggcttctggattgagtcttggctgattcccgccgatgcgaaaaacgtcgccaatgcccacaaatacatcaactacacgctcgaccccgaaatcgcggcgaaaaacggcatcgccgtaaccttcgcccccgccagcaaaccggcacgcgaaaaaatgcctgccgaactggtgaacacccgttctatcttcccgaacgagcaggatatgaaagacggtttcgtgatgccgcaaatgagtacggatgcgaaaaaactgtcggtcagcctgtggcagaaaatcaaagtcggcaccaactga

SEQ ID NO: 36493 - DNA, 435 bp, Neisseria meningitidis
atgcccgcctgtttctgcccccactgcaaaacccgcctttgggtcaaagaaaaccagctcaacgtcgcccaaggcttcgtcgtctgccaaaaatgcgaagggctgtttaaagccaaagaccatctggcaagcacgaaagaacctatattcaacgatttgcccgaggctgtttcggatgtcaaactcgttcaccgtatcggcacgcgcgccatcggcaagaaacagatttcccgcgacgaaatcgccggcatcctaaacggcggcacaaccctgcccgatattccgcccgcaaccgccgccacccctgctgccgcaccgcaggttaccgtaccgcccgccgcgcccgcccgtcaggatgggttcaactggacgattgcaaccctgtttgcccttatcgtcctcattatgcagctttcctacctcgtcatcctatga

SEQ ID NO: 36494 - DNA, 531 bp, Neisseria meningitidis
atgcagggttttgaactcgaagatttgacgctttggctgatacgcgatgccggagaggatcagatgtggatagaccgttgggcgatcagttatcccgtcgtgcagatgtccgaagcgtcggccggtcaaagcataggggaatggcaggcagggcttcggacggcatttgaacgcatacgtggcaaatacgtcgccgttgtcgcacacggtgcgggcgcggccgcatttttggcgtggctgtatcaggcagacatcctgacacggaagaaaattgccaacatcatccttgtaccgcagcgtcccgatatttttcccgacgatgcggaacacactttccaacgcgtccgctgtccctgccgtgccgcattggtggtgtccgaacacggggatgtgccgcgagattgggcgcaaaaacaggcggatacgtggaacgcgcgcctgttggtttccccgcattcgggcagtttgaacggtatgctcggcggctggcagtggggtatgaagctgatgcaggaaatgttgctggcgtga

SEQ ID NO: 36495 - DNA, 1125 bp, Neisseria meningitidis
atgctatctaaacaaatctcaaatcttaattcttctagcaataaaccaaaaatcctatctctattttcaggatgtggcggtttggatttgggctttcatcaagctggttatgaaactgtttgggcgaacgatttctcccattgggcttgcgaaagtttccgtaaaaatatcggcgatgtcatcgtagaaggtgatattgaacaaattgatccgaataatccaactattcccgattgcgacatcattttaggcggattcccttgtcaagatttttccatgatttggaaacagccgggcttagagggtgagcgcggcaatctttataaaagctttttacgttttgtaaatgcaaaaaaaccgaaagtttttgttgctgagaatgtgaaaggtttattgactgctaacaagaaaaaagccatccagcaaattattaccgactttgaaaattgcggttattacgttcaggcgaagctgtataactttgctgaatttggcgtacctcaatttcgtgaacgtgtgctaattgtcggtgtgcgtttggatacgggtttcgacttccaccaccctgagcctactcacggtgaaaatacggattacggtcttttaccttatgtaaccgctggtcaggctatttctgatattcctgaaaacgcaaacaatcacgagcagttaaaaatcagtgaacaaactaaaaaacggttgaatctgattccagaaggaggaaattacagcgacattcctagagatcaccctttatacgttaaaagtatgttgagtttggtttaccgacgaatgcatcgggacaaaccttctacaaccatcattgctgctggcggtggaggtacttggggttatcacttccctgaaccgcgtgcctttaccaaccgcgaacgggcaagattacagagttttcccgataattttgagtttatgggctcaaccacggaagtccgccgtcaaatcggaaacgccgttcctccacagggtgtagtagaactagcaaaagccatacttccagttttttcagacggttatcacaaggtaaatctacatgaaaaattagaagcagaaaaaaacgtcttcttccaagacagactgaacaaaatccgtgggggaaaacgatga

SEQ ID NO: 36496 - DNA, 1086 bp, Neisseria meningitidis
atgaccgtattgagagaggtacacatgtccaaaaatgcacaaaaaaccctacttgccgtgtgcagtttcgaggtgcagccaaaagacgggcgaatccaactgctgccatatggcgaatttcgcgcagtagacggtcgtccgactgatgtccctgcgtggtatctgaccgaagaaaacggtcatgatgtcgcgttgttggccaacagctcgcgcaatcagttggttgtcgattatgaacaccagacgctctacaaagagaaaaacggacaacctgcacctgccgccggttggatgcgttggctggagttcacgcctaaaggcatgtttgccgaagtggagtggacggacaaggcggctgcggcaattgccgcaaaagagtatcgctacatctctgctgtgttttcctatgacacaaagggatatgtaagcaaaatttttcacgccgcgctgacaaatttccccgcgttggacggtatggacgaggtgctggcggcagcgtcggcgcaaattttaaaaccggaaacggagcaaaaccctatgaaagagttgttacagcaactgttcgacctgcctgatgcgggcgaagaagaactgaaggcggcattgtccgcgctcgtggaagccaagccgaaagacgtggcattgtctgccgacgtgttcgcgcagctggcggaaaaagacagccgcatcgcggcattgacggcgcaaaccgccaagcctgatttgactaaatacgcgcctatctcagtggttcaagagctgcaaagcaaagtcgccgcgctgactgccaagcaggaagcagacaaaggcaacgaattgattaccgccgcgctgacttcaggcaaattgctgcctgctcagaaggagtgggcaaaaggcgtattgaaacagccgggcggcttggcatttttgaccggctttattgaaaacgcccagccggtcgctgcactggcaggctcgcaaacgggcggcaaagcacccgacgaacgcgtcgccgcactgactgcggaagaggcagccgcagcaaaaatgctgggcatgtccggcgaagaatttgtaaaaatcaaagaaagcgaaggtaagtaa

SEQ ID NO: 36497 - DNA, 1446 bp, Neisseria meningitidis
atgagtacacaaacaaattttgatttggtgttgttcggtgcgaccggcgatttggcgatgcgcaagctgttgccctgtctgtaccaggcgcatgttgccggtctgcttcatcccgaagggcgtattttgggggtcagccgcagcgagttggataccgaaggttttctggcgaaggtggaaaccagttccaaaatccatgtgaaagaaaatttttccgatgaggcttgggcatcgtttgtcgaacgtctcgcatatctcaaagtcgatgttacgcagccggacgattttgccgctttgggcgatttggtcaaagcgcgcaaagaaaccgacaatgtcgtcatctatctttccaccgcgccgaaattcttcgcgcaaacatgtgaaaaccttgccaaaatcggtttgaacgccgacaacgtgcgtgtggttttggaaaaaccgttgggtacggatttggcttcttcccagcaaatcaataccgatgttgcgcgttatttcaaagaagggcaaatttaccgcatcgaccactaccttggcaaagaaagcctgcaaaacctgcttgcgctgcgttttgccaatgtaatgttcgagccgctgtggaacaataaatacatcgaaagcgtgcagttgaccatcgccgaacagctcggtgtggaagagcgcggcgagttttacgacattaccggcgcgttgcgcgatatggtgcaaaaccatttgatgcagatgctgtgcatgactgcgatggaagcccccgccagcttggatgccgatgcggtgcgcgatgaaaaagtcaaagtcatcaagtcattgaagccgctgaccgtcgagtctgtcaatgaaaacgtcgtgcgcggacaatataccgccgccaaaggcatgaacggctatcttgaagaaatcaacgttccgcaagacagctttaccgaaacctacgtcgccattaaagccgaaatcgaaaacgaacgctggaagggcgttcccttctacctgcgtaccggcaagcgcatggcgggcaaagtggcggaaatcgttttgaacttcaaagatttgaacagccatatttttgaaggcagccgcaccgcgcccaaccggctcgttatcgagttgcaaccatatgaatccgtgcgcctctatacgcagatgaaaaccccgggggcaggaaataaggtcgaaaccgtgccgctggcaaccgatttgggcaaagcattggaaggccgccgcgcggaagcttacgagcgcctgctgctggacgtgattaacggcaaactcgctttgttcaaccgccgcgacgaactcgaagccgcgtgggaatatgtgatgccgattttggaaaactggacaaataacaccacgccgccgcacggctacggcgcacactcgtgggggcctgaagccgcgcgcgaactgttggcgcgcgacggacacaagtggcacgaagagcagtaa

SEQ ID NO: 36498 - DNA, 621 bp, Neisseria meningitidis
atggctgtacgttccaaatcctcaaaagcgtggctgcacgaacacgtcaacgaccactacgtccatatggcgcaaaaagacggctaccgcgcccgtgccgcatacaaacttttggaaatcaacgaaaaagacaaattaatcaaacccggcacggtacttgccgacttgggcagcgcaccgggaagctggtcgcaggttgccgccaagctgacgggtacttccggcgcggtattcgctttggacatcctacccatggaagccatagggggcgtctccttcattcagggcgacttccgcgagaacgacgtactggcacaatttgaaaccttgttggacaaccgcccgctcgaccttgtaatttgcgatatggcgcccaatatgtcgggaaacgccgtaagcgatcaggcacgcagcttttatctgtgcgaactggctttagacttcgcctcgcaacacctgaaaaccggcggcagctttttggtcaaagtctttcagggtgcaggctatcaggaatacatggcagccatgcgcgaaattttcggcacggtgcagacgcgcaaacccgaagcctcgcgcaatcgctccagtgagatttatttattgggcaaaaataaacgctga

SEQ ID NO: 36499 - DNA, 603 bp, Neisseria meningitidis
atgaccgacaaaatttctcccgacgcactaattgaagccgcactgctgacccaaaccgaaccgctgaccgaaaaatctatgcgcgaattgtgtgtgccgccactgtcgcaggacaaactgattgatgtgttggcgcagttgaaaacgcgttggcaggatagggcgttgcaactggtgcatacgcaagagggctggcgttttcagattgttcagacggcattcgagcggctgggcagcctgcaagaacagcgtgcgccgcgttactcccgcgccgtgatggaaacactggcgattatcgcctaccagcagcccgtaacgcgcggcgacatcgagggcatacgcggcgtggcggtgtcgcagaacgtgatgcagaccttgcaggatcgggggtggattgaagtcatcggacatcgggacacattgggaaaacccgcattgtgggcgacaacggcaacttttctcagcgatttgcgcttggacggtctggaagaacttccgccgctgaccgaactgggcgaactggttttacccgatttaatggaaatgccgcctacggatgaagaagagccggaagccgtaccgtccgataccctgcccaactga

SEQ ID NO: 36500 - DNA, 390 bp, Neisseria meningitidis
atgtccaaaaccatcatccacaccgacaaagcccccgccgccatcggcgcgtacagccaagccgtccgagccggcgacaccgtttacatgagcggtcaaatccccctcgatcccgccacgatgaccgtcgtcggcaacggcgatttccgcgccgaagcgcgccaagtgttccaaaacctgcaagccgtcgccgaagcggcaggcggcacgctggccgacatcgtcaaactcaacgcctacctgaccgacttgggcaattttgccgtcttcaacgaagtcatggcggaatttatcgccgagcccttccccgcccgcgccgccgtcggcgttgcctcgctgcccaaaggcgtgcaggtcgaagccgaagccgtcctcgttttgaacgcataa

SEQ ID NO: 36501 - DNA, 861 bp, Neisseria meningitidis
ttgaagttggaccaagtgattgattggcaaccaatcgaacaatacctgaaccgtcaaaaaacccgttaccttagagaccaccgcggccgtcccgcctatcccctgttgtccatgttcaaagccgtcctgctcggacaatggcacagcctctccgatcccgaactcgaacacagcctcatcacccgcatcgatttcaacctgttttgccgttttgacgaactgagcatccccgattacagcaccttatgccgctaccgcaattggctggcgcaagacgacaccctgtccgaactgttggaactgattaactgccaactgaccgaaaaaggcttaaaagtagagaaagcatccgccgccgtcattgacgccaccattattcagaccgccggcagcaaacagcgtcaggccatagaagttgacgaagaaggacaagtcagcggccaaaccacaccgagtaaggacagcgatgcccgttggatcaagaaaaacggcctctacaaactcggttacaaacaacatacacgtaccgatgcagaaggctatatcgagaaactgcacattacccccgccaatgcccatgagtgcaaccacctgtcgcctttgctggaagggatagccgacggtacgaccgtctatgccgacaaaggctatgacagtgcggaaaaccggcaacatctgaaagaacatcagttgcaggacggcattatgcgcaaagcctgccgcaaccgtccgctgacggaagtgcaaaccaaacgcaaccgatatttgtcgaagacccgttatgtggtcgaacaaagcttcggtacgctgcaccgtaagttccgctatgcgcgggcagcctatttcggactgattaagtga

SEQ ID NO: 36502 - DNA, 639 bp, Neisseria meningitidis
atgtttcaaaattttgatttgggcgtgtttctgcttgccgtcctgcccgtgctgctcgccattaccgtcagggaggtggcgcgcggctatacggcgcgctactggggagacaacactgccgaacaatacggcaggctgacactgaaccccctgccccatatcgatttggtcggcacaatcatcgtaccgctgcttactttgatgtttacgcccttcctgttcggctgggcgcgtccgattcctatcgattcgcgcaacttccgcaacccgcgccttgcctggcgttgcgttgccgcgtccggcccgctgtcgaatctggcgatggctgttctgtggggcgtggttttggtgctgactccgtatgtcggtggggcgtatcagatgccgttggctcaaatggcaaactacggtattctgatcaatgcgattctgttcgcgctcaacatcatccccatcctgccttgggacggcggcattttcatcgacaccttcctgtcggcgaaatattcgcaagcgttccgcaaaatcgaaccttatgggacgtggattatcctgctgcttatgctgaccggggttttgggtgcgtttattgcaccgattgtgcggctggtgattgcgtttgtgcagatgttcgtctga

SEQ ID NO: 36503 - DNA, 1575 bp, Neisseria meningitidis
atgttcagacggtatcttccgaacagacagatgaatatggtttccaaactggacaaatactggcagcaccccgccctctactggcctttgctcatcctttttgccgccgccaccccctttaccttcgcaccctactaccacttttggctgatgcccttgattttcggtgccttcgtccgcctcatcgaactgcgtccgcgttttgctgtctcttccgcctacctgttcggcctgaccgcatacacgacacagttctactggatacacaccgccctgcacgacgtttccggcctgcccgacctctatgccgtaccgctgaccttcctactccccgcctaccttgccctttatccggcactgtgtttctggctgtggaaaaaatttaccctgcctcggggcataaaaatcggtttggtactgcccatcctgtggacgctgaccgagtttgcccgcgaacgtttcctgaccggattcggctggggcgcaatcggctactcccaaatcaccccggacagcccgctcgccggctttgccccattgggcggcatccacatggttacactggcaaccgcctttctcggtgtctggctggttttggcgagtgataacaccgcacgttcgggcaaacgcctgcttccaattatcctgattgccgccctgcttgccgcaggctacaccgcccgacaaaccgacttcacccgccccgacggcagccgcagcaccgtcgccctgcttcaaggcaacatcgaccaaaccctcaaatggcgtgaagaccaagtcatcccgaccatacagaaatattacgaacaggtcggcaaaaccactgccgacatcgtcatcctgcccgaaaccgccatccccgttatgcgccaaaacctgccggaaaacatactggcaaaatttgccgaacaggcgcaaaacaacggcagcgcgctcgccgtcggcatcagccaatacacttcggacggcaacggttacgaaaacgccgtcatcaacctgaccggttatcaggaaaacaatcaggacggcatcccctactacgccaaaaaccacctcgtccccttcggcgaatacaaaccgctgcccttcctgaccacgccgctttacaaaatgatgaatatgcccctttccgacttccgcaaaggcggcggtaagcaatccgccctgctgatgaaaaaccaaaaaatcgccttcaacatctgttacgaagacggattcggcgacgaactgattgccgccgccaaagatgccaccctgcttgccaatgccagcaatatggcgtggtacggaaaatccaacgccatgtaccagcacctccaacaatcgcaggcgcgggctatggaactcggacgctatatggtccgcgccaccaacaccggcgcaaccgccatcatctcccccaaaggcaacatcatcgcccaagcccaacccgatacggaaaccgtattggaaggacacatcaaaggctatgtcggcgaaacgccctatatgaaaaccggcagttcatggtggttgatgggcatattggccctagccgcactgattcttttcatcttccgaaacaaagaacactga

SEQ ID NO: 36504 - DNA, 171 bp, Neisseria meningitidis
atgtattttgaaatctataaagacgcaaaaggcgaataccgttggcgtttgaaagcagccaaccatgaaatcatcgctcagggcgaaggctacaccagcaagcaaaactgtcagcacgcagtcgatttgctgaaaagcactaccgccgctacccctgtaaaagaggtataa

SEQ ID NO: 36505 - DNA, 1059 bp, Neisseria meningitidis
atgaccgccgccctgcacatcggacacctgtccaaaagttttcaaaacaccccggttttaaacgacatttcgctcagcctcgacccgggcgaaatcctctttatcgtcggcgcgtccggctgcggcaaaaccacccttttacgctgccttgccggttttgaacaacccgattttggcgaaatttcgctttccggcagaaccatcttctcgaaaaataccaacctccccgtccgcgaacgccgtttgggttatgtcgtacaggaaggtgtgctgttcccccacctgaccgtttaccgcaacaccgcctacgggctgggcaacgggaaaggcaagacggcgcaagaacggcagcgcatcgaagctatgttggaattgaccggcatttccgaacttgccggacgctatccgcacgaactttcgggcggacagcaacagcgcgtcgccctcgcccgcgcccttgcacccgatcccgaactgattttgttggacgaacccttcagcgcgctggacgaacagttgcgccgccagattcgcgaagacatgattgccgccctgcgcgccaacggcaaatctgccgttttcgtcagccacgaccgcgaagaagccctgcaatacgccgaccggattgccgtgatgaaacaggggcgcatcctccaaactgcaagccctcacgaattgtaccgacaacctgccgaccttgatgccgccctgtttatcggcgaaggcatcgtgttccccgccgcgctcaacgccgacggcaccgccgattgcggattgggccgcctgcccgttcaaagcggcgcacccgcaggcacacgcggcacactgctcatccgtccggaacagttcagccttcacccccattccgcacccaccgcctccattcacgccgtggttctcaaaaccacgcccaaagcgcggcataccgaaatcagtctccgggtcggacaaaccgtcctcacgctcaacctcccttccgcccccaccctgtcagacggcatttccgccgtcctccatttggacggtcccgccctgttcttccccggaaataccctctga

SEQ ID NO: 36506 - DNA, 1050 bp, Neisseria meningitidis
atgcaaaacaacaacgaatttaaaattggtaatcgttcagtaggttacaaccacgaaccattgattatctgtgaaatcggcatcaatcatgaaggctctttaaaaacagcttttgaaatggttgatgctgcctataatgcaggcgctgaagttgttaaacatcaaacacacatcgttgaagacgaaatgtctgatgaggccaaacaagtcattccaggcaatgcagatgtctctatttatgaaattatggaacgttgcgccctgaatgaagaagatgagattaaattaaaagaatacgtagagagtaagggtatgatttttatcagtactcctttctctcgtgcagccgctttacgattacaacgtatggatattccagcatataaaatcggctctggcgaatgtaataactacccattaattaaactggtggcctcttttggtaagcctattattctctctaccggcatgaattctattgaaagcatcaaaaagtcggtagaaattattcgagaagcaggggtaccttatgctttgcttcactgtaccaacatctacccaaccccttacgaagatgttcgattgggtggtatgaacgatttatctgaagcctttccagacgcaatcattggcctgtctgaccataccttagataactatgcttgcttgggagcagtagctttaggcggttcgattttagagcgtcactttactgaccgcatggatcgcccaggtccggatattgtatgctctatgaatccggatacttttaaagagctcaagcaaggcgctcatgctttaaaattggcacgcggcggcaaaaaagacacgattatcgcgggagaaaagccaactaaagatttcgcctttgcatctgtcgtagcagataaagacattaaaaaaggagaactgttgtccggagataacctatgggttaaacgcccaggcaatggagacttcagcgtcaacgaatatgaaacattatttggtaaggtcgctgcttgcaatattcgcaaaggtgctcaaatcaaaaaaactgatattgaataa

SEQ ID NO: 36507 - DNA, 777 bp, Neisseria meningitidis
atggctaagaaattcgataaagacagcttcagcggcacgctgattgtcgtgttggcggtcagcctgatttgctcggtcatcgttgccggtgcggtcgtcggcttgaaacccatccaagagaaacaaaaactccaagacaaacaaggctatatcttgagcgtagccggtttgatggataaaaacaccgacattagcaaaacctttgccgagcgtatcgagcaacgtgtcgtggacttggcaaccggcgaatatgtcgctgatgcgcctaaagacttcagcgcacgcgttgccggcaaagaccctgcccaaagcatccaaatcaaacctgaagacgatttggcaggcatcaaaagccgtgccaaatacaccgaggtttatttggtaaaaggcgaagacggcaaaatcggccaaatcatcctgccgatgcacggcaacggtttgtggtcggtcatgtacggctttgtcgccatccaacccgacggcaacaccatcaacggcattacctactacgagcaaggcgaaaccccgggcttgggcggcgaaatcggcaatcctttgtggcagcaaaaattcgtcggcaaaaaactgtttgacggacaaggcaaactcgccctgcacgtcggcaaaggcgcgggttcggacaaagaacacggcgtagatgccctctccggcgcatcgctgacatccaaaggcgtgcaaggttcgttcgcctactggttcggcgaaaacggctatatcccctacctgaacaaattgaaatcagcaggagcgcaataa

SEQ ID NO: 36508 - DNA, 423 bp, Neisseria meningitidis
atgaatctcgtgaaactgctggcgaataactggcaaccaattgccatcatcgcacttatcggcacgggtttggcggtgtcgcaccatcaaggctattataagtcggcgtttgcgaagcagcaggcggtcattgacaagatggaaaaagacaaagcgcaagccctgctgttgtcggctcaaaactacgcccgcgagctggaacaggcgcgtgcggaagctaaaaaatatgaagtcaaggcgcacgccgtcggcatggctttggcgaaaaaacaggcggaagtcagccgtctgaaaacggaaaataaaaaggaaatcgaaaatgtccttactcaagaccgtaaaaatgcaggcggcggttgtattgacggctttggccatcacggcttgcagctctacaagcgcgccctcggctacggaaattaa

SEQ ID NO: 36509 - DNA, 780 bp, Neisseria meningitidis
atgagcgcaaccattcccccaaaaatcatccgatacgacagcaatccgaccgatgtctattttttcggcacttgcgtccttgatctttttatgcccgaagcaggcatggatgccattaccctaatcgagcaacagggcatacgcgtccatttcccgatggcgcaaagctgctgcggccagcctgcctattcatccggccatccgaccgaagccttcgatgtcgccaaagcacaactcgaccttttccctgaaaactggccgatcgtcgtgccgtccggctcgtgcggcggcatgatgaaacaccactggccgacgctgtttaaaggcagcgagtacgaggaaagggctgtggattgcgccggccgcatcatcgagtttacccatttcctgcttgccatcggtttcaaacccgaagacaagggcgaaccgctcaaagtcgccgttcacacttcctgcgccgcccgccgcgaaatgaatgtccatctttcaggctggcaactgattgacggtatggaaaacgtcgaacgcatcgtccacgaccacgaaagcgaatgttgcggcttcggcggcacattctccgtcaaacaagccgatatttccggcgcaatggtaacagacaaagtcgccgcgctgaaagaaaccggcgcaaccgaaatcatcagcgcggactgcggctgtatgatgaacatcggcggcaaaatcgccaaggacgagccggatatgccgcgtccgaaacatatcgcatccttcttgttggaacgcaccggaggcaaagcatga

SEQ ID NO: 36510 - DNA, 219 bp, Neisseria meningitidis
atgaatgagtacacgttttcttaccgctttaacggcaagtcctggtcattgagcatttgggcggacaaccctgaagaagccagggcgaaatttcgggctgcacgagaaaatgcgcactatgacggcgaagttgtagcaaaggtttatacatttgtaaatatttcgtgggttaagaaattgtacaagcggacaaaatatttaatgggtatcaaagaatga

SEQ ID NO: 36511 - DNA, 195 bp, Neisseria meningitidis
gtgatgttttccgccgcgcagccgagtattgcgcgcgccttgatttatttggttttttgggcggtgctgcccaccgtgttcacggttttcaccattaccgtccgccgccgcaaccgcttgatgaagcagcaggaacaggctgaattcgaacagcagcgcgcacaacggcaaaaagacagcggcacaaaaccctga

SEQ ID NO: 36512 - DNA, 1263 bp, Neisseria meningitidis
atgtcaaacacacaaaaacagcttgcccttgccaaagcggcaaaaaaatccgtcaacacggcggatacggaagaaaaaaaccgcgcgctgcttgctatggcggacagtctggaagcggcggcggcagatattttggcggcaaaccgtcaagacttggaagccgcggcaggcaacattcccgaaagcatgaccgaccgccttttgttggacggcaaacgcatttgcgcgatggcggacggcattagggcggttgccgcactgcccgaccccgtgggcgaaatactggaaacctcgactctgcccaacggcttggaaatcgtcaaaaagcgtgtggcgatgggcgttatcggcattatttacgaaagccgcccgaacgttacgtccgatgcggcggctttggcactgaaaagcggcagcgcggtcgtactccgcagcggcaaagatgcattccaatccgcacgcgccatcgttgccgcactcaaagccggtttggcgcaaacccgcatcgaccccgacgcgctccagttgattgaagacacagggcgtgagggcagttacgaaatgatgagggcgaaagattatctagacctgctgattccgcgcggcggggcggggctgatacgggcggtggttgaaaatgccgtcgtgccggtcattgaaacgggaacgggcattgtccacatttatatcgacaaggacgcggattgggacaaggcgctccgtatcgtgtacaacgccaaaaccagccgtccgtccgtgtgcaactcgatggaagtgctgctggtacatgaagacattgctgccgacttcctgcccaagctcgaacggctgttggttcgcgaccgcatagaagccggactgccgcccgtccgcttccgtttggatccgcaggcggcgcggcatatcggcggcgaagcggcgggtgcagacgatttcgataccgagtttttagactacatcctcgctgtgaaaaccgtcgcttcggtcgaagaggcggtctggcacatcgaaacccacagcacacaccattcagacggcatcgttaccgaaaaccgccacgctgcggactatttcacgactcatatcgattctgccgccgtgtatgtcaacgcgtccacgcgctttaccgacggcggcgaattcggcttgggttgcgaaatgggcatctccacgcaaaaactccacgcccggggcccgatgggtttaaaagagctgacgagttacaaatacatcgtacaaggcacgggacaggttagggaataa

SEQ ID NO: 36513 - DNA, 786 bp, Neisseria meningitidis
atgggttttctgcaaggcaaaaaaattctgattaccggcatgatttccgagcgttccatcgcttacggcatcgccaaagcctgccgcgaacaaggcgcggaactggcgtttacctacgttgtggacaaactggaagagcgcgtccgcaaaatggcggcggaattggattccgaactcgtgttccgctgcgatgtcgccagcgacgacgaaatcaaccaagtgttcgccgacttgggcaagcattgggacggcttggacggtttggtgcattccatcggcttcgcgccgaaagaagccttgagcggcgatttcctcgacagcatcagccgcgaagcgttcaacaccgcacacgaaatttccgcatacagcctgcctgcgctggcaaaagccgcccgtccgatgatgcgcggcagaaactccgccatcgtcgccctgagctacttgggcgcggtgcgcgcgattccgaactacaacgtgatgggtatggcaaaagctagccttgaggcaggcatccgctttaccgccgcctgtttgggcaaagaaggcatccgctgcaacggcatttccgccggtccgatcaaaacactcgccgcctccggcatcgccgattttggcaaactcttgggacacgtcgccgcccacaatccgctgcgccgcaacgttaccatcgaagaagtcggcaataccgccgccttcctgctgtccgacctgtcgtccggcattaccggcgaaatcacttacgttgacggcggttacagcattaatgccttgagcaccgagggataa

SEQ ID NO: 36514 - DNA, 498 bp, Neisseria meningitidis
atgacaacaaccataccaccacgacaggacacattcaatatgaaaacccaaatcagccttgctgctgccgccatcacactgctcctttccgcctgcggaggcagcggaataccttcccaacccaaaggcgaaatttccgaaaaccgcaccgccgcgttcaaatctatgatgcccgacttctcgcgtatgggcaaaatggtcaaaggcgaagagccttacgatgtcgaaaaattcaaacaggcggcagcggcgtttgccgacagcagcaaaaaaccgtttacgctttttgagtccgacccgcaaggcaacgggcgcgcactgcccgccgtttggtcggatggtgcaaaatttgaagccgaaaaaacaaaattcgccgccgccgtcgaaaaactcaacgccgccgcccaaaccggcaaactggacgaaatcaaagccgcctacggcgaaaccggcgcaagctgcaaatcctgccacgacagtttccgcgcgcccgaataa

SEQ ID NO: 36515 - DNA, 891 bp, Neisseria meningitidis
atgaacagcccttttcacaacatcggcatcgtaacccgccccaacacgcccgacatccaagacaccgcacacacgctgattacctttttgaagcagcacggctttaccgtctatctcgacgaagtcggcataaaggaaggctgcatctatacccaagacaccgtcggctgccatatcgtcaacaagaccgaactggggcaatactgcgacctggtcgccgttttaggcggagacggcacctttctctccgtcgcccgcgaaatcgccctgcgcgccgttccgattatcggcatcaaccaagggcatttgggcttcctgacccaaattccccgcgaatatatgacggacaagctattgcccgttttagaagggaaataccttgccgaagagcgcatcctgattgaggccgcactcatccgcgaaggcaaaaccgccgaacgcgccatcgccctcaacgatgccgtcctctcccgtggcggcgccggacagatgattgagtttgaagtcttcgtcaatcgggaattcgtctatacccagcgttcggacgggctgattgtctccacccccaccggatcgaccgcctattcgcttgccgccggcggccccatcatgcaggcaggattacacgccttcacactcgtacccatctgcccgcaatccatgaccaaccgccccatcgccattcccgacacgtctgaaatcgaaatcctcgttacccaaggcggcgacgcgcgcgtccatttcgacggtcaaacccatatcgacgtgcaaaacctcgaccgcatcaccatccgccgctaccgaaaccccttacgcatcctacatccgaccgactaccaatatttcaaaaccctgcgccaaaaactgcactggggcgaacaattagtctaa

SEQ ID NO: 36516 - DNA, 957 bp, Neisseria meningitidis
atgattttgacaccgccggacacgccccttttcctccgcaacggcaatgccgacacgattgccgccaaattcctgcaacgccccgcacctgcataccgccgcgagctgcttcccgacagcacgggtaaaaccaaagtcgcctacgacttttcagacggcatttcgcccgatgcgccgctggtcgtgctgtttcacggtttggaaggaagcagccgcagccattacgcggtcgaactgatgcttgcggtacgcgatcggggttggcacggcgtagtcgtccatttccgcagctgcggcggcattgccaacaccgctccggtgttctaccacttgggcgataccgccgaaatcgcctttactttggacacgttcgccgcgcgttaccgtgaaatatacgccgtcggcgtatcgctgggcggcaacgcgctggcaaaatatttgggcgaacagggcgaaaacgcgctgccgcaagccgccgccgtcatctccgcacccgtcgatgcagaggcggcaggcaaccgcttcgacagcggcatcacacggctgctctacacgcgctacttcctccgcacactgatacccaaagcacggtcgctccaaggttttcagacggcatttgccgcagggtgcaaaacactgggcgagtttgacgaccgtttcaccgcaccgctgcacggctttgccgaccggcacgactactaccgccaaacttcctgcaaaccgctgctcaaacacgttgccaaaccgctgctcctgctcaatgccgtcaacgaccccttcctgccgcccgaagcgctgccgacaccggacgaagtgtccgaaaccgttaccctgttccaacctgcacacggtggtcatgtcggctttgtcagcagcaccggcggcaggctgcacctgcaatggttgccgcagaccgtcctgtcctatttcgacagcttccgcacaaacaggcgttaa

SEQ ID NO: 36517 - DNA, 627 bp, Neisseria meningitidis
atgacgcaagaacgtttacccgaatttttcgaccaagccccgacgctgaccgtacaagacccgcttgccgcatttctcggcgcggcgcaagacggcatcctcacttaccgctacgccgatgccgtgcgcctgtgcggtcactcctgcccgaccgttgccggcgcctacctgatggtcatcaaaggactggaagcactttacggcgcagagctgccgcaacgcggcgacatcgaagcctttatgcagggcaatcgtgacgaaggcacgaccggcgtaaccgcatccgtcgtccaactccttaccggcgcagcccccgaaaccggcttcggaggcatcggaatacagggacgcttcgcccgccgcaacctcttatcctttggtgcaggcgaaatcaacggcacactgaccctgcgccgcaaagacaacggcaaaaccgtcgccgtcagcctcaacgccgccccgaaacccttcgcacccgaaatgcgcgaacttatgcccaaagccgtcggtggcagcgcaagcgcagaagaactcgaacgcttcggacaactctggcaggcacgcgttaaagcatttttgaccgaatcggcggacgacccgcagttcgtcatcgtccgcgaagtgtga

SEQ ID NO: 36518 - DNA, 207 bp, Neisseria meningitidis
ttgttaacccactatacaaaaaacaaggaaacacaaatggcgcaatatatgtgcggcccctgcggctggatttacgatgaagaactcggcgacccagaacacggcatcgcccccgggacaaagtttgaagacatccccgacgactggaaatgccccgaatgcggcgtggacaaagaagatttctacctgttggatttcgtgatatag

SEQ ID NO: 36519 - DNA, 423 bp, Neisseria meningitidis
ttgtccgccgtttttattgcaccttacctgacggcatttcacgaacaagaaaaaacattcgaatatgcggaattgaccgttaccgcccccaaccgcagcggacgggcaatcaaactggatgcagacgggcagcattaccggctttcctgctatgggttcgacagtttgtgcacaggcggcaatatcggcagaaccatcagggtggagcaggttagagccgttttaagcgaaaccgtcggcaaaggttttttaaacggcgttctgttggaataccgcaacagtggcagtgtctatagcaataaagattttgcccgcacggaagaccgccttgtcgaagtgttggcacaacctgccgttttctgcctgaaactgggtattttgcttttattgcccgccattttcctgcgtttgaaaagaatgtga

SEQ ID NO: 36520 - DNA, 510 bp, Neisseria meningitidis
atgaatctgtttgaaacccaaagcgttacctttgccgaaccgattgaaatgctgtatgcctgccacggcaaagtacgccgtttttgcggccaagtcgcgatgctgtcggactacatcgccgaaaacggctgcaatcagcttgttttgcaaaccatccgccaaatcgcccagtatttcaacgttgccgcgccgctgcaccatgaagacgaagaagaaaacttcttcccgctgctgctgcaatatgcgccgcaagcccaagaaagcgtggacgagcttttgcgccaacatatcgggctgcacgacaactgggcggctgtttccgccgaatttgccaaactcgaagcagacaacgcttatgtccccgatgaggaagcgttcaaacgttttgtggcgggatatgatgttcatttggcgattgaagagccgctgtttgatatgggcaacacctttatcccaaaagaaaaactgaccgaaatcggcgaaattatggcggcgcgccggcgcaaataa

SEQ ID NO: 36521 - DNA, 840 bp, Neisseria meningitidis
atgaaacaactccgcgacaacaaagcccaaggctctgcactgtttacccttgtgagcggtatcgttattgttattgcagtcctttatttcctgattaagctggcgggcagcggctcgttcggcgatgtcgatgccactacggaagcagcaacgcagacccgtatccagcctgtcggacaattgacgatgggcgacggcatccccgtcggcgaacgccaaggcgaacagattttcggcaaaatctgtatccaatgccacgcggcggacagcaatgtgccgaacgctccgaaactggaacacaacggcgattgggcaccgcgtatcgcgcaaggcttcgataccttgttccaacacgcgctgaacggctttaacgccatgcctgccaaaggcggtgcggcagacctgaccgatcaggaactcaaacgggcgattacttacatggcgaacaaaagcggcggttctttcccgaatcctgatgaggctgcgcctgccgacaatgccgcttcaggaacagcttctgctcctgccgatagtgcagctccggcagaagcgaaggcagaagacaagggtgcggcagcccctgcggtcggcgttgacggtaaaaaagtcttcgaagcaacctgtcaggtgtgccacggcggttcgattcccggtattcccggcataggcaaaaaagacgattgggcaccgcgtatcaaaaaaggcaaagaaaccttgcacaaacacgcccttgaaggctttaacgcgatgccggccaaaggcggcaatgccggtttgagcgatgacgaagtcaaagcggctgttgactatatggcaaaccaatccggtgcaaaattctaa

SEQ ID NO: 36522 - DNA, 2088 bp, Neisseria meningitidis
atgcacccgttgatttttgggacgtatccaaagccgtcgcgattgcccgcgcctgaacccgtccccgcattcctgcggggattttcttttttgccgcacgccgtttcaatcccgcaaaattccgatacttggtataaaataccctcttttcccactctaaaaaaccgtacccgataccgtctgaaacagccctgtctttcagacggtataggcacaaggaaacacactatgccagaataccgctccaaaacctctacccacggccgcaatatggcaggcgcacgcgcattgtggcgtgcgaccggcgtgatggaaaccgacttcggcaagcccatcatcgccgttgccaactccttcacccaattcgtgcccggccatgtccacctgcacaatatgggccagctggttgcccgcgaaatcgaaaaagccggcgcaatcgccaaagaattcaacaccatcgccatcgacgacggcatcgctatgggacacagcggcatgctgtactccctgcccagccgcgatttgattgccgactctatcgaatatatggtcaacgcccactgcgccgacgcgctggtgtgcatttccaactgcgacaaaatcaccccgggcatgctgattgccgcgatgcgcctgaacatccccaccatcttcgtctccggcggcccgatggaagcaggtaaagttatcggcgtggcaaacatccaacccgaacgccgtttggacttgattgacgcgatgatcgaatcggcagacgacaatgtcagcaaccggcaagtcgaagaagtcgaacaaaacgcctgcccgacctgcggctcgtgttcgggtatgtttacggcaaactcgatgaactgcctgaccgaagcactcggcctttccctgcccggcaacggttcgtatttggcgacccacgccggccgcaaagaattgttcctcgaagcaggccgtatgattgtcgaaatcaccaaacgctattacgagcaagacgacgaaaccgtactgccgcgcagcatcgccaccaaaaaagcgtttgaaaacgctatgacgatggacattgcgatgggcggctctaccaacaccatcctgcatttgctcgccgtcgccaacgaagcgggcgtggatttcaaaatggccgacatcgaccgcttaagccgcgtcgtgccctgcatctgcaaaaccgcgcccaacaaccacgactactatatggaagacgtgcaccgagccggcggcatcttcgccatcctgaaagaattggacaaagcgggcaaactgcacaccgacgtgcacactatccacgcaccgacgctgaaagacgcgattgaaaaatgggacgtaaccaaccctgaaaacacccgcgccatcgaacgcttcaaagccgcgcccggcggcgtacgtaccacccaagcgttctcgcaaaaccgtatgtggaaaaccctcgacctcgaccgcgaaaaaggctgtatccgcgacgtggcacacgcctactcgcaagacggcggtttggcggtcttgttcggcaacatcgccgaacgcggctgcgtggtaaaaaccgcaggcgtggatgagagcatcctcaaattcaccggccgcgcccgcgtgtttgaaagccaagaagacgcagtagaaggcattttgggcaaccaaatcgtcgccggcgacatcgtcatcatccgctacgaaggcccgaaaggcggcccgggcatgcaggaaatgctgtatccgacttcctacctgaaatctaaaggcctcggcaaagcctgcgctctcttaaccgacggacgcttctccggcggcacatcaggtttgtccatcggacacgcctcgcccgaagcggcggaaggtggcgcgatcggtttggtacacgaaggcgataccgtcgaaatcgacatccccaaccgcagcatccaccttgccatttccgatgaagagcttgccgcacgccgtgccgaaatggaagcgcgcggcagcaaagcatggaagcctaaaaaccgcgaccgctacgtctccgccgcattaagagcttacggcgcgatggcgacttccgccgacaaaggcgcggtgcgcgacgtagcgcaaatcgaaagataa

SEQ ID NO: 36523 - DNA, 1794 bp, Neisseria meningitidis
atgaaaaatatccgaaatttctccatcattgcccacatcgaccacggcaaatcgacgcttgccgaccgcttcatccaatattgcggcggtttggatttgcgcgaaatgagtacgcaggtactcgattccatggacatcgaaaaagagcgcggcattaccattaaagcgcaaaccgccgcgctcaactacaaagcacgcgatgggcaggtgtatcagcttaatttgattgacacgccgggacacgtcgacttctcttatgaagtttcccgctccttgtccgcctgcgaaggcgcgcttttggtggttgacgcgtcgcaaggcgtggaagcgcaaaccgtggcgaactgctataccgcgattgatttgggcgtggaagttgtgcctgttttgaacaaaatcgacttgcctgccgccgaccccgaacgcgtggaacaggaaatcgaagacatcatcggcatcgatgccgtcggtgcagtacagtgttccgccaaaagcggtatcggcgtggaagatgttttggaagaaattgttgccaaaatccctgcgccgaccggcgacgaaaacgcgccgctgcaagcggttatcgtcgattcgtggtttgacaactatgtcggcgtggtcatgctgattcgagtgaaaaacggcaccatcaaactgaaagacaaagtgcgctttatgagcaccaaggcggaaacgcaggtcgagcagctgggcgtattcacaccaaaatcagttcaaaaacaagaactcaaagccggcgaagtgggctttttgattaccggcgtaaaagaattgggtcaggcgaaagtcggcgatacggttacactggttgccaaccctgccactgagccgctgcccggcttccaagaagtacaaagccaagtattcgccggactttatcccgtggaaagccacgactacgaagccttgcgcgacgctttggaaaaattgcagcttaacgacgcttcgttgaaattcgagcctgaagtttcccaggcattgggcttcggcttccgttgcggcttcttgggtctgttgcacttggaaatcgtgcaggaacgcttggagcgcgagttcgatatggatttgattaccaccgcgccgacggtggtttatgaagtcgtgttgaaaaacggtgagaaaatcgaagttgaaaacccgtccaaactgcccgacatcggcagcatcgaaaccatactcgagccgattattaccgcgaccatccttgtgccgcaggaatacgtcggcaacgtcatgactttgtgtaaccaaaagcgcggcgttcaggtcaatatgcagtacatgggccgccaagtgatgctgacttacgatttgcccatgaacgaagtcgtcatggacttctttgacaaactcaaatccacttcgcgcggttatgcttcgttggactaccatttcaaagagttccaaccgtctgatttgattaagctggatattatggtcaacggcgaaaaagtcgatgcgctgagcctgattgtccaccgtcaaagcgcggttcaccgaggccgcgagctggcatcgaaaatgcgcgagctgattccgcgccaaatgttcgacattgccgtccaagccgccatcggcagccagattatcgcccgcgaaaacgtcaaagcactgcgtaaaaacgtcttggcgaaatgttacggcggcgatattacgcgtaagaaaaaactgcttgaaaaacaaaaggcaggtaaacgccgtatgaaacaagtgggcaatgtggaaattccgcaaagcgcgttcttggcgattttgcaggtgagcgacaaataa

SEQ ID NO: 36524 - DNA, 1266 bp, Neisseria meningitidis
atgaacacactccaacgccgcaagacgcatcaagtccgcatcgatcatattaccgtcggttcagaagcacccgtcgttatccaatctatgaccaacaccgacactgccgatgcaaaagccaccgcattgcagattaaggaattgagcgatgccggatccgaaatggtgcgtattaccgtcaacagccccgaagccgcgtccaaagttgccgaaatccgccgccgcttggacgatatgggctatgccacaccgcttatcggcgatttccacttcaacggcgaacgcctgttggcggaatttccagaatgcggcaaagcattgtccaaataccgcatcaatcccggcaatgtcggcaaaggcgtaaaaggcgatgaaaaatttgcctttatgattcggactgctgctgaaaacgataaagccgtccgcatcggcgtaaactggggttctttggatcaaagcctcgccaaacgtatgatggatgccaacctcgcttcttccgcgccgaaaccgcccgaagaagtgacgaaggaagcactgattgtctccgctttggaatctgccgaaaaagccgttctattgggactgcccgaagacaaaatcatcctgtcgtgcaaagtcagcgcggttcaggatttgattcaggtttaccgcgaactgggcagccgttgcgcctatccgctgcatttgggtttgaccgaagccggtatgggcagcaaaggcattgtcgcatcaacggcggcattatccgtcttgcttcaagaaggaatcggcgacaccatccgcatttcactgactccggaacctggcagcccgcgtactcaggaggtcgtcgtcgggcaagagattttacagactatgggattgcgttcgtttacgccgatggttaccgcctgccccggctgcgggcgtaccaccagtaccgtatttcaagagctggcacaagatgttcaaaattacctgcgccaaaaaatgtctatatggcgtaccctttatcctggggttgaatccctgaacgttgccgtaatgggctgcgttgtcaatgggcccggagaaagcaaattggccgacatcggcatcagcctgcccggtacgggggaaacacccgtcgcgcctgtttatgtagatggtgaacgcaaagtaacgctgaaaggcgacaacattgcaacggaatttttggctattgttgaagagtatgtcaaaaccaactacggcgaaaacggctccaaacgcaaccagaacaaaatcatcccaatacagtccctataa

SEQ ID NO: 36525 - DNA, 405 bp, Neisseria meningitidis
atgagaaaaagtcgtctaagccggtataaacaaaataaactcattgaactgtttgtcgcaggtgtaactgcaagaacggcagcagagttagtaggcgttaataaaaataccgcagcctattattttcatcgtttacgattacttatttatcaaaacagtccgcatttggaaatgtttgacggcaaagtagaagcagatgaaagttattttgctgaacgacaaaaccatatcaatggaattgggaacttttggaaccgggcaaaacgtcatttacgcaagtttgacggcattcccaaagcgcattttgagctgtatttaaaggggtacgaacggcgttttaacaacagtgagataaaagttcaaatttccattttaaaacaattagtaaaatcgagtttatcctag

SEQ ID NO: 36526 - DNA, 378 bp, Neisseria meningitidis
atggaaacattgaatgatataaaaaaaatcttgattaatgtggggctttatcaagggtttgatttgacagatccaaaagtatcagaagaagttaatcatgaaacagctaatatgaaatggattaaagattatacttcagacgggaattgggataatgaatttaaggaggatttaaaaaactttttagattatatggaagtatgccaattagccctaaacgataaaaatttcaaaattgccagtaattctttatttatggctatgatttacgcaggtaatctatctcttatatttgattcaataaaaactgatatatcaacattattgagtgctgagtataaaaagaatagtttttcatggccatctcttgatgaatag

SEQ ID NO: 36527 - DNA, 810 bp, Neisseria meningitidis
atgattcaagacacccgaccccttatccgcgtcgttgccggcatcctgctcgattcagacggcaactacctgctcagctcgcgccccgaaggcaaaccctatgccggatattgggaatttgccggcggcaaggtcgaagcgggcgaaaccgacttccaagccttgcaacgcgagtttgaagaagaactcggcatccgcatccttgccgccacgccttggctgaccaaaatccattcctacgaacacgcccgcgtctgcctgaaattcctatgggtcaaccccgaccaatggacgggcgaaccgcaatcgcgcgaaggacaggcatggtcttggcagaaggcgggtgattttaccgttgcccccatgctgcccgccaacggcgcgcttttgcgttcgctgtccgtcccgcgccgtttgtacggcagcctgaaaacgggtttgcacggagaaaacagtatgggcgcgtaccgcgtcctgcctttgggttcggcagagggaagcggtgcgaacgttttgatggagacggcgcaatggcaggacagacccgaacacgccgacagcgtgtggatggtggtgcagacccgcgaacaatggcggcaggcgcaggaaaagggcgcggatgcggtcgtttggcgcgtgtgcgatgatgttcaggcacaagaggcggcagaagccctgcggcagggcgtatccgtgccgctcgtacttgcagcaaacggacagacggttgcacgttatggaaaactatggctcggattgggggcgcacgcggtggtaagggatgaaacaatagggaagaatcatgaataa

SEQ ID NO: 36528 - DNA, 774 bp, Neisseria meningitidis
atgagtgcgaacatccttgccatcgccaatcagaagggcggtgtgggcaaaacgacgacgacggtaaatttggcggcttcgctggcatcgcgcggcaaacgcgtgctggtggtcgatttggatccgcagggcaatgcgacaacgggcagcggcatcgacaaggcaagtttgcagtccggcgtttatcaggtcgtactgggcgatgcggacgtgaaatcggcgacggtacgcagcaaagagggcggatacgctgtgttgggcgcgaaccgcgcgctggccggtgcggaaatcgagctggtgcaggaaatcgcccgggaagtgcgtttgaaaaacgcgctcaaggcagtggcggaagattacgactttatcctgatcgactgtccgccttcgctgacgctgttgacgcttaacggcttggtggcggcgggcggcgtgattgtgccgatgttgtgcgaatattacgcgctggaagggatttccgatttgattgcgaccgtgcgcaaaatccgtcaggcggtcaatcccgatttggacatcacgggcatcgtgcgcacgatgtacgacagccgcagcaggctggttgccgaagtcagcgaacagttgcgcagccatttcggggatttgctttttgaaaccgtcatcccgcgcaatatccgccttgcggaagcaccaagccacggtatgccggttatggcttatgatgcgcaggcaaagggtaccaaggcgtatcttgccttggcggacgagctgatggcgagggtgtcggggaaatag

SEQ ID NO: 36529 - DNA, 306 bp, Neisseria meningitidis
atgattaccttgacgcattatctggtattgggtgcgctcctgttcggtatcagcgcaatgggtatcttcatgaaccgtaaaaacgtgctggtattgatgatgtccatcgagctgatgcttttggcggtgaacttcaactttatcgccttctcacaacatttgggcgatactgccggacaaattttcgtattcttcgtattgaccgttgccgctgccgaatctgccatcggtttggcgattatggtgctggtgtaccgcaaccgacaaacgattgatgttgccgatttggatgggttgaaagggtaa

SEQ ID NO: 36530 - DNA, 612 bp, Neisseria meningitidis
atgaaattacaacaattggctgaagaaaaaatcggcgttctgattgtgttcacgctgcttgtagtcagtgtcggtctgttgattgaagttgtgcccttggcctttaccaaggcggcaacacagccggcaccgggcgtgaagccttacaatgccttgcaggttgccggacgcgatatttacatccgtgagggctgttacaactgccactctcaaatgattcgtccgttccgtgcggaaaccgagcgttacggtcattactctgttgccggagagtcggtttacgaccatcctttccaatggggttccaaacgtaccggtcctgatttggcacgtgtaggcggccgctattccgacgaatggcaccgtatccacctgctgaatccccgtgatgtcgtgcctgagtccaatatgccggcattcccatggcttgcacgcaataaagtcgatgtcgatgcaaccgttgccaacatgaaggctttgcgtaaagtaggtactccttacagtgatgaggaaattgcgaaagcgcctgaggctttggcaaacaaatccgagctggatgctgtagtcgcctatctgcaaggattgggtctggctttgaaaaacgtaaggtaa

SEQ ID NO: 36531 - DNA, 378 bp, Neisseria meningitidis
atgagaaaaagtcgtctaagccggtataaacaaaataaactcattgagctatttgtcgcaggtgtaactgcaagaacagcaacagagcccgacagcattgtttatacggattgttatcgtagctatgatgtattagatgtgagcgaatttagccatttccgtatcaatcacagcacacattttgctgaacgacaaaaccatatcaatggaattgagaatttttggagccaggcaaaacgtcatttacgcaagtttaacggcattcccaaagcgcattttgagctgtatttaaaggagtgcgaatggcgttttaacaacagtgagataaaagttcaaatttccattttaaaacaattagtaaaatcgagtttatcttag

SEQ ID NO: 36532 - DNA, 2586 bp, Neisseria meningitidis
atgttagaagcctatcgtaaagccgccgccgagcgcgccgcccttggtattcccgcccttcctctgactgctcagcaaaccgccgatttggttgagctgctgaaaagcccgcccgcaggcgaaggcgagttcttggtcgaactgcttgcccaccgtgttccgcccggtgtggacgatgccgccaaagtcaaagcctcattcctggctgccgttgccgaaggcagcgcgtccagcccgctgatctcccccgaatatgcgaccgaactcttaggtacgatgctcggcggttacaatatccacgccttaatcgaactcttggacgacgacaaactcgcgcccattgccgccaaaggcttgaaacatacgcttctgatgttcgattccttccacgacgttcaggaaaaagccgaaaaaggcaacaaatacgcgcaagaagttttgcaatcttgggcagatgccgaatggttcgcctcacgcgccaaagttcccgaaaaaattaccgttaccgttttcaaagttgacggcgaaaccaatacagacgacctctcccccgcgcccgacgcgtggagtcgtcccgatattccgctgcacgcgctggccatgctgaaaaacccgcgcgacggcatcacgcccgacaaaccgggcgaagtcggtccgattaaattgttggaagaactcaaagccaaaggccatccggttgcttacgtcggcgacgtggtcggtactggttcttcacgcaaatccgcgaccaactccgtcatttggcataccggcgaagacattccgttcgtgccgaacaaacgcttcggcggcgtatgtttgggcggcaaaatcgcgccgattttcttcaatacccaagaagattccggcgcgctgccgattgaagtcgatgtatctgctctaaaaatgggcgatgtcgtcgatatcctgccttatgaaggcaaaatcgtgaaaaacggcgagactgttgccgagtttgaattgaaatcacaagtattgctggacgaagtgcaagccggcggccgtatcaacctgattatcggtcgaggtctgaccgccaaagcgcgcgaagccctgaaactgcctgcctctactgcattccgcctgccgcaagcgcctgccgaaagcaaagccggtttcaccttggcgcaaaaaatggtcggccgcgcctgcggtctgcccgaaggacaaggcgtgcgcccgggtacttactgcgaaccgcgtatgacgactgtcggctcgcaagacacgaccggcccgatgacccgcgacgagttgaaagacttggcttgtttgggcttctccgccgatatggtgatgcagtctttctgccacaccgccgcctatccgaaacctgtcgatgtaaaaacccataaagaactgcccgcctttatttccacccgtggcggcgtgtcactgcgtccgggcgacggcgtcatccactcgtggctcaaccgcctgctgctgcccgataccgtcggcaccggcggcgacagccatacccgtttccccatcggtatttccttccccgccggctccggcttggttgcctttgccgccgcaacgggcgtaatgccgctcgatatgcccgagtctgtattggtacgcttcagcggcaagctgcaaccgggcgtaaccctgcgcgatttggtgaacgccatcccgctgtacgcaatcaaacaaggtttgctgaccgttgccaaagccggtaagaaaaacatcttctccggccgcatcctcgaaatcgaaggcctgcctgatttgaaagtggaacaagcctttgaattgaccgacgcatccgccgaacgctccgccgccggctgtaccgtgaagctcaacaaagagccgattatcgagtacatgaaatccaacgtcgtgttgatgaaaaacatgattgccaacggctatcaagacccgcgcactttggaacgccgcatcaaagctatggaaaaatggctggcaaatcccgagttgctcgaagcggataaagatgccgaatacgccgccgtgattgaaatcaacatggacgacatcaaagagccgattatcgcctgcccgaacgacccggacgacgtgtgcttcatgtccgaacgctccggcaccaaaatcgacgaagtattcatcggttcgtgtatgaccaacatcggccacttccgcgccgcctccaaacttttggaaggcaaggcagacacccccgtccgcctgtggattgcgccgccgaccaaaatggacgcgaaacaattgtccgacgaaggacactacggcgtactcggacgtgccggcgcgcgtatggaaatgccgggttgctccttatgtatgggtaatcaggcgcaagtacgcgaaggtgcgaccgttatgtccacctccacccgcaacttcccgaaccgtttgggtaaaaacacctttgtttacctcggttcggcggaattggcagcgatttgctccaaactgggtaaaatcccgaccgttgaagaatatcaagccaatatcggcatcatcaacgaacagggcgataaaatctaccgctatatgaacttcaacgaaatcgacagctacaacgaagtagccgagaccgtgaacgtttaa

SEQ ID NO: 36533 - DNA, 621 bp, Neisseria meningitidis
atgctgaccccgaaaagttgcgatttgttcaatatcccgtttttccaattttcccagcttaaaaaataccagcctgaaagcattccgcaaatcaaggctgactataaagaaaactggcagatatggcagcagctgattcagcaggttgccgccgaattgggtgcgccgtttgcgccgccgcacatcgaacgctggtgtaacggctggcaggttcgcgcccatttctttgcctacttcaaatacgaacaatataaaaattccgccgcgattttgtcgatactgctcaaccgccgccgactgagcgtcagcttggattggcactgctacaaagccgacgtgtcgcccatcgcgctgcctgattacaaccgctggttggataattttgataccgaaaaatacgcttctttcgatatgtggcacggtgcggaaagcgaatacgacgactaccgcaccgtcgcgcaacaaaacgagtccgaccgaaagttgcaaaacgacgaagactttttctgcatcggcaaacacatcgaacgcgacgatttgggcaggcaggatgtcgcgaaatggatagcggaaacggtggaagatttgctgcctctttacgaagcgtgtcacggcaaatga

SEQ ID NO: 36534 - DNA, 747 bp, Neisseria meningitidis
atgagcacacaagatttaagcggcaaaatcgctttggtaaccggcgcatcgcgcggtatcggtgcagcaattgccgacacactggcggcagccggtgccaaagtcatcggtacggcgaccagtgagagcggtgcggcggcgattagcgagcggttggcgcaatggggcggcgaaggccgcgtattaaattccgccgaacccgaaaccgtcgaaaacctgattgccgacatcgaaaaaacgttcggcaaactcgatattctggtcaacaacgccggcatcacccgcgacaacctcctgatgcgcatgaaagaagaagagtgggacgacatcatgcaggtcaacctaaaatccgtcttccgcgcctccaaagccgtcttgcggggtatgatgaaacaacgttccggccgcatcatcaacattacctccgtcgtcggcgtgatgggcaatgccgggcaaaccaactatgccgcggcaaaagcaggcttaatcggtttctccaaatccatggcgcgcgaagtcggcagccggggcattaccgtcaactgcgtcgcccccggctttatcgataccgatatgacccgcgccctgccggaagaaacccgccaaacctttaccgcccaaaccgccttgggcagattcggcgacgcgcaagacattgccgatgcggttttgttcctcgcttccgatcaggcgaaatacattaccggtcagacgctgcacgtcaacggcggtatgctgatgccctga

SEQ ID NO: 36535 - DNA, 558 bp, Neisseria meningitidis
atgatgcaaaaacacaaatgtctaatagattttattttgactgttgccagccaaattgcttatgctgacttacctttaagtttggaagaattattgactgacaagggtaaattcaaactagaaagcagtattagctacatcaacactgaacgcaatcaaagcgaatttgctaatcctatttatgtgcaaaccagcgcaacgaaaattgcaactgtaatggctatgatgattacacctgtaatggcgcaaaatttagacagccaagtttttgacagccaaaatgtgaaagcaattcaattatcacaggctgaaatgaaagaaacacaaggtgaatttgttcccattattgcagccgctgcttttggcggtgcattaggtgcatgggagtatcatggtgctaatttgtataatcatggtaaattaggaactgcgcaaggcgcggctactgcggcaggaatcggtgcggcaacaggagtagcggcaaaacagggctggctgctgctgccggaggcggattggctgggaatttggcatggagaccgggtattcatgcactag

SEQ ID NO: 36536 - DNA, 777 bp, Neisseria meningitidis
atgaattttatccgttccgtcggggcgagaaccctcggccttattcaatccctcggcagtatcacgctgtttctgctgaacattctggcgaagtccggtacggctttcgtccgtccgcgcctgagcgtgcgccaagtgtattttgccggcgtgctgtcggtgttgattgttgccgtttcagggctgtttgtcggcatggtcttgggtttgcagggctatacgcagttgtcgaaattcaaatccgccgatattttgggctatatggtcgcggcttcgctgttgcgcgaactgggtccggtgttggcggcgattctgtttgccagcagcgcgggcggtgcgatgaccagcgaaatcggtttgatgaaaacgaccgaacagctcgaagcgatgaacgtgatggcggtaaaccccgtcgcccgagtggttgcgccgcgcttttgggcgggcgtgttttccatgccgcttttggcttcgattttcaacgtggcgggtattttcggcgcgtatttggtcggtgtaacctggctgggcttggacagcggcattttctggtcgcaaatgcagaacaacatcacgatacactacgatgtaatcaacggtttgatcaaatccgccgcgttcggcgtggcggtaacgctgattgccgtgcatcagggcttccactgcgtcccgacttcggaaggcattttgcgcgccagcacgcgcacggtggtttcgtccgccctgacgattttggcggtcgattttatattgaccgcgtggatgtttacagattga

SEQ ID NO: 36537 - DNA, 1986 bp, Neisseria meningitidis
ttggcggtagagggcaatttcggcggcacgacccaatccttagcggtttgctcaactatcggcgcgaattctgttaaaatgccgacttccttcctttacacaccgcaccgacaggcagaatttatggctcttttgcagatttcagaaccgggtatgtccgccgccccgcaccgacaccgtttggcggcaggcatcgatttgggtacgaccaacagcttggtcgccaccgtccgcagcggcagtgccgcctgtctgcccgatgccgaagggcgcattaccctgccttccgtcgtccgctatctggaaaacggcggcattgaagtcggcaaaaccgccctgtccgcccaaaaaaccgacccgctgaacaccgtcagctccgccaaacgccttatcgggcggacgcttgccgatctgcatcaaaatacgcattacctgccttaccgtttcggtgacaatcaacgcgttatcgaactgcatacgcggcagggggtgaaaacgcctgtcgaagtgtcggcggaaatcctcaaaacccttaaatcgcgcgccgaagaaaccttgggcggcgatttggtcggcgtggtgattaccgtccccgcctatttcgacgatgcccaacgccaggccaccaaagatgccgcgcgtctggcgggtttgaacgtattgcgcctgctcaacgaacccaccgccgccgcaatcgcctacgggctggacaacgcctcggaaggcacgtttgtcgtgtacgacttagggggcggcacattcgacgtatccgtattgcaactgaccaaaggactgtttgaagtcaaagccaccggcggcaacagcgcgttgggcggcgacgatttcgaccaccgcctgttctgccgcctgctcgaacaaaacggactctcccaactcaacgaacaagacagccaactcctgctttcgctcgtccgcgccgccaaagaacaattaaccacgcaaaccgaagcgcgcattcaggcgacgctttcagacggcatggcaatcgacacaagcatcagtcgcgccgagttccacaacctgacgcagcatttggtgatgaaaacgctcgaaccggtcacacaggcgttgaaagatgccggtgtcggtaaaaacgaagtcaaaggcgtaattatggtcggcggttcgacccgtatgctgcacgtccagcaggcagtcgccaccttcttcggacaaaccccgctggacaacctcaatcccgacgaagtcgtcgcgctcggcgccgccatacaggcaaacgtcctcgcaggcaacaaaaccgacggcgaatggctgctgctggacgttacacctttgtcgctcggtttggaaacctacggcggcttggcggaaaaaatcatcccgcgcaattccaccatccccaccgcgcgcgcgcaggactttaccaccttcaaagacggtcagaccgcgatgacgatacacgtcgtacaaggcgaacgcgaactggttgccgactgccgcagccttgccaaattcaccctgcgcggcattccgcctatggcggcgggtgcggcgcgtatccgcgtaaccttccaaatcgatgcggacgggctgctgtccgtttccgcccaagagcaaagcaccggcgtacacgcgcaaatcgaagtcaaaccctcctacggcttggacgacgacaccatcacccaaatgctcaaagacagcatgagcaatgccgccgaagatatggcggcacgcgcccgtgccgaagccgtagtcgaagccgaaagcctgaccgatgccgtcaacgccgccctcgagttggacagcgatttgctggatgccgaagaattgcaacagattcggcaaggcatcgccgatttgcaaggccgtctgaaagacggaaaagccgaagacatccgtgccgccgccgccaaactcggcagtattaccgacaatttcgccgccaaacgcatgaaccgcaacatccaacgcgcgttgacaggccagagtgtcgataatatttga

SEQ ID NO: 36538 - DNA, 600 bp, Neisseria meningitidis
atgagcgagttggataacatccttgcccataaccggcagtttgtcgagtcgggcgaatatgaaaaatactttaccgacaaataccccgaacgcgggctggcagttttgtcctgtatggatgcgcggattatcgggctgctgcccgacgcgttgggtttgaaaaacggcgatgccaagctgattaaaaatgccggcgcgctggttacgcacccgtggggttcggtgatgcggagtcttttggttgccgtgtttgaattgaaggtcagagagattatggtcatcgcccatcacgattgcggtatgcaggggctgaatgccgaagaattcctcgggcgcgtccgggaaagccggattcccgaagaccgtatcgaaaccctgcgttatgccggtatcgacctcgacggctggctgaccggtttcgacaacgtcgaagacagcgtgcgccacacggtggaccttatccgtaaccatccgctgatgccgcgccatatcgccgttcacggactggtcatccatcccgttaccggcaaactgacgctggttgtggacggcagtgtttcagacggcatggacttatcggaaggaatggaaacatcatga

SEQ ID NO: 36539 - DNA, 306 bp, Neisseria meningitidis
atgccgtctgaagcattatccggccttcagacggcattttgttttccgacagtttataaactgtcgttgtttcttgacagaaacaacgaccttatttatttgaaacgattggaggacatgattatgggtttttggaatggtgtggcaaaagcagtgggagagggaatgattgaagccggcaatgagcataaggcgttgaaaatggaatatgcggagaaatcaagtgaggagctgcatgaaatcgtcaagagtgatggttttttaaaaattccacacgggagaaaagtgcggcttatgctgttttaa

SEQ ID NO: 36540 - DNA, 432 bp, Neisseria meningitidis
atgaccgaaaacgcacaggacaaggcgcggcaggctgtcgaaaccgtcgtcaaatccccggagcttgtcgagcaaatcctgtccgacgagtacgtgcaaataatgatagctcggcgtttccattcgggaccgttgccgccgccgtccgacttggcgcaatacaacgacattatcagcaacggggcagaccgcattatggcaatggcggaaaaagaacaagccgtccggcacgaaaccatacggcaagaccaaaccttcaacaggcgcgggcaactgtacggcttcatcagcgtcatcctgatactgctttttgccgtcttcctcgtatggagcggctaccccgcaaccgccgcctcccttgccggcggcacagtggttgccttggcgggtgctttcgtgattggaagaagccgagaccaaggcaaaaattaa

SEQ ID NO: 36541 - DNA, 186 bp, Neisseria meningitidis
atgcctgatgaaaaaacgctaaaagcaaaacaagctgaatatcagcgaaagtatgaccaaaagcggctgatgaaaacagtttctttccatttggaaagagagaaagagttggtggattttatgcaaaaagaaattcccgacttttcaaactgggttaaatcagtcatgaaggaaaaaatgaaataa

SEQ ID NO: 36542 - DNA, 465 bp, Neisseria meningitidis
gtgttatcggataagtgtgtttactcatttttcgtcatgcaaaacatggaaatcggtcaagcgcaatgttaccatatatcccctttatcgaaggaaaccgatatggatatccgatatttcggcacaacgccccgctattccgaagccgtcggcgcaaacggcttgattttcctctccggcatggttcccgaaaacggtgaaacggctgccgaacagactgccgacgtgcttgcccaaatcgaccgctggctggcggaatgcggctcggacaaagcgcacgttttggatgcggtcatctatctgcgcgatatgggcgactatgcggaaatgaacggcgtgtgggacgcttgggttgccgccggcagaacgcccgcccgcgcctgcgtggaagctcggctcgcccgtccggagtggcgcgtcgaaatcaaaataaccgccatgaagaaagatgcggcaaccgcataa

SEQ ID NO: 36543 - DNA, 789 bp, Neisseria meningitidis
atgaatccgcaggacaaatgttggcaggttcaccgccatcttgccgaacatgccgaccaacggctgacactcgtccgcaacgcgcccaaacatatcctgcttgccggggcggatgcggacatcagccgcagcctgctggcgaaacgatatccgcaggcggtatttgaagaatacgattcccgtgcggattttttggcggctgccgcagccgtgcgcaagggcggtttttggcaaaggtttacgggtaagggcgtggtgcaacactgccaatccccgaccgcgccgctgcccgaagcgtgtgccgatatgttgtggtcgaatctcggactgttggcggcggaacaaatccttcctgtgctgcacaactgggcgcgcgccttgaagacggacgggctgctgttttttacctgcttcgggcgcgacacttttaccgaactgaaatgccgtctgaaagaaaacggcattgaaagccgcagcgtgatgtttcccgatatgcacgacttgggcgatatgcttgctgaaaacggcttttacgaccccgttaccgatacggcgaagctggtgttggattacaaaaaggcggaaacgttttgggcggatatggacacgctgggcgtttggcgggcgatgtcgtggaacgatgaaaatgccgcgcgttcgtgtgtcggggcgatatttgaacgggaaggcggtttgggcattacgttggaaacggtgtacggacacgccgtgaaaaaactgatgctgccgcagggggagaacgtggtgcagttttttccgaagagatga

SEQ ID NO: 36544 - DNA, 720 bp, Neisseria meningitidis
atggcgacactgtccgacaaaaccatcttaattaccggcgcatcgcaaggtctgggcgaacaggtcgccaaagcctatgcggcggcaggcgcaaccgtgattctggtggcacgccatcagaaaaaactggaaaaagtctatgacgcgattgtcgaagccggacaccccgaacccttcgccatccgtttcgacctgatgagtgcggaagaaaaagaattcaatcagttcgccgccaccattgccgaagccacgcaaggcaaactggacggcatcgtccactgcgccggctatttttacgccctctcgccgctggatttccaaaccgtcgccgaatgggtcaaccaataccgcatcaacaccgtcgcacctatggggctgacccgcgccctgttcccgctgctgaagcagtcgcccgacgcgtccgtcatcttcgtcggcgaaagccacggcgaaacacccaaagcctactggggcggcttcggcgcgtccaaagccgcgttgaactacctgtgcaaagtcgccgccgacgaatgggaacacttcggcaacctgcgcgccaacgtcctcgtccccggacccatcaattccccgcaacgcatcaaatcccatccgggcgaagccaaaagcgaacgcaaaagctacggggacgtgctgcccgcatttgtctggtgggcaagtgccgaaagcaaagggcggagcggcgaaatcgtttacctctaa

SEQ ID NO: 36545 - DNA, 357 bp, Neisseria meningitidis
atgaatgaacacaacctgttaattttctgtttaaaagacaatgtttcaattagtgaatatactgaaatgattgattgggcttataaaaacattcaatctgaaacagttgtagaaattacggaaaatcaaattattgaatatcaaaatcgtggattatggagacttgtttctgaaattaccgataattggttatttggaccaagtgagggggattggctaatagataaggaaagtattttggctgtaaaagaaaaattacaaaattcagatttttctacagagcccttagtgaaaaatattattcatgtacttgaatatgctataaaaaatgaaaaaacagtaatttttcatttttga

SEQ ID NO: 36546 - DNA, 600 bp, Neisseria meningitidis
atgtctgaaaaaccggaaaaaatcgttttggcaagcggcaatgccggcaagctcgaagagttcggcaacttattcaaaccttacagcatcaccgtattgccgcaatccgcattcggcatacccgaatgccccgaaccctatcccacctttgtcgaaaacgcgctggcaaaagcacgccatgccgccaaatacagcgggctgcccgcactcgccgacgacagcggcatctgtgccgccgccttaaacggcgcgccgggcatccattccgcacgttacgcgggcgacaatcccaaatccgataccgccaacaacctgaaacttgccgccgaacttgtcggcaaggcagacaaaagctgctgctatgtctgcgtattggtttttgtccgccataaagacgacccgcgcccgattatcgccgagggcgtatggcacgggcagtggaacgacacgccgctcgggcaaaacggtttcggttacgacccgtatttttatctgcccgaacacggcaaaaccgccgccgaattggatacggaggtcaaaaaccgcgaaagccaccgcgcgcaggcacttgccgaactcttacgcaaactcgccctttaa

SEQ ID NO: 36547 - DNA, 750 bp, Neisseria meningitidis
atgccgtctgaaagaaaagacatgatcaaattcaaaaacgtacacaaacatttcaaagacctgcacgtcatcaacggcgtgaacttggaaatcaaaaaaggcgaagtggtcgtcgtctgcggaccttcgggcagcggcaaatccacactcatccgcaccgtcaaccagcttgaaagcatcgaaagcggcgagatttgggtggacggtgtcaacgttgccgacccaaaaaccgatttgaacaaaatccgcgaagaagtcggctttgtgtttcaaagtttcaacctctacccgcacctgaccgtgttggaaaacattaccctcgcaccgatgaaggttaaaggtcaaaatgcggaacaggcagagaaaaaagcgatggaacttttggaacgcgtcggactggcacacaaaaaagacgccttcccttcccaactttccggcggccagcagcaacgcgtggcgattgcacgcggtttggcgatggaaccgcgcgtaatgttgtttgacgaaccgacctccgcactcgaccccgaaatggtcggcgaagtgttgaaagtgatgaaagacttggcggaaagcggtatgacgatgatgtgcgtaacccacgaaatgggttttgcccgcgaagttgccgaccgagtgctttttgtcgataaagggcaaatcctcgaagacgaaacgcccgaagcgttttttaccaacccgaaacacgaacgcgccaaacaattcctgcaacaggtcatgacccactga

SEQ ID NO: 36548 - DNA, 165 bp, Neisseria meningitidis
atgggacaggttgcgttttacgaaaagatgattgagctatggtcgagcaaaagccgcgaggcaagtgaacaggcagacttggcggcgtttgaatttgcggagggcgaactggccaattatcaggaaatgctgaaacggcacctgcaaaccaaaagtgtggaatag

SEQ ID NO: 36549 - DNA, 288 bp, Neisseria meningitidis
atgaccatccgtcctttacacgaccgcgtcgtcgtcaaacgcttggaagctgaagaaaaaaccgcatcgggtatcgttttgccgggtgcggccgccgaaaaacccgatatgggcgaagtcatcgccgtgggcgcgggcaaaatcggtaaagacggcgcgcgccgtccgctggatgtcaaagtcggcgacaaaatcattttcggcaaatacagcggccaaaccgtaaaagccgacggcgaagagctgttggtaatgcgcgaagaagatattttcggcatcgttgaataa

SEQ ID NO: 36550 - DNA, 987 bp, Neisseria meningitidis
atgcagaatagcacaaccgaatttttgaaacctcgtcaaattgatgtaaatactttttctgcaactcgtgcaaaagtatctatgcagccatttgaacgtggtttcggtcataccttaggtaatgctttgcgccgtatcttactgtcatccatgaatggttttgctcctactgaagtagctattgccggtgtattacacgaatattctactgttgatggtattcaggaagatgttgttgacattttgctgaatattaaaggtattgtgtttaaactccatggtcgtagccaagttcaacttgtgttgaagaaatcaggttcaggtgtcgtatctgccggtgatattgagttgccgcatgatgtagaaattctgaaccctggtcatgtcatttgtcatttggctgataacggtcaaattgagatggaaattaaagtagagcaaggtcgtggttatcaatctgtttcaggtcgtcaggtagttcgtgatgagaaccgtcagattggtgcaatccagttggatgcgagcttttcgcccatcagccgtgttagctttgaggttgaacctgcacgtgtagagcagcggacggatcttgataagttggttttggatatcgaaaccgacggttctattgatcctgaggaagctgtacgcagtgcggcacgtattttgattgatcagatgtctatttttgctgatttgcagggtacgcctgtggaggaggttgaagaaaaagcacctcctatcgaccctgttcttttgcgtccggtggatgatctggaattgacagtacgttcagctaattgtttgaaagctgaggatatttattatattggcgatttgattcaacgcactgaaaccgagcttcttaaaacgccgaatttgggacgtaaatctttgaatgagattaaggaagtattggcatctaaaggtttgacactgggttctaagttggaagcatggccacctgtaggcttggaaaagccttaa

SEQ ID NO: 36551 - DNA, 3216 bp, Neisseria meningitidis
atgcccaaacgtaccgacctaaaatccatccttatcatcggcgccggccctatcgttatcggtcaggcctgcgaatttgactattcaggcgcacaggcctgtaaggctttgcgtgaagaaggctataaagtcattctggtgaattccaaccccgccaccatcatgaccgaccctgaaatggcggatgttacctacatcgagccaattatgtggcagacggtggagaagattatcgccaaggagcgtcctgatgcgattctgcccacgatgggcggtcagaccgcgctgaactgtgcgctggatttggcgcgcaacggcgtgctggcgaaatacaatgtcgagctgatcggcgcgacggaagacgcgattgacaaggcggaagaccgcggtcgttttaaagaagcgatggaaaaaatcggcctctcctgcccgaaatcttttgtctgccacacgatgaacgaagctttggcagcgcaagaacaggtcggcttccctaccctgattcgtccgtctttcacgatgggcggttcgggcggcggcattgcctacaataaagatgagtttttggcgatttgcgaacgcggtttcgatgcgtcgcctacgcacgagctgctgattgagcagtctgttctcggctggaaagagtacgagatggaagtggtgcgcgacaagaacgacaactgcatcattatctgctcgattgaaaacttcgacccgatgggcgtgcatacgggcgactcgattacggttgcgcctgcgcaaacgctgacggacaaagaataccaaatcatgcgtaatgcttcgttggcagtattgcgcgaaatcggcgtggataccggcggctcgaacgtgcagtttgcggtgaaccctgaaaacggcgagatgattgtgattgagatgaacccgcgcgtgagccgttcgtccgcgctggcttccaaagcgacgggcttcccgattgcgaaggtggcggcgaaactggcggtcggctttaagctggacgagttgcgcaacgacatcaccggcggcaaaacccccgcgtcattcgagccgtccatcgactatgtggtaaccaaaatcccgcgttttgcgtttgaaaaattccctgccgcagacgaccgcctgaccacgcagatgaaatccgtgggcgaagtgatggcgatgggccgcacgattcaggaaagcttccaaaaagccctgcgcggcttggaaacaggcttgtgcggcttcaatccgagaagctccgacaaagcggaaatccgccgcgaactggcaaaccccggccccgaacgtatgctgtttgtggcagacgcgttccgcgccggcttcacgctggaagaaatccacgaaatctgcgccatcgacccttggttcctggcgcaaatcgaagacttgatgaaggaagaaaaagcggtttcagacggcattttgagtgatttggatttcgccgccctacgccgtctgaaacgcaaaggcttctccgacaaacgtttggcacaattgttgaacgtaagcgaaaaagaagtgcgcgaacaccgctacgcgctgaagctgcatccggtttacaaacgcgttgacacctgcgccgccgagttcgccaccgaaaccgcctatctttactccacttacgaagaagaatgcgaatcccgtccttccgaccgtaaaaaagtgatgattctcggcggcggcccgaaccgcatcggtcagggcatcgagtttgactactgctgcgttcacgccgcactcgccctgcgcgaatcgggctttgaaacgattatggtgaactgcaacccagaaaccgtgtccaccgacttcgacaccagcgaccgcctctatttcgagccgctgacattggaagacgtgttggaaatcgtccgcaccgaaaacccgtggggcgtgattgtgcattacggcggtcaaaccccgctcaaactcgccaacgcgctggttgaaaacggcgtaaacatcatcggcacatccgccgacagcatcgacgccgccgaagaccgcgaacgcttccaaaaagtgttgaacgacttaggtctgcgccaaccgcccaaccgcatcgcccacaacgaagaagaagcactcgtcaaagccgaagaaatcggctatccgctggtcgtgcgcccgtcttatgttttgggcggccgcgccatgcagattgtccactctgccgaagccttgcaaaaatacatgcgcgaagccgtgcaggtttccgaagacagccccgtgttgctcgatttcttcctcaacaacgcgattgaagtcgatgtggactgcgtttcagacggcaaagacgtggttatcggcggcattatgcagcacgtcgaacaggcgggcatccactccggcgactccggctgctcgctgccgccctactccttaagcgaagaaatccaagacgaaatccgccgccaaaccaaagcgatggcgtacgcgctgggcgtggtcggtctgatgaacgtgcagtttgccgtgcaggacggcgtggtgttcgtgttggaagtgaacccgcgcgccagccgtaccgtgcccttcgtctccaaagccaccggcgtgccgctcgccaaagtcggcgcacgctgcatggcaggtatttccctgaaagaacaaggcgtggaaaaagaagttgtccccgatttctatgccgttaaagaagccgtgttcccattcatcaaattcccgggcgtagacacgattttgggaccggaaatgcgctccaccggcgaagtgatgggcgtgggcgcaagcttcggcgaagcctactacaaagcccaactcggtgcgggcgaacgcctcaacccgaccggcaaaatcttcctctccgtgcgcgaagaagacaaagaacgcgttatcaaaaccgctaaaaacttccaggttttaggctacggcatctgcgccacacgcggcacggcgcaatacctgaccgaacagggactgattgtacaaaccatcaataaagtccccgaaggccgcccgcacatcggcgacgcactgaaaaacggtgaaatcgcactggtcgtgaataccgtttccagcgatccgcaatccgtgtccgacagccacatcatccgccaaagcgcattgcagcaacgtgtgccgcaatacaccaccactgccggcggcgaagcgatgagcgaaggtgcgaaaagccgagaccatctgggcgtgtacagcgttcaagagttgcacgggcgtttgaaaaaccgcaactga

SEQ ID NO: 36552 - DNA, 231 bp, Neisseria meningitidis
atggctcgtcaatcattcaaacgtagaaaattctgccgtttcacggctgaaaaaatccaagaagtcgattacaaacaagttgatttgctgaaagactttatctctgaaaacggtaaaatcattcctgcccgcatcacaggaacgaaggcattttaccaacgccaattggctgttgccgtaaaacgcgcgcgcttcttggctctgctgccttacaccgaccaacacaaataa

SEQ ID NO: 36553 - DNA, 264 bp, Neisseria meningitidis
atgtccaagtggcggggtttcaaccgaaaaggaaacacgatgaagaaaaacgccccgaaatcgtttgaagaagccttgtcgcgccttgaatcgctgacacaagctatgcagggcgaaatgcccttggaagacgcgcttgccgcctatcaggaaggcaacgagctggtcagatactgccaaaccaagctggcgcaagtcgaacagaaattacaggttttggatgcggacgggctgaaggagttgaaccttgaatccgacgaatga

SEQ ID NO: 36554 - DNA, 798 bp, Neisseria meningitidis
atggcggctgttttttctgtgtgtgcctgttttatgtgttcctgccttgttgtcaaaaataccgttatcggaagcggacgcaccaaaatcgccgtgccgcttgtcgcccgcgatgccgccgaactttccgccgtacttgagcaaatcaaaaatatgcccttcgatattgcggagttccgcgccgactttttggaatgcgcgggcagtatcggcgaaatattgcaccacacgcagaccgtccgcgacgcgctgcccgacaagccgctgctgtttacgttcagacggcatggcgaaggcggctcgttcccgtgttcggacgattattattttaaactgctcgacgcgctgatcgaaagtcgcctgcccgacattatcgatatcgagctgttttccggcgaaaccgccgtccggcgcgctgtggcgaatgctcaaaaaaacggcatcgccgccctgctctgcaatcatgagtttcaccgcacgccgccgcaagaagaaatcgtatgccgtctgaaacagatggaggactgcggcgcggacatctgcaaaattgcggtgatgccgcaaagcgcggaagatgtgctgactttgctttccgccacgctcaaagcgaaagagcttgccgccaaaccgattgttacgatgtcgatggggcagacgggggcggtcagccggcttgccggacaggtgttcggctcaagcatcacgttcggttcgggaacgcaaaactccgcgccggggcaaatcggcgtatccgccctccgtgcgacactcgactgcctcgaaaacggcgcagactga

SEQ ID NO: 36555 - DNA, 615 bp, Neisseria meningitidis
atgaggataaccgttataatcacaactttacagtctgcacagagaaaaccgatgccttggaatctccccatcttcctcacatggttgagggtcttgctcattcctgtcatgacagcccttttttacctgccttttccgtggttcgcggaggaaacgattaatcttgccgccgccgtcatttttgccgttgccgccttaaccgactggtttgacggatttttggcaagactgtggaaacagacttccgatttcggcgccttcctcgatcccgttgccgacaagctgatggtcgccgtctctttgcttttactggtcaaactcgaccggacctatgttttgtttgccatgatcatcatcggcagggaaattaccatttccgcattgcgcgaatggatggcgcaaatgggcaaaaggaacagcgttgccgtcgccaccgtcggtaagtttaaaaccgccgcgcaaatgctggcaattttcctgctgctgctgaatattcccgatttttacggatttaatcttgttgttatcggcaatgtattgatgtttatcgcatctttgctgacagtctggtcgatgctgtattatctgaaaatggcgtggaaagaaatcgcctga

SEQ ID NO: 36556 - DNA, 642 bp, Neisseria meningitidis
atgactgatttccgccaagatttcctcaaattctccctcgcccaaaacgtcttaaaattcggcgaatttaccaccaaggcaggacggcggtcgccttacttcttcaatgccggcctcttcaacgacggcgcgtccacgctgcaactggcaaaattttacgcacaatccatcattgaaagcggcatccgattcgatatgctgttcggccccgcatacaaaggcattattttggcggcggcaaccgcgatgatgctggcggaaaaaggcgtgaacgtcccgtttgcctacaaccgcaaagaagccaaagaccacggcgaaggcggcgtgttggtcggtgcgccgcttaaagggcgcgtgctgattatcgacgacgtgatttccgccggcacatccgtacgcgaatcaatcaaactgattgaagcggagggtgcaacccccgccggcgtcgccatcgcgctcgaccgcatggaaaaaggcaccggcgaattgagcgcggttcaggaagtggaaaaacaatacggcctgcccgtcgcccccatcgccagcctgaacgatttgtttattctgttgcaaaacaaccccgaattcggacagttcctcgaacccgtccgagcctaccgtcggcagtacggcgtagaataa

SEQ ID NO: 36557 - DNA, 621 bp, Neisseria meningitidis
atgaccacacatcatgtcgaattgaggaatgtcaccaaacggttcggggcgcaaaaagccgtcaaccaagtcgatttggttttgaaggcaggagaaagcgtcgggcttgccggatacaacggcgcgggcaagtccaccattatgaagctgatactcgggctgattaccccgaccgaaggcgaagtgatgcttttgggcgaacgtaccggcagcaaagcgggggcgcggcttcgcagccaaatcggctacctgcccgaaaccgttgcgctgcacccttcgctgaccggcatcgaaacgctggatttttatgccaaacttaaaaaacagccgctcacgcagaaccgggggctgcttgagcgcgtcggcatttcacaggcggcacaccgccgcgtcggcacttattctaaagggatgcgccaacgccttgccttggcacaagccctgctgggcgagcccaaagtcctgctgtttgacgaaccgacaaccggcctcgaccctgcatcacgacaaatgttttacgaagtcgtgcgcgaactcaacgggcgcggcgcgaccgtattgctcagcacccacgcccttgccgagttggacggacacgccgaccgcattatcgtggattaa

SEQ ID NO: 36558 - DNA, 687 bp, Neisseria meningitidis
atggaaaaacaaaatattgcggttatacttgcgcgccaaaactccaaaggattgccattaaaaaatctccggaaaatgaatggcatatcattacttggtcatacaattaatgctgctatatcatcaaagtgttttgaccgcataattgtttcgactgatggcgggttaattgcagaagaagctaaaaatttcggtgtcgaagtcgtcctacgccctgcagagctggcctccgatacagccagctctatttcaggtgtaatacatgctttagaaacaattggcagtaattccggcacagtaaccctattacaaccaaccagtccattacgcacaggggctcatattcgtgaagctttttctctatttgatgagaaaataaaaggatccgttgtctctgcatgcccaatggagcatcatccactaaaaaccctgcttcaaatcaataatggcgaatatgcccccatgcgccatctaagcgatttggagcagcctcgccaacaattacctcaggcatttaggcctaatggtgcaatttacattaatgatactgcttcactaattgcaaataattgtttttttatcgccccaaccaaactttatattatgtctcatcaagactctatcgatattgatactgagcttgatttacaacaggcagaaaacattcttaatcacaaggaaagctaa

SEQ ID NO: 36559 - DNA, 618 bp, Neisseria meningitidis
ttggaagaacaacaagagttggacaactttaaatatttttggaaaaccacgggcaaatggctgtttgccctgctgattttggcggcgctcggctacttgggatacacggtttaccaaaaccgtgcgacttcccaaaatcaggaagcggcggcggtgctggcaaacatcgtggaaaaggcgcaaaacaaagccccgcaaagcgaaatcaatgccgaattgaccaaactccagcaaagctacccgcattccatttccaccgcccaagccacgctgatggcggcggcaaccgaatttgacgcacagcgttacgatgttgccgaaggccatttgaaatgggtgttgtccaaccaaaaagacagcctgattcaagcgttggcggcgcagcgtctgggcgttgtgttgttgcaacaaaaaaaatacgatgccgcgcttgccgcgctcgatacgccggttgaagcggacttcgcccccctgctgatggaaaccaaaggcgatgtctatgccgcacagggaaaaagccaggaagccttaaaaaactacggacaggctttagaaaaaatgcctcaagattctgtcggtcgcgaattggttcaaatgaaacttgattcgctgaaataa

SEQ ID NO: 36560 - DNA, 399 bp, Neisseria meningitidis
ttgatgatgtattcgtttgaagcgaatgcaaatgcagtaaaaatatctgaaactgtttcagttgataccggacaaggtgcgaaaattcataagtttgtacctaaaaatagtaaaacttattcatctgatttaataaaaacggtagatttaacacacatccctacgggcgcaaaagcccgaatcaacgccaaaataaccgccagcgtatcccgcgccggcgtattggcgggggtcggcaaacttgcccgcttaggcgcgaaattcagcacaagggcggttccctatgtcggaacagcccttttagcccacgacgtatacgaaactttcaaagaagacatacaggcacgaggctaccaatacgaccccgaaaccgacaaatttgcaaaggtctcaggctaa

SEQ ID NO: 36561 - DNA, 183 bp, Neisseria meningitidis
gtgcaggaactcgcctgcggggaattggaacaagtgatgattaaaggaaaatcaggctatatccttttaagtcaggcgggtaaagatgccgtgttggtgctggtggcaaaagaaaccggcagacttggtttaatcctattggatgccaaacgtgcggcaaggcatattgcggaagccatataa

SEQ ID NO: 36562 - DNA, 378 bp, Neisseria meningitidis
ttgttcaaatctccggcgaccgtccggttacaacctcgctcgccgtatcaaacaatttcggcaagaagcacaaagatgtgttacgcgccattcaaaatttggaatgctctaaagagtttacagagcgcaatggacaggctcaaagccgcctacctttccgcccgccccgatatggtgctcctgctgcgctacaccgaaatgggactgaatcaggcggaagccgccaaactcttgggcattgcgccgtccaacgtgcgcgcgcgcctcaaacaactcgccgatctgggtctgaccgaataccgccccgacccgaaataccgcaaccgccacgccctggcggcggcacacggccaacagtctttgggattggagggttaa

SEQ ID NO: 36563 - DNA, 462 bp, Neisseria meningitidis
atggatttgcgcaaattaaaaaaactgattgatttggttgaagaatcgggtatcgccgaaatcgaagtaaccgaaggcgaggaaaaagtccgcatcacccgtaccattgcagctgcggcagctcccgtttacgccgcgcccgtacctgccgccgcgccggccgtaacgcctgccgccgcacccgttgcggcatccgcgcccgccgccgcacctgccgcccgcgatttgtccgacgcgcaaaaatcgcctatggtcggcacgttctaccgcgcacccggcccgaatgccgcgccttttgtcgaagtcggccaacaggttaaagccggcgacacgctgtgcatcatcgaagcgatgaagctgatgaacgaaatcgaagccgaaaaatccggcacggtcaaagaaattttggtcgaaaacggtacgcccgtcgaattcggcgaaccgctcttcatcatcggataa

SEQ ID NO: 36564 - DNA, 330 bp, Neisseria meningitidis
atgaaacaaaatatcgaaaaactcgaaagcagcgtttatacgctggtacaaaaattcgaaaccctcgtcagcgaaaaccgccgcctcaaagaaaccgtcgccgaacttaaacgggcgcacgagcggcaaaaactcgaacacgaaaccgccgtcgacgaactcagcgaagccctgctcgtccaagtcggcaaactcaaagaagacctgcaaaacaagattgacagcctgacagaagaaaattcacgatatcgcaccctactcgaacagaacagggaaaaaatcagcgcactggcagcgcgcctcccccaatggcaggaaacgcagcaataa

SEQ ID NO: 36565 - DNA, 285 bp, Neisseria meningitidis
atgcagcctgcggtttatattttagcaagccaacgtaatggcacgttatacattggcgttacatctgatttggtgcaacgtatttaccaacatagggagcatttgattgagggatttacatcacggtacaacgttactatgctggtttggtatgaactgcatcctacgatggagagcgcaattactcgggaaaaacagttgaagaaatggaacagggcttggaaattgcaactgattgaagaaaataatgtttcttggcaggatttatggtttgatattatttag

SEQ ID NO: 36566 - DNA, 738 bp, Neisseria meningitidis
atgaaaaaattatctcggattgtattttcaactgtcctgttgggtttttcggccgctttgccggcgcagacctattctgtttattttaatcagaacggaaagctgacggcgacgatgtcttctgccgcttatatcaggcaatatagtgtggtggcgggtattgcgcacgcgcaggatttttattatccgtcgatgaagaaatattctgaaccttatatcgttgcttcaacgcaaatcaaatcttttgtgcctaccctgcaaaacggtatgttgattttgtggcattttaatggtcagaaaaaaatggcggggggcttcagcaagggtaagccggacggggagtgggtcaactggtatccgaacggtaaaaaatctgccgttatgccttataaaaatggtttgagtgaaggtacggggtaccgctattaccgtaacggcggcaaggaaagcgaaatccagtttaagcaaaataaggcaaacggcgtatggaagcaatggtatgccgacggcagcatcaagacggaaatggttatggtcaacgatgagcctgccaaaattctgacttgggatgaaagcggccgattactctcggaactgtctatccgccaccatcaacgcaacggggtggttttggagtggtatgaagatggttctaaaaagagcgaggctgtttatcaggatgataagttggttaggaaaacccagtgggataaggatggttatttaatcgaaccctga

SEQ ID NO: 36567 - DNA, 903 bp, Neisseria meningitidis
atggacagcctgatgacattgctttcggtattggtaccgatgttcgccggattttttatccgtgtgcccaagccttacctgcccgctttggacaaggtgctgtcggttttggtgtatgccgtgctgctgctgatcggcgtatcgttgtcgcgcgtggaggatttgggttcgcggttggacgatatggcgttgacggttctgtggctgtttgtttgtacggtcggggcgaacctgcttgctttggcagtgttgggaaagttattcccgtggcggataaaggggaaagggaagggcgtttcggtcggtgtgtcgggcagtgtggggcagctcggatgcgtgctgctcggatttgcatccggcaaactgatgcgcgatatttggatgccgtctgaaaacgcgggtatgtattgtctgatgctgctggtgctcctcatcggcgtacagctcaaaagcagcggcgtatcgttgcggcaggttttggtcaaccgcaggggtattcggttgtcggtctggtttatgctttcatctctttcaggcgggctgctgtttgccgcatcggcagacggtgtgtcgtgggtgaaaggtttggcgatggcttccggcttcggttggtattccctctcgggtttggtgatgaccgaggcttacggcgcggtatggggcagtatcgcgcttttgaacgatttggcacgagagctgttcgcgctggcatttattccgctgctgatgaagcgttttcccgatgcggcagtgggggtcggcggcgcgaccagtatggatttcacattgcccgtgattcggggtgcgggcggcttggaagccgtaccggtagcggtcagcttcggcgtggtggtcaatatcgccgctccgtttctgatggtggtgttttccgctttgggctga

SEQ ID NO: 36568 - DNA, 453 bp, Neisseria meningitidis
atgcgcaacatcgtggctgctattttgcgcgatgactacggtttgactgttaaaaccgacggcacaggcaaaggcaatatgccgctgcgtgaagctgtaaaactgattcgcggctcggatgtggcgattgagttccataccaactcggcggccggtaaagcagctacgggcattgaggcgttgagtaccgtcaaaaacaaacgctggtgtcaggtgttgagcaaagccgttgccaagaaaaccggctggaaactgcgcggcgaagacggctttaaacccgacaatgcgggccggcattcgcgcctggcttatgcgcaggccggcggcattgtgtttgagccgttttttatcagcaacgacactgatttggccttgtttaagacgaccaaatggggcatctgccgcgcgattgcggacgcgattgcgatggaattgggagcggcgaaggtatga

SEQ ID NO: 36569 - DNA, 993 bp, Neisseria meningitidis
atgccgtctgaaacagtttgtccgttttcagacggcatttccgttacacacccatccccttatacagtacgaccctattccgaaggtctgttaagaaagcccgttatgccctaccaacaaatcaccgtcaacgtcaacgatgccgtcgccgaacgcctcgccgacgcgctgatggaacacggcgcactctccgccgccatcgaagatgcctacgccggcacgcaaaacgaacaggcgattttcggcgaacccggtatgcccgccgaacaaatctggcagcagagcaaagtcatcgccctattcggcgaacacgacgaagccgccgccatcatcgatgccgccgcacaagaatgcgggttaaaagacttggcatacaccggcgaaaccatcgaagaccaagactgggtgcgcctcacgcaatcgcaattcgaccccatccggatttccgaccgcctgtggattaccccctcttggcacgaagtccccgaaggcagcgccgtcaacctacgcctcgatcccggactcgccttcggcaccggcagccacccgaccacgcgcctctgcctcaaatggttggatacacaactcaaaaacggcgaaagcgtcctcgactacggctgcggttcaggtatcctgaccatcgccgccctcaaactcggcgcaggttctgccgtcggcgtggatattgacgaacaggccgttcgcgccggcaaggacaacgccgaacagaacaacgtcgatgcacaattttatttgcccgaacaattaccatccggacaatttgatgtcgtcgtcgccaacatccttgccaaccctttgcgtatgcttggcgaaatgctcgccgcccgcaccaaacagggcggacgcatcgtgttgtccggtttgttggacgaacaggccgaagaactcggcggcatttacagccaatggttcgacctcgaccctgcggaaaccgaagaaggatgggcgcgattgagcggcgtaaaacgctga

SEQ ID NO: 36570 - DNA, 312 bp, Neisseria meningitidis
atggcttccatccacgaccaaattaaagaagtagtaacgacacaccgcgtcgtattgtttatgaaaggtacgaagcagtttccgcaatgcggtttctcttcccgcgccgtgcaaatcctgaacgcggcaggctgcaccgattacgttaccgtcaacgtattggaaaatcccgaagtacgccaaggcattaaggaatacagcgactggccgaccatcccccaactttatgtgaacggcgagtttgtcggcggttcggacatcctgatggaaatgtatgaggcaggcgagctgcaagagctgctgaaagcctga

SEQ ID NO: 36571 - DNA, 357 bp, Neisseria meningitidis
ttgctgcaaacccccaagctgcgcgtcatcgccgtccataacgacagcggttcgcctgcattctgccgcgtcatttggcgtaagcatattgccgaaatgaccgacctttcggcagcggaacgcggcgaattgatggaaatggtgtacaaagtcgaagccgctatgcgccaagtgtttcaacctgccaagattaacctcgccagcttgggcaatgtcgtgccgcacctgcattggcatattatcgcccgctttgaaaacgatgcgtccttccctgcgccgatttgggcaaaccccgtccgaaaacacggtatgaccctgccgcaagattggacggaacagcttaaaaagctgctttaa

SEQ ID NO: 36572 - DNA, 702 bp, Neisseria meningitidis
atgtctttgaaaacagtaaccgttatcggcgcaatggaacaagaaatcgagcttttgcgcgagatgatggaaaatgtcaaagccgtctctttcggcaagtttgccgcctatgaaggcgaattagcgggaaaacgcatggtgcttgcattgagcggcatcggcaaggtcaacgcggcggttgcaacagcttggcttatccatcaattcgcaccggactgcgtcatcaacaccggcagcgcgggcggtttgggcaagggtttgaaagtcggcgatgtcgtggtcggcacagaaatcgcgcaccacgatgtcgatgtaaccgcattcggctatgtttggggacaagtgccgcaactgcccgccgtatttgtttcagacggcctcttggtcggcaaagcaaaacaggcggcggaagtgtttgaaggcgcggcggtagaacaagggctgattgtcagcggcgaccgcttcgtccacagcagcgaaggcgtggcggaaatccgcaagcacttccccgaagttaaggcggtagaaatggaagcggcggcaatcgcccaaacctgtcatcagttggaaacgcctttcgtcatcatccgcgcggtttccgattcggcagacgaaaaggcagacatcagctttgacgagttcttgaaaacggcggcggcaaattccgcaaaaatggtggcagaaatcgtcaaatctttataa

SEQ ID NO: 36573 - DNA, 936 bp, Neisseria meningitidis
ttgctgcaaatccccattagtcatgcgaacggtttggatgcccgtttgcgcgatgatatgcaggcaaaacactacgaaccgggtggtaaataccatctgtttggtaatgctcgcggcagtgttaaaaagcgggtttacgccgtccagacatttgatgcaactgcggtcagtcctgtactgcctattacacacgaacggacagggtttgaaggtgttatcggttatgaaacccatttttcagggcacggacatgaagtacacagtccgttcgatcatcatgattcaaaaagcacttctgatttcagcggcggtgtagacggcggttttactgtttaccaacttcatcgaacagggtcggaaattcatccggaggatggatatgacggaccgcaaggcagcgattatccgccccccggaggagcaagggatatatacagttaccatatcaaaggaacttcaacaaaaacaaagataaacactgttccgcaagccccgttttcagaccgctggctaaaagaaaatgccggtgccgcttccggttttctcagccgtgcggatgaagcaggaaaactgatatgggaaaacgaccccaatcaaaattggtggggtaaccgtatggatgatgttcgcggcatcatccaaggtgcagccaatccttttctaacgggttttcagggattgggagttggggcaattacagacagtgcggtaaacccggtaacctatgcggcagcacggaaaactttacagggtattcacaatttaggaaatttaagtccggaagcacaacttgcggccgcaaccgcattacaagacagtgcttttgcggtaaaagacggtatcaactctgccaaacaatgggctgatgcccatccgaacattacagctactgcccaaaccgcccttgccatagcagaggccgcaactacggtttga

SEQ ID NO: 36574 - DNA, 891 bp, Neisseria meningitidis
atgatatttcaaaaccatgccgtccgaaccgcaacactttcccacttcacaacatctgcaatggcacattacgcaatcggcgacatacaaggctgtttcgacgaactgaccgcgctgctcggcaaaatcggtttcaaccacggcacggacaccctctggctgacgggcgacatcgtcaaccgcggcccgaaatccctcgaaacgctgcaattctgcatccggcacgaaaacagcgtgcaaatcgtcctcggcaaccacgacctgcacctgctcgctgtcggctgcggcgaaggcgcgcccaaacgcagcgacacaatcgaacccatactcaaacaccccgacggaaaaaaaatgctcgactggctgcgtgcgcaaccgctgttgatacgcgagggcagccgcgtgatggtacacgccggcatcctgccgcaatggcgcatcgccaaagccgaatcgctcgctagagaagccgaagccgaactgcgcggcaaaaaatacgtcaaattcttctccaaaatgtacggcaacaaaccggccgcgtgggacgaaggtttggaaggctatgcccgcctgcgcttcatcgtcaacgccttcacgcggatgcgcgccctgacctttaaaaacgaactggatttcgactacaaatccacagtgaaaaaaatgccgccttacctgcgcccgtggttcaaagcccccgaccggcaaaacctcgaccgcaccatcatcttcggacactggtcctcgctgggctacacgaatgccgacaacgtcatctcgctggacaccggcgcgctgtggggcggacagctgaccgccgtcaacctcgaaacggaagaaattacccaagtccaagccgccggcggcatagactggaaaagcttcgcaaaataa

SEQ ID NO: 36575 - DNA, 942 bp, Neisseria meningitidis
atgaaaaccctgctcctcctcatccccctcgtcctcaccgcctgcggcacactgaccggcattcccgcccacggcggcggcaaacgctttgccgtcgaacaagaactcgtcgccgcatcgtcccgcgccgccgtcaaagaaatggatttgtccgccctgaaaggacgcaaagccgccctttacgtctccgttatgggcgaccaaggttcgggcaacataagcggcggacgctactctatcgacgcactgatacgcggcggctaccacaacaaccccgaaagtgccacccaatacagctaccccgcctatgacactaccgccaccaccaaagccgacgcgctctccagcgtaaccacttccacatcgcttttgaacgcccccgccgccgccctgacgaaaaacagcggacgcaaaggcgaacgctccgccggactgtccgtcaacggcacgggcgactaccgcaacgaaaccctgctcgccaacccccgcgacgtttccttcctgaccaacctcatccaaaccgtcttctacctgcgcggcatcgaagtcgtaccgcccgaatacgccgacaccgacgtattcgtaaccgtcgacgtattcggcatcgtccgcagccgtaccgaactgcacctctacaacgccgaaacccttaaagcccaaaccaagctcgaatatttcgccgtcgaccgcgacagccggaaactgctgattgcccctaaaaccgccgcctacgaatcccaataccaagaacaatacgccctctggatgggaccttacagcgtcggcaaaaccgtcaaagcctcagaccgcctgatggtcgatttctccgacatcaccccctacggcgacacaaccgcccaaaaccgtcccgacttcaaacaaaacaacggtaaaaaccccgatgtcggcaacgaagtcatccgccgccgcaaaggaggataa

SEQ ID NO: 36576 - DNA, 840 bp, Neisseria meningitidis
atgccgggtgtgaagcgtcaaagtttggacaggctgctgtttacggcggaagaggcggtaaagctcggtattccgatgttggcactgttccccgtggttacggcaaacaaaaccgagcgtgcgcaggaggcgtacaatcccgaaggactcgtgccgtcaactgtccgcgccttgcgcgagaggtttcccgaactgggcattatgacggatgtcgcgctcgatccttatacggttcacggtcaggacgggctgacggacgaaaacggttatgtgatgaacgatgaaaccgtagaggttttggtcaagcaggctttgtgccacgctgaagcgggcgcgcaggtggttgccccttccgatatgatggacgggcgtatcggtgcgattcgcgaggcgttggaggatgccgggcatatccatacgcggattatggcgtattccgccaaatatgcttctgcattttacggccctttccgtgatgcggtaggcagttcgggcaatttgggcaaggcagataaaaagacctatcagatggatcccgcaaataccgatgaggcgctgcatgaggtggcgttggacattcaggaaggtgcggatatggtgatggtcaagcccggtttgccgtatttggacgttgtccgacgcgtgaaggacgagttcggtgtgccgacttatgcctatcaggtttcgggcgaatatgcgatgctgcaggcggcggttgccaacggctggctggacggcgataaggtggtcttggaaagcctgctggcattcaaacgtgcgggcgcggacgggattttgacctattatgccattgaggcggcaaagatgctgaagcgttga

SEQ ID NO: 36577 - DNA, 1179 bp, Neisseria meningitidis
atggcatttttaaaactgaccgaacaaaacgtgcagggcaaaaccgtcctcatccgcgccgatatgaacgtgccgttcaaagacggcaaaatcagcgacgacacccgtatccgcgcttcgctcgcgtccgtcaaatactgcttggacaacggcgcgtccgttatcgtgatgacccacttgggccgcccgactgaaggcgagttccaccccgaagacgacgttgcgcccgttgccgcgcatttgggcggtctgttgggcaaagacgtgaaagtattgaacgactggcgcgaaaacaaaccggctttgaacgcgggcgatgtcgtgatgctgcaaaacgtgcgtatcaacaaaggcgagaagaaaaacgatttggaactgggcaaagcctacgcttctttgtgcgacgtgttcgtcaatgacgcgttcggcaccgcccaccgcgcccaagcctcgaccgaagccgtcgcccaagccgcgcccgttgcctgcgccggcgtattgatggcgggcgaactcgacgctttgggcaaagccttgaaacagcctgcacgcccgatggttgccatcgttgccggcagcaaagtgtccaccaagctgaccatcctcgaatcgctggcggacaaagtcgaccaactcatcgtcggcggcggtatcgccaacaccttcctgttggcggaaggtaaagccatcggcaaatctttggcggaacacgatttggtggaagaatccaaaaaaattatggcaaaaatggcggccaaaggcggttctgtgccgctgccgaccgatgtcgtcgttgccaaagcctttgccgccgatgccgaagcggtggtaaaagacattgccgacgttgccgaagacgagatgattttggacatcggcccgaaatctgccgccgcgcttgccgatttgcttaaagccgccgacacggtcgtttggaacggaccggtcggcgtgttcgagtttgaccagttcgcaggcggtacgaaagcccttaccgaagccattgcccaaagcaaagcgttctccattgctggcggcggcgacacgctggcggcgattgccaaattcggcgttaccgaccaaatcggctacatctccaccggaggcggcgcgttccttgagttcttggaaggtaaagagttgcctgccgtagccgctttggaaaaacgcggcgagtaa

SEQ ID NO: 36578 - DNA, 726 bp, Neisseria meningitidis
atggaaacacaaaacaaacctaccgttaccgacattgaccgccccatactcgtcccgcccggcggacataaaaaagtcttgctgcattcctgttgcgccccgtgcagcggcgaagtgatggaagccatgctggccagcggcattgattacactatttatttttacaatcccaatatccatccgcacaaagagtatatgctccgaaaagaggaaaacgtgcgctttgcggaaaagttcggcattcctttcatcgataaagacgacgactacgaaaacgaccgcaaagaatggtttgccaaagccaaaggcatggagtttgagccggaacgcggcatccgctgcaccatgtgtttcgatatgcgttttgaaaaggcggcgcaatacgcgcatgaacacgggttccccgtctttaccagttcgctgggcatttcacgctggaaaaatatggcgcaaatcaacgactgcggacaccgcgccgccgcgccttacgatgatgtggtgtattgggatttcaactggcgcaaaggcggcggcagcgcgcgcatgattgaaatcagcaaacgtgaaaacttctaccagcaggaatattgcggttgcgcctattccttgcgcgattccaatgcccaccgcaaatcgcagggcagaatccccatcaaactcggcgtgctgtattacggggacgaatcgacacaatacgaacctgcacccatccgggtggacaaataa

SEQ ID NO: 36579 - DNA, 738 bp, Neisseria meningitidis
atgggcggacagaaaacgcatttcgggttcagcacggtcaacgaagatgagaaagccggaaaagtggcggaagtgttccactccgtcgccaaaaactacgacattatgaacgatgtgatgtcggcagggctgcacagggtgtggaagcatttcaccatcaacacggcgcacctgaaaaaaggcgataaagtgttggacattgcgggcggtacgggcgatttgtcgcgcggttgggcgaaacgggtcggcaaggaaggcgaggtttggctgaccgatattaattcctctatgctgaccgtcgggcgcgactgtctgttgaacgaaggcatgattttgccagtgtcgcttgccgatgcggaaaaactgcctttccctgacaattatttcaacttggtttccgtggcgttcggtttgcggaacatgacgcacaaggataccgcgctgaaagagatgtgccgtgttttgaaacccggcgggacattgctggtattggagttttccaaaatctacaagccactcgaaggcgcgtatgatttttattcgttcaagctgctgccggtcatgggcaaactgattgccaaagatgcggagagttatcaatatcttgccgaatccatccgtatgcaccccgatcaggaaactttgaaacagatgatgctggatgcaggctttgacagcgtggattatcacaatatgagtgcgggcatcgtcgcgctgcataagggcgtgaaattttaa

SEQ ID NO: 36580 - DNA, 345 bp, Neisseria meningitidis
atgaataagcaatatccgaaaattaactatatcggtaataaagagaaaatagcttcctggatttgtgaccagcttccgtctgatgtagatacagttgcagatgtatttagtggaggctgttcctttgcctacgaagccaaaaaacgcggctatcgtgtgattactaacgatattttggcaattaattaccaaattgctttagcattaatagaaaacaaccatgaaacattaaatgacgatgatgtcgcaatgattttttcaggcagcccgcatgccggttttatgagtcagcgttatgccgaaaaattctattttcacgatgaataccaacaacttgatttgtaa

SEQ ID NO: 36581 - DNA, 540 bp, Neisseria meningitidis
atggctcggttgagagagttttataaagagacagttgttcctgaattggttaaacaatttggttacaaatcagtaatggaagtcccgcgtattgaaaaaattaccttgaatatgggtgtgggtgaggctgttgctgataaaaaagttatggaacatgctgtttccgatttagagaaaattgccggtcaaaaaccggttgttactgttgcccgtaaatctatcgcaggttttaaaatccgtgataactatccggttggttgcaaagtaacattgcgtcgtgatcaaatgtttgaattcttggatcgtttgattactattgcattacctcgcgtacgtgacttccgtggtgtgagcggtaaatcatttgatggccgtggcaattacaatatgggtgttcgtgagcaaattatttttccggaaattgaatacgataaaattgatgctttgcgtggtttgaatattactattactactacagcaaaaaccgatgaggaagcgaaagctttattgtcattgtttaaatttccgttcaaaggataa

SEQ ID NO: 36582 - DNA, 924 bp, Neisseria meningitidis
atgaaaaaacgcaataatcctcttccgctgttgaacggtgtcaaacccagttatttggtgctgccgcatgaaaagcagttttacgggctgccgctgctgcattttctgtgcatccgctttccttttgtgggcgcggacgattggcgcaggcggttgaacagcggttttgtggtcggttcggatggtgcggcgttggacgaacattctttgttcgagccgggtaagacgatgttttattatcgggaaaccagcagtgaggatgagccgcgtattccgtttgaagaaaagattttgcatattgatgagcatttgattgtggtggacaagccgcattttctgcccgtcatccccagcgggcgttttttgagggaaacgctgctcacacgtctgcgcctgcgtcctgaattgcagcatttgaatgttgaggacattacgccgctgcaccgcttggacaaggatacggcaggcgtgatgctgctgtcgcataatcctgccacgcgcggggcttatcagacgatgtttcaaaacaaaacggtatggaaaacgtatgaggcacttgcgccgacaaggacggatttgccgtatccgctcgatgtggtttcgcgtttggtgaggggtgagaaattttttacgacgcaagaggcggaaggcgaaccaaacgcacatacgacggtcgaactgattgaaaacaggggggaattcagcctttaccgccttacgccgcataccggcaagaaacaccagttgcgcgtgcatatgatgggtttgggtatgccgctgttgaatgacgcgctctatcccgtgccgtctgaagcgggcagcgaggattatcggaaacctttgaagttattggcaaaaaagattgcgtttgcagatcctttgtcgggtcgggaaagggtgttttgcagtaggttttgcctataa

SEQ ID NO: 36583 - DNA, 1437 bp, Neisseria meningitidis
atgccgctgctgtctgtcgagttcgcactgttctttctcgccttcctgccgatttactggggcttggcgaaatacccgtccgtccaaaacctgctgcttttggctgccggtatgggctggctctaccatatcggccccgtatttgcggcaatcgtcgtcctttattcctcctgcgtgtaccttttgggcgaactgctccgttccgatcgcgaaaatacgcgccgcttttggctggggtgcggcattgccgtctcgctgaccgtcttgggctttttcaaatatttcgactttttccgcccgctgattgcacaatatgccggacaaggcggcgcaatcgacatcctgatgccgctggggctttcgtattacaccttccagtcgctcgcctatctggtttactgcttccgcgccccgcacgccgcgcgtttcgagtggcacgagctgctgctgcacctgagttttttccccaccgttacctccggcccgattatccgcgccgccgcattcaaaagcgcagacggcgagcaggcgggcgcattggcgcaaatccgtacccgccaaccgcgctcacccgtccgccccgcactcgccgtttccctgattctgctgggtattgccaaaaaatggtggctggcggggatgctggcggaaaactgggtgtcgcccgtatttgaaaatcccgcccaattcgacggctggggcgtattgggcggcgtgtacggctataccttccaactctttttagacttttccggatattccgatttggttatcggcatggcgatgctgctgggtttccggctgcccaaaaacttctccgcaccgcttcgtgctttaaacatccgcgcattttgggacaaatggcacatcagcctttccacctggatacgcgactacatctacatccccttgggcggcagcaaaaaaggctttttacggacacagctcaacctgatggcggcaatggtactctcaggcatctggcacggctacggctggaacttcctcatttggggcgcgctgcacggcacggcactggtgctgctcaacacgggcgatcgctatttcggacgcaacgcgctatgccgtctgaaataccttgcgccgctctcgtggtttgttaccttccatttcgtctgccttagctttgttgtcttcaataccgcaagccccgacgatgcaggcgcagttttcaatgccctctttgccaatgccaacggctggaatgcgccgcaacaggcaaacatgctgctgcttgcctcgtttgcatccgtgatgctgctctacccttacctgcaacgcgctttcgacggcgcggccaaaggtttggaaaaaatcccgatgtggctgtggtttatccccgtttccgccgtcctgctgctgattatcgtattggccccctcggggattcccggctttatttatgccaatttttaa

SEQ ID NO: 36584 - DNA, 375 bp, Neisseria meningitidis
atgagaaaaagtcgtctaagccggtataaacaaaataaactcattgagctatttgtcgcaggtgtaactgcaagaacagcagcagagttagtaggcgttaataaaagtaccgcagcctattattttcatcgtttacgattacttatttatcaaaacagtccgcatttggaaatgtttgatggcgaagtagaagcagatgaaagttattttgctgaacgacaaaaccatattaatggaattgagaacttttggaaccgggcaaaacgtcatttacgcaagtttaacggcattcccaaagcgcattttgagctgtatttaaaggggtacgaacggcgttttaacaacagtgagataaaagttcttgttccattttaa

SEQ ID NO: 36585 - DNA, 3087 bp, Neisseria meningitidis
atgcgccgctacctcaatacctgcctcgcccgcgatttgggcgtggcggcgaacttgtcgttcagcctgcccgccggcctgacgtggaagctgatgaaaaaactgattcccggtattccggaactcagcccgtttgcgcccgaagtgatgcgctggcggctgctggatttgttccgcagtgaagcattccggaatacggcagaatttgaagatgtgaggaatgtgctgcaagactatctgggcagcggcgaatcggcagattaccagcttgcgggacagcttgcggacatattcgaccaatacctcgtgtaccgtcctcagtggatagacgcttggcagcagggcaggcggctcggtttgggcgacgacgaaatctggcagtccaaactgtggcgttacctcgacgatggcaggcagagcgcgccgcaccgtgtcgcgttgtgggaaaagctgcttgccgcgttggacaaggataagctgcccgagcgttatttcgtgttcggcatttccacgatggcgccgatgtatcttcagcttttgcacaagctgtccgaacattgcgatgtgttcgtgttcgcactcaatccgagcgggatgtattggggcaacgtcatcgaagcggcgcaaatcctcaaaggcggcggcgatcccgatttaactcaggcagggcatccgctgctcgcctcattgggcaagcaggggcgcgactttttcgactttttgaacgaaatggaaatagaaggagaaacgccggtatttgaagaaggcgggcgcgatacgcttttgcacgccctgcaaaccgatattcaaaacctgaaaatgccgtctgaaaatgtgggaagcgtcaacacgggcgacggctcgatacgcatcgtctccgcacacagccccttgcgcgaattgcagatactcaaagacaagctgttgaaaattctgcatgaacatcccgattggcagccgcatgatatcgccgtattaaccccgcacatcgaatcctatacgccttttatcgaagccgtgttcggacaggcgcagcccggtgcgcaggcattgccgtattccgtttcagacgtgaaaatcagccgccgacaaccgctgtttcatgctttgtcatgcctgttcgacttgttggaaagccgatttgaagtcgataaagtgcttgtgcttttagaaaccgcacccgtgttgcgccgtttcggactgactgaggacgatttgccgcttttgcacgatatggttgccgatttgaacgttcactggggtttggacggagaaatgcgcggcggcacggatcagctgtttacctggaagcaggcggtagaacgcatgatattgggctggatgctgcccgaaggcggcaacccgatgtggcaggatgtcagcgcgtggtatgccgacgtgaaccaaaccgccctgttcggacgttttgccgccctcctcgaaaccctgtcggatattgtacggatatggcggcagcccgcaacgatcggcgaatgggtggcgcgttgccgggatttgcttgaaacattgttccaagctgaagccgatgaccaaaagtcagtccaaaaccttgaaaacgaatgggtcaaatggcaggcggaaacagaattggcgcaattttccggacagttgccgcaacaaaccgtcatccgccatatccgacgtttcctcgacagcgaaagcgaggcaggctttttacgcggcggcatcaccttttgcagtatggtgccgatgcggagcctgccgttcaaagtcatctgcctgttgggtttgaacgacggagattttccccgcaataccaaagccgccgtattcgacctgattgccaaacatcccgccaaaggcgaccgcgcccgccgcgatgacgaccgctacctcttcctcgaagccctcatcagcgcgcgcgaaatcctctacctgtcctacatcgggcgcgacatccgcaaagacgaagagcttgctccgtcttcgctgttgggcgaactcatcgacacagttgccgctatggcgggcatcggtagccgccaacttgcacaaaactggatagaacagcatccgctgcaagccttctcgcgccgatattttcaagaaggcggacgttcagacggcatattcggcacgcgtaccgactacgccactgcgctcggacaaacgcccgaaccgccgcaaccctttttcgaccaacccgtagaaaacgccgaacctgttgccgaaatcggacaggacgaatttatccgtttctggcgcaaccccgtcaaagtatggcttcagcagcagcttgcgtggagcgaaccccatatcggcgaagcctgggagcctgccgaacccttcgagccgcaacacgccgatcaaatcgccgaaacctacatcgaagcacggcgcgaaggacgggattttgcccaaaccgccgcccgcatcggggcggaaagcctcctgccgtcgggagagttgggcagactttggcagcagaacttccaaactgctgccaaacaaatcgacacggcggttttaaacagccccaaactgccaccgctttcatatgccataccgtcggacgggcaaatcctgaaaggcagcttgggcaatctgtaccgctgcggacaagtgttttacgcctacggcaaacccaacgcgccgcaacgtatcgcttttctgctggaacacctgatattttgcgccgttatgccgtctgaagccgaaacgcggcaaacctttatcgtccaatccggagaaaccgaaatattggcggaaatcgcgcaagacagggcattgcagctattgtcggaatggatggcgtttttcaatatcgggcaaaaccgcccgctgccgttttttgccaagacctcgcttgccgctgccgaagcgtttgcccaaaaacaagattgggaagccgccctgaaaaaagcccaaaccgcctattacggcaacaaagtcagcaaagggcagaaagactataccgaagtcgccctcgtgttcggcaacgcaagccaaaacccactcgaacaacccctgtttgaaaacctcgcccgcctgcttgccgacacgcttgccgcagcggaaaaaagggaaggggccggagcagcctga

SEQ ID NO: 36586 - DNA, 354 bp, Neisseria meningitidis
atggataaacatacaacccgactccgtcgtgcacgcaaaacccgtgctcgtattgcggacttgaaaatggtaagattatgtgtgttccgaagcaataatcatatttatgctcaagtaattagtgctgaaggtgataaagtattggctcaagcctctacattggaagctgaggtgcgcggtagtctgaaatctggaagcaatgttgaagcagctgcaatagttggtaaacgtattgctgagaaggctaaagcagcaggtgtagaaaaggttgcttttgatcgttcaggtttccaatatcacggtcgtgtgaaggctttggctgaagctgctcgtgaaaatggtttaagcttctaa

SEQ ID NO: 36587 - DNA, 1065 bp, Neisseria meningitidis
atgaaagcagcacgtttttacgacaaaggcgacatccgcatcgaagacatccccgaaccgaccgtcgcccccggcaccgtcggcatcaatgttgcctggtgcggcatctgcggtaccgacctgcacgaattcatggaaggcccgattttcattccgccttgcggtcatccgcacccgatttccggcgagtccgcacccgtcacgatgggacacgagttctccggcgtggtctatgccgtcggcgaaggcgtggacgacatcaaagtcggtcaacacgtcgtggtcgagccttacatcgtacacgacgacgtaccgaccggctcgggcagcaactaccacctctccaaagacatgaactttatcggcttgggcggctgcggcggcggcctgtccgaaaaaatcgccgtcaaacgccgttgggtgcatccgatttccgacaaaatcccgttggatcaagccgctttgatcgaaccgctgtctgtcggacaccacgcctatgtacgcagcggcgcgaaagcaggcgacgtcgcattggtcggcggtgcaggtccgatcggtttgctgttggctgccgtgttgaaagccaaaggcatcaaagtcatcatcaccgagttgagtaaagcacgcaaagacaaagcgcgcgaatctggcgttgccgactacatcctcgacccgtccgaagtcgatgttgtcgaagaagtgaaaaaactgaccaacggcgaaggcgtggacgtggcattcgaatgtaccagcgtgaacaaagtgttggatactttggtcgaagcctgcaaacctgccgccaatttggttatcgtatccatctggagccaccctgcaaccgtcaacgtccacagcgtcgtgatgaaagagctggatgtgcgcggcacgattgcctactgtaacgaccacgccgaaaccatcaaactggtcgaagaaggcaaaatcaacctcgaacccttcatcacccagcgcatcaagctggacgaactggtttccgaaggcttcgagcgtctgatccacaacaacgaatccgccgttaaaattattgtgagtccaaacctgtaa

SEQ ID NO: 36588 - DNA, 675 bp, Neisseria meningitidis
ttggtcagaacggcagacggctacaaagccattgcccatattcaagccggagaccgcgtcctttccaaggacgaggcaagcggagaaacgggatacaaacccgttaccacccgatacggtaatccgtaccaggaaaccgtttacattgaagtttcagacggcatcggcaacagccaaaccctgatttccaaccgcatccatccgttttacagtcaaggaaaatggatacaggcaggtcgtctgaaaaaaggcgacaccctgctttccgaaagcggcgcaaaacagacggttcaaaacattaccctcaaacagcagccgctcaaagcctacaacctgaccgttgccgactggcatacttacttcgtcaagggagataaggcggaaacggaaggggtttgggttcataatgagtgtccgaccaaaccaaaaccaactaatcatgcccaacaaagaaaagaagaagctaaaaacgattctcatcgaagtgtgggagattccaatcgtgtcgttcgcgaaggaaagcaatatttagatgccgacacaggaaaccatgtttatgtaaaaggagaaaaagtggttattctaactcctgatggaagacaggtaactcaatttaagaactcgaaagccaatacgtcaaaaagggtaaaaaatggaaaatggacaccgaaataa

SEQ ID NO: 36589 - DNA, 603 bp, Neisseria meningitidis
atgttcaacatatcggctgttgctgtttcctatctgatcggctcactttctttcgccgtcatcgtgtccaaatattacggcatggacgacccgcgcacctacggatcgggcaatccgggggcaaccaatgttttacgcagcggcaaaaaaaaggcggccgcgctgacgctcttgggcgatgccgccaaaggtttagttgccgttttgcttgcacgcgtgcttcaagaaccgctcggtttatccgacagcgcaatcgcggccgtcgcactcgccgcgctggtcgggcatatgtggccggtgtttttcggatttaaaggcggcaaaggcgtggcaacggcattgggcgtgcttctggcactctctcctgcaactgccttggtctgcgcgttgatttggcttgtgatggcattcggcttcaaagtatcctcccttgccgcattaaccgccacaatcgccgccccccttgccgcactgttttttatgccgcatacttcttggatttgggcgacactccttatcgccctgctggtgttgttccgccacaaaagtaatatcgtcaagctgctcgaaggcagagaaagcaaaatcggcggcagccgctga

SEQ ID NO: 36590 - DNA, 1227 bp, Neisseria meningitidis
atgaataccgataacctgcacgacatcttggacgaaatggttcaagtgtattctcaaaaaaaacaaagccgatccgaaaccccggccgaaatcggcgcacacttccacccgctgctcgaccgcctgtgcgaaaccgcagaagcacaaaacgcgtccgacatccttatcagcaaaggattcccgccctcgttgaaaatcaacagcgcattaaccccgcagccgcaaaaggcgctgacgggcgaggaaaccgccgccatcgccgcatcgacgatgaacgccgaacaatcggaaatattccggcgcgacggcgaaatcaactactccgtccagtcgcgcagcggcacgcgctaccgcgccaacgcctaccacagccaaggcagcgcaggtttggttttgcggcgcatcaaccacgtcatcccgcaaatgcaggaattgggcctgcccgaaaaactcaaagacctcgccgtcgcaccgcgcgggctgctgattatcgtcgggcctaccggttcgggcaaatccaccacgatggcgactatgctcgaacaccgcaacaaaaccctgcccagccatatcgttaccatcgaagacccgattgagtttatctacaaaccgcgccgctgcatctttacccagcgcgaaatcggcgtcgacaccataaactggcagacggcggtacaaaacgctatgcgccagtcccccgacgtggtctgcatcggcgaagtccgcagcagggaaagtatggaatacgcgatgcagctcgcccaaaccggccacctgtgcatttttacgctccacgccaacaccgcgccgcagtcgctcgaacgcatactcaacttctaccccaaagaacagcacaaccaaatactgatcgacatcgccctcaacctgaccggcatcatctgccaacgcctcgccctcaaacaagacaaaacgggcaggacggcggttgtcgacttgctcatcaacacgcccgccatccaagacttcatcctgaagggcgacctgatgaacatcagtaaaatcatggaaaccgccaaaaccgacggaatgcagacgatggatcaaaaccttttcgaactgtaccgtcacggcatcatcagttacgaagaagccctgcgccagtccgtttccgccaacaacctgcgattgcacatccaactgcacaaagaaggcaaaacgcccgaactcctttacgacaggattaacgacctcaacctcgtttcctaa

SEQ ID NO: 36591 - DNA, 1512 bp, Neisseria meningitidis
gtggttacgctcttgatggacagcgcggaaggcattgaggtcaacaatacggtcatcaaagtattgagcatcgatgtcggacgcgttacccgaatcaaactgcgcgacgaccaaaaaggcgtggaagtaaccgcccaactcaatgcggacgtatccggcctcatccgcagcgatacccagttttgggtggtcaagccgcgtatcgaccaaagcggcgtaaccggtttgggtacgctgctttcgggttcgtacatcgcctttacacccggcaaaagcgacgaggcaaaagacgtgttccaagtgcaggacattccgcccgttaccgccatcgggcaaagcgggctgcgcttgaatttgattggtaaaaacgaccgcatcctcaacgtcaacagccctgttttgtatgaaaactttatggtcgggcaagtcgaaagcgcgcatttcgacccgtccgaccaaagcgtgcattacaccatcttcatccaaagccccaacgacaaactgattcattccgccagccgtttttggctggaaagcggcatcaatatcgaaaccacaggcagcggcatcaaactcaattccgcccctctgcctgccctgctgtcgggcgcgatttcatttgattcgccgaaaaccaaaaacagtaaaaacgttaaaagcgaagacagcttcacgctttacgacagccgcagcgaagtcgccaacctgcctgacgaccgctcgctgtactacaccgcgtttttcaaacaatccgtgcgcggactgaccgtcggttcgcccgtcgagtacaaagggctgaatgtcggcgtggtttccgatgtcccttatttcgaccgcaacgacagcctgcatttatttgaaaacggctggattcccgtacgcatccgcatcgagccttcccgtttggaaatcaatgccgacgaacaaagcaaagagcattggaaacaacaatttcagacggctttaaacaaaggcctgaccgccaccatctccagcaacaacctgctgaccggcagcaaaatgattgagttgaacgatcagccttcgtcttcgcccaagctgcgaccgcataccgtttatgcaggcgataccgtcatcgctacacaaggcggcggtttggacgatttgcaggcgaaagtggtggatttgctggacaagttcgacaaactgcctttggataagacggttgccgaattgaacggttcgcttgccgagctcaagtccgcactcaaatctgccaatgccgccctaagctccattgacaaactggccggcaatccgcagacgcaaaacattccgaacgagttgaaccaaaccctgaaagagttgcgcacaaccctgcaaggcgtatcgccgcaatcgcctatctacggcgacgtacaaaatacgctgcaaagtttggacaaaaccttaaaagacgttcaacccgtcattaacactttgaaagaaaaacccaacgcgctgattttcaacagcagcagcaaagaccctatcccgaaaggaagccgataa

SEQ ID NO: 36592 - DNA, 1794 bp, Neisseria meningitidis
atgcaattagatatagaccgcttggttgcttatttcggcggcgtgaacgcgcttgccgaagcgttgaaacagcacgatcccgaaaatgccgcgacgaccgccgccatctataaatggcgcacgcgcggctcgctgcctctggcgcaactgcaaaagctgaccgcgttggcggaagcgcaaggcaggccgctggatttgaatgcttttttacaaaaaaacgaatctctggagagaacagaaatgacacaggccaaccgcgttatcattttcgacaccaccctgcgcgacggcgagcagtcgcccggcgccgctatgaccaaagaggaaaaaatccgcgtcgcccgccagctggaaaaattgggtgtggacatcatcgaagcgggttttgccgctgccagcccgggcgatttcgaggcggtcaatgcgattgcgaaaaccattaccaaatcaacggtctgttcattgtcccgcgccatcgagcgggacatccgtcaggcgggtgaggccgttgcgcccgcgccgaaaaaacgcatccacaccttcatcgccaccagccccatccatatggagtacaaattgaagatgaagccgaagcaggtgattgaggcggcggtcaaagcggtgaaaatcgctcgtgaatacaccgacgatgtggaattttcctgcgaagacgcgttgcgttcggaaatcgatttccttgccgaaatctgcggcgcggtgattgaagcgggcgcgaccaccatcaatattcccgataccgtcggctattccatcccgtacaaaaccgaagaatttttccgcgaactgattgccaaaacgcccaacggcggcaaagtcgtttggtcggcacactgccacaacgatttgggcttggcggttgccaattcgcttgccgcattaaaaggcggtgcgcgtcaggtggaatgtactgtcaacggcttgggcgaacgtgcaggcaatgcttcggttgaagaaatcgtgatggcgttgaaagtgcgccacgacttgttcggcttggaaaccggcatcgataccacgcaaatcgtgccttcgtccaaactggtgtccaccattacgggctatcccgtgcagcccaacaaagccattgtcggtgccaatgccttttcgcatgaatcgggcatccatcaggacggggtgctgaaacaccgcgaaacttacgagattatgtccgccgaatcggtcggctgggcaacaaaccgtttgagcttgggcaaattgtccggccgcaacgccttcaaaaccaagctggcggatttgggcatcgagttggaaagcgaagaggcactgaacgccgcgtttgcccgcttcaaagaactcgccgacaaaaaacgcgaaatcttcgatgaagacctgcacgcactggtatccgacgaaatgggcagcatgaatgccgagagctacaaattcatctcccaaaaaatcagcaccgaaaccggcgaagagccgcgcgccgacatcgtgttcagcatcaaaggcgaagaaaaacgcgcttccgccacaggctccggccccgtggatgcgattttcaaagcgattgaaagcgtggcgcaaagcggcgcggctttgcagatttattccgtcaacgccgtcacgcaaggtacggaaagccagggcgaaaccagcgtccgtctggcgcgtggcaaccgcgttgtcaacggtcagggtgcggataccgacgttttggtcgccactgccaaagcctacctctctgccttaagcaaactggaatttggttctgccaaaccgaaagcgcaaggcagcggtacgatttga

SEQ ID NO: 36593 - DNA, 327 bp, Neisseria meningitidis
gtgggaatgacgggatttaatgatgccgccggcgtggcatcctccccctccgacatcaaaggcaaatatgttcaaagcgttgaagtcaaaaacggcgtcattaccgccacaatgctttcaagcggcgtaaacaacgaaatcaaaggcaaaaaactctccctgtgggccacgcgtcaagacggttcggtaaaatggttctgcggacagccggttacgcgcgacgcccccaacgccagcgccgacgccgttaacaaagtcaccggcaacgaaatcgacaccaagcacctgccgtcaacagcaccgacaagaaaatcgacaccaaactag

SEQ ID NO: 36594 - DNA, 303 bp, Neisseria meningitidis
ttgggattcaataatcttgtttcgcttgccgcgttaattgaaaaggttttccctattcgatatacgcctgccggaatctctgtcttagatattatcttaaagcatgaatcatggcagaaagaaaatggacagcaatgttttgtccaattggaaattccggcacggattttaggcaggcaggcggaagagtggcagtatcggcaaggtgtatatgttcacgtcgaaggttttttggctcaaaaaagcagacgttccctgatgccgatgctcagaatacaaaatattaaagaatataaaggttaa

SEQ ID NO: 36595 - DNA, 618 bp, Neisseria meningitidis
atgaccttcccgcccctaaaatccccgctcaaattctacgccgtcgtccccaccgccgattgggtggggcgcatggtcaaagcaggtgccgacacggtgcaactgcgctgcaagaccctgcacggcgatgaattgaaacgcgaaatcgcccgctgcgtcgccgcctgtcaaggcagccgcacacagcttttcatcaacgaccactggcacgaggcaatcgaagcgggcgcatacggcgtacatctcgggcaggaagacatggacaccgccgaccttgccgccatcgccgccgccggtttgcgtttaggtttgagtacgcactccgtcgccgaactcaaccgcgccctgtccgtacatcccagctacgtcgccagcggcgcgattttcccgaccacgaccaaacaaatgcccaccgccccgcaaggcttggacaaactgtgcgagtatgtgaaacaggcaggcggcacgcccgtcgtcgccatcggcggtatcgacttgaacaacgcccgagccgtactcgccaccggcgtttcctcactcgccgccgtccgcgccgtaaccgaagcggcaaatcccgaagcggtggttaaagcgtttcaggctttgtgggatggataa

SEQ ID NO: 36596 - DNA, 621 bp, Neisseria meningitidis
atgcacggccattggcattgcgccgagaagcgcggttacagcggcgtggcggtgtacagcaaacgcaaacccgacaatgtgcaaatcggtatgggcattgaagaattcgacagggaagggcggtttgtgcgttgcgatttcgacaggttgagcgttatttcgctttacttgcccagcggcagcagcgcggaagaacgccagcaggtgaaataccgtttccttgatgcgttttaccctatgctcgaagcgatgaaaaacgaaggacgcgacattgtcgtttgcggcgactggaacatcgcccaccaaaacatcgacctgaaaaactggaaaggcaatcagaaaaattcaggtttcctgccggaagaacgcgagtggataggcaaggttatccacaagctcggttggacggatatgtggcgcacgctttatcccgatgtgccgggctacacgtggtggagcaaccgcgggcaggcgtatgcgaaagatgtcgggtggcgcatcgattatcagatggttacgcccgaacttgccgccaaagccgtgtccgcacacgtttataaagatgaaaaattttccgaccatgcgccgctggtcatggagtatgactatgctgccgaataa

SEQ ID NO: 36597 - DNA, 279 bp, Neisseria meningitidis
atgaagtgggtaactgtcgttttatccttcgcacttgtctgttgccaatacagcctctggttcggcaaaggcagcatcggacgcaacagcagtctgagagaacagattgccgttcaagaagaaaaaaaccagacactcgccctacgcaatcattcccttgccgccgaagtctatgatttggaaaacggtcaagaagccatttcggaaatcgcccgggtagaactgggttatatccaagacggtgaaaccttttaccgactcatcaggcataaccggtaa

SEQ ID NO: 36598 - DNA, 360 bp, Neisseria meningitidis
atgattaaattggatttaaaaagcataaatttatatgatattgattttgaaaaatttacccccgaaattccagataatttccatagatggatagatttggatatcggaatcgaaggagaacaaggctcatctattttttcactttgcatttgttctcctaaatggatttcccatcattgtaataaagaaggttttttttggtctaatgcattaatattagaacagtttgatcataagattattaaaagtgaaattgataaaatattagaatattgctcaaaagaaacttgggatttgacactttcaaacttattacgatttttttcttgggaattcgaagattacaatccaaacacataa

SEQ ID NO: 36599 - DNA, 201 bp, Neisseria meningitidis
atgtttgtctgcatctgcaatgccgttaccgaccatcaaatcaaggaaaccatcgccgccggcgcgaccacaatgggcgatttgcagtcgcaattgggcgtagcgagctgctgcggctgctgtggggagcttgccgcttcgtttctgacggcgcacaatgcgcaaccgacggttacggcgggtatcaatgttcaagcgtaa

SEQ ID NO: 36600 - DNA, 204 bp, Neisseria meningitidis
atggatacgaccctgaagcataaagccgaagcccttttgggcgagccgcttttagacgaacccgtccgccccgagtcgtgggaatgctgcggcagcgactgcggcgaggcgtgtattcagacaatgtattgggcggataaggcccgatatgacgcgcaacggcggaaattgaaagaagcgggttggtcggacgatgccgtctga

SEQ ID NO: 36601 - DNA, 357 bp, Neisseria meningitidis
atgttgtccgcttactttcccgtctttgtctttatcctcgtcggcctcgcggccggcgtgctgtttatcctgctcggcacgattttaggcccgaaacgccactacgccgaaaaagacgcgccttacgaatgcggttttgaagcctttgaaaacgccaggatgaagttcgacgtgcgctattacctcgtcgccatcctctttatcttgtttgatttggaggtcgcgttcatgttgccgtgggcagtcgtgttcaaagatttgggcgcgtacggcttctggtctatgctggtgtttatcgtcgttctgacggtaggctttgtttacgaatggaaaaaaggtgcgctggaatgggaatag

SEQ ID NO: 36602 - DNA, 525 bp, Neisseria meningitidis
atgtcattgaacaaagtcatccttatcggccgcctcggacgcgatcccgaagtgcgctatatgcccaacggcgaggcggtgtgtaatttcagcgtcgccaccagcgaaacatggaacgaccgcaacggccaacgtgtagagcgcaccgagtggcacaacatcacgatgtaccgcaaactggcggaaattgccgggcaatacctcaaaaaaggcgggctggtttatttggaaggcagaatccaaagccgcaaataccaaggtaaagacggcatcgagcgcaccgcttacgatattgtcgccaacgaaatgaaaatgttgggcgggcgcaatgaaaacagcggcggcgcaccttacgaggaaggttacggtcagagtcaggaggcttaccaacgccccgcgcagcaaagccggcagcctgcccccgacgcgccgtcccatcctcaagaagcaccagccgcgccgcgccgccaacccgtgccggccgccgccccggtcgaggatattgacgacgacatcccgttctga

SEQ ID NO: 36603 - DNA, 393 bp, Neisseria meningitidis
atgaacggtaaatactactacggcacaggccgccgcaaaagttcagtggctcgtgtattcctgattaaaggtacaggtcaaatcatcgtaaacggccgtcccgttgacgaattcttcgcacgcgaaaccagccgaatggttgttcgccaacccttggttctgactgaaaacgccgaatctttcgacatcaaagtcaatgttgttggcggcggcgaaaccggccagtccggcgcaatccgccacggcattacccgtgccctgatcgacttcgatgccgcgttgaaacccgccttgtctcaagctggttttgttacccgcgatgcccgcgaagtcgaacgtaaaaaaccgggtctgcgcaaagcacgccgtgcaaaacaattctccaaacgttaa

SEQ ID NO: 36604 - DNA, 459 bp, Neisseria meningitidis
gtgggaagacaagtgccgtctgaacggacgttcggacggcattcttttgttgatttgaatgaaaggaactgcatgacatatagtggattaaatttaaatcaggacaaggcaacgaagccgcagacagtacaaatagtacggcaaggcgaggcaacgctgtactggtttttgttaatccactatagattcaggcgcgagaggcgagaaactcagtcattgttgatgacgcgcaatacgttaaaattcattccgttttggtcgtataaacatattacatacgccatttttttgtattcaaggctgcctgaaaacagtgggcaagaatatctaacccaacgaaaagctgaaaaagcaacaaaaaataatctgcaccttagtcggttggttagtccaaccttaggggtgcagaccattcaatctttcaggctgcctttgtttgtttataagataaatttttag

SEQ ID NO: 36605 - DNA, 309 bp, Neisseria meningitidis
atgaccctgaaaaccgatttattgcctaaaatcaacaacgaagattatcaacgcctcatcctcaaacacagtgcggaatttagcggtggcgaaatccgcctgttgaacgaaatcctcgaaaaattcaatttcgacgttgttcaggcgcaggcattagcgcaagccgtcatgcagcaaatccgcttcgaccccaacgcctaccacatcgacagcgacgacgaagacaccaccggcatctgcccacactgcatcaacccgcctatgccgcccctgcgcgactatctcgtttggcgcgaaacgcgcggataa

SEQ ID NO: 36606 - DNA, 738 bp, Neisseria meningitidis
atgctgctgatacccgccatcgatttgaaagaaggacgctgcgtccgcctgagacaagggctgatggaagaggcgaccgtcttttccgattcgcccgccgaaaccgcactgcactggttcaaacaaggcgcgcgccgcctgcatctggtagatttgaacggcgcgtttgccggcgttccgcaaaacctgcccgccatcaaagacatccttgccgccgtcgccaaagacatccccgtacagctcggcggcggcatacgcgatttgaaaaccatcggacaatatttggatttgggtctgaacgacgtgattatcggcacggcggcggtcaaaaaccccgacttcgtgcgcgaggcgtgcaaagccttccctggcaggattattgtcgggctggatgccaaagacggtatggccgccatcgacggctgggcaaccgtaaccgggcatcatgtaattgatttggcaaaacgctttgaagacgacggtgtcaacagcatcatctacaccgacatcgggcgcgacggtatgatgagcggcgtgaacatcgacgcgacggtcaaactcgcccaagccgtccgcattcccgtcatcgcctccggcggactgaccggcttggacgacatccgcgccctgtgtgccgccgaaaaacatggcgtagcaggcgcgattaccggccgcgcgatttacgagggcagcatcgattttgcccaagcgcagcaactggcagattccctcgactaa

SEQ ID NO: 36607 - DNA, 132 bp, Neisseria meningitidis
atgcgtaatttcgacaaattggctgaagaagctgccgaacacgccgctgaaggcgcggtgaaattcatagaaggcaagcctgcgaaaaaaatcatcgccgtaccgggcagactggcgaacatcgtggtgtaa

SEQ ID NO: 36608 - DNA, 384 bp, Neisseria meningitidis
atgactttcgcctattggtgcatcctgattgcctgcctattgccgcttttttgtgcggcatatgccaaaaaagcgggcggattccggtttaaagacaaccacaatccgcgcgattttctggcgcacacgcaaggcacagccgcccgtgcccacgccgcgcagcaaaacggttttgaagcctttgcaccgtttgccgccgccgttttgacggcacacgcaaccggcaatgcggcgcaatcgaccatcaacacgcttgcctgcctgttcatcctgttccgcctcgcctttatctggtgctatatcgccgacaaagccgctatgcgctcactgatgtgggcaggcggatttgcctgcaccgtcgggctgtttgtcgcggctgcttga

SEQ ID NO: 36609 - DNA, 843 bp, Neisseria meningitidis
atgattcaacacgcaggcttgggctaccgccgcgacttggcggaagactttctctcgctttccgaaaacagcccgatatgctttatcgaagccgcaccggaaaactggctgaaaatgggcggctgggcacgcaaacagtttgaccgtgtggcggaacggctgccgctggcgttgcacggattgtctatgtcgctgggcgggcaagcaccgctggatactgatttgatagacggcatcaaagaaatgatgcgccgttacgattgcacgtttttctccgaccatttgagctactgccacgacggcggtcatctttacgatttgttgccgctgccctttaccgaggaaatggtgcatcatacggcgcggcgtatccgcgaagtgcaagaccgtttgggctgccgcatcgccgtggaaaacacgtcctactatctgcattccccgcttgccgagatgaacgaggtcgagttcctcaacgcggttgcacgtgaggccgattgcggcattcatctggacgtgaacaatatctacgtcaacgccgtcaatcacggcctgttgtcgccggaggcttttttgaaaaacgttgacgcagatcgcgtgtgctatatccatattgccggacatgacgtggaaacgccggaattgttgattgatacacatggcgcggcagttttgccgactgtttgggacttgctcgaacttgcctatgccaagctgccgacgattccgcccaccctattggaacgcgattttaatttcccgccttttgccgaactcgaagccgaggtcgccaaaattgccgactatcaaacgcgtgccggaaaggaataccgccgtgcagcctga

SEQ ID NO: 36610 - DNA, 1878 bp, Neisseria meningitidis
atgagccaagccttaccctaccgcccggacatcgacatattgcgcgccgccgccgtcttatccgtcatcgtgttccatatcgaaaaggattggctgccgggcgggtttctcggtgtcgatatattctttgtgatttcaggctttttgatgacgacgattcttcaccgcgaaatgtcggggggggggaggttttccctgaaggcattttatatccgccgcatcaagcggattctgcccgcatttttcgccgtattggcggcaacgctggcaggcggcttctttttattcaccaaagatgatttctttcttttatggaaatccgcgctgaccgccttgggtttcgcctctaacctgtattttgcaagggggaaggattatttcgatcccgcgcaggaagaaaagcccctgctgcacatctggtctttgtcggtcgaagaacaattttactttgtctttccgatactgctgctgcttgtcgcccgcaaaagcctgcgcgtacagttcggcttccttgccgcactgtgtgccttaagccttgccgcctcctttataccttccgcgctcgataaatattacctgccccacctgcgcgcctgcgaattactgataggatcgctgaccgccgtgtggatgcggtaccggcaacagcggaatctcgccgtcggcagatgctgtgccgccgccggcgcattgttttccgcgtgcatactgtccgcctgcctgtttgcctattcggaacaaaccgcctatttcccggggcccgccgctttgattccctgtctggctgttgccgcgctgatttatttcaatcattacgaacacccgcttaaaaaatttttccaatggaaaattaccgttgccgccggtttgatttcctattcgctttatctgtggcattggccgatattggcctttatgcgctatatcggcccggacaacctgccgccttattcgccggcggcagcaatcgtcctgatggtggtactttccttgatttcttatttctgcatcgaaaagccgtttaaaaaatggaaaggttcgttcgcacaatccgttttatggatttatgccttgcctatgctcattttgggggcgggctcgtttttcgcgatgaggttgccgtttatggcgcaatacgaccgtttggggctgacgcgttccaacacctcctgccacaacaataccggcaaacaatgcctatggggggatacggaaaaacagccggaactgctcattttgggcgactcccacgccgaccattacaaaacattcttcgatgccgtggggaaaaaagaaaaatggtccgccactatggtttccgccgacgcttgcgcctatgtggaaggctacgcgtcccgcgtgttccaaaactgggccgcctgccgcgccgtttaccgctatgccgaagaacacctgccccggtatccgaaagtggttttggcgatgcgctggggcagccagatgcccgaaaacagccgctcccttgcctacgatgccggttttttccaaaaattcgaccgtatgctgcacaaactctcatccgaaaaacaagccgtttacctgatggcggacaaccttgcctcgtcttacaacgtccagcgcgcctatatcttgtcttcacgcataccgggttaccgccaaaccctgcgcccggacgacgaaagcaccctgaaagccaatgcacgcatcagggaattggcagccaaataccccaacgtctatattattgatgccgccgcctatatccccgcagattttcaaatcggcggattgccggtttactcggacacagaccacatcaacccttacggcggcacggaattggcaaagcgtttttccgaaaaacaacggtttctcaatacgcgccataaccattga

SEQ ID NO: 36611 - DNA, 642 bp, Neisseria meningitidis
ttgggtctgttgttggcgttggcgcgcctgattcacttggaaaaagccggtgcgccgatgcgcgtgctggcgtgggcgttgcgtaaggtttcgctgctgtatgttacgctgttccggggtacgccgctgtttgtgcagattgtgatttgggcgtatgtgtggtttccgtttttcgtccatccttcagacggcattttggttagcggcgaggcggcaatcgcgctgcgtcgcggatacgggccgctgattgccggttctttggcactgatcgccaactcgggggcgtatatctgtgagattttccgcgcgggcatccagtctatagacaaaggacagatggaggcggcgcgttctttggggctgacctatccgcaggcgatgcgctatgtgattctgccgcaggcattgcgccgtatgctgccgcctttggcgagcgagttcatcacgctcttgaaagacagctcgctgctgtcggtcattgctgtggcggagttggcgtatgttcagaatacgattacgggccggtattcggtttatgaagaaccgctttacaccgtcgccctgatttatctgttgatgacgactttcttaggctggatattcctgcgtttggaaaaacgttacaatccgcaacaccgctga

SEQ ID NO: 36612 - DNA, 720 bp, Neisseria meningitidis
ttgactttaacccgaaaaacccttttccttctcaccgccgcattcggcacacactcccttcagacggcatccgccgacgcagtggtcaaggcagaaaaactgcacgcctccgccaaccgcagctacaaagtcgccggaaaacgctacacgccgaaaaaccaagtcgccgaattcacgcaaaccggcaacgcctcgtggtacggcggcaggtttcacgggcgcaaaacttccggcggagaacgatacgatatgaacgcctttaccgccgcccacaaaaccctgcccatccccagctatgtgcgcgtaaccaataccaaaaacggcaaaagcgtcatcgtccgcgtcaacgaccgcggccccttccacggcaaccgcatcatcgacgtatccaaagccgccgcgcaaaaattgggctttgtcagccaagggacggcacacgtcaaaatcgaacaaatcgtcccgggcaaatccgcaccggttgccgaaaacaaagacatctttatcgacttgaaatctttcggtacggaacacgaagcacaagcctatctgaaccaagccgcccaaaacttcgccgcttcgacatcaagcccgaacctcgccattgaaaaacgccgttacgaatacgtcgtcaaaatgggtccgtttgcctcgcaggaacgcgccgccgaggccgaagctcaggcgcgcggtatggttcagacggtattgaccgccggttga

SEQ ID NO: 36613 - DNA, 222 bp, Neisseria meningitidis
atgcttaaaaccctgacttttgccgcactgcatttcaccaccgccttcagtgtaacctatgtgctgacgggcagtataggcgtatctggcgcggtcgcgctggtcgaccccctaatcaacaccgtcgttttctatagtggattaacaaaaaccagtacggcgttgcctcgccttgccgtactatttgtactgtctgcggcttcgtcgccttgtcctgattaa

SEQ ID NO: 36614 - DNA, 339 bp, Neisseria meningitidis
gtgttaaacgaatttgccgaacgcaactggcagtcggatttgcgctatgccgaagcctatatccgcagcaaaagccgcaaacacggttcattgaggctgaaacaggctttggcgcaacagggcatagatgaagaaaccagctgcaacctgcttcccgaccgctcaagcgaaaaactggccgccatagccgtgttgcgtaaaaaattcaaacaccccgccgccgacctcaaagaaaaacaaaaacaggcgcgtttcctcgcctatcgcggattcgatgccgataccgttcagacggcattgaaacacgcttgggacgaaaattgggaagacggctgctga

SEQ ID NO: 36615 - DNA, 1446 bp, Neisseria meningitidis
atgaactggtctgatttgaatttaatgcccgccatgcccgaaatcgtgctgcttgcgctgctggtgttattgttgctggcggacttgtgggtcagtgatgacaaacgccgttggacgcattacggcgcgttggcaacggtggcggttacggctgtggtgcagcttgccgtttgggaacagggcagcacgtcttcgttcaacggcatgtatattgcagacggtatgtcgcgtttggcaaaaatggttttatatgccttgacgtttgccctgtttgtttatgccaagccctacaaccaagtgcgcggtattttcaaaggcgagttttacactctgtcgctgtttgccctcttgggcatgagcgtgatggtgagcgcggggcattttttaactgcctatatcggtttggaactcttgtcgctcgccctttacgccctgattgccctgcgccgcgattccggctttgccgccgaagccgccttgaaatattttgttctgggcgcgctggcatccggcctgctgctctacggtatttctatggtttacggcgcaaccggttcgctggaatttgccggcgtgctcgcctcttccttcaatgaagaagcaaacgaatggctgttgaaactgggtctggtgtttatcgtcgtcgccgttgcgttcaaactcggcgcggtgccgttccatatgtgggtgcccgacgtgtatcacggcgcgcccacttctgttaccgccctggtcggcactgccccgaaagtcgccgccgtcgttttcgctttccgcatcctcgttaccgggctgggaaccgtgcatcatgactggtctctgatgtttgccctgcttgccgccgcctcgctgctggtcggcaaccttgccgctatcatgcagaccaatatcaaacgtatgctcgcctattccaccgtatcgcatatggggtttatcctgctggcgtttatggcgggcgcggtcggctttgcggcgggtctctattacgccattacctacgcgctgatggcggcggcagggttcggcgtgttgatggtgttgtcggatggggacaacgagtgcgaaaacatcagcgatttggcagggctgaaccaacaccgcgtatggcttgcctttttgatgttactggttatgttctctatggcgggcattccgccgctgatgggtttttacgccaaatttggcgtgattatggcactcttaaaacaaggctatgtttggttgtccgtatttgccgtcgtgatgtcgctgattggcgcgttctactacctgcgcgtggtcaaagtcatgtattttgacgaatccggccgcgcccatcccaccgtcggcggcaacaatgccgcaaaattccttttgagcgtcaacgcgctgctgttggtgctgtggggcattatgccgcaaaccgttatcgactggtgcgccaaggcgttggaaaacacgctgtaa

SEQ ID NO: 36616 - DNA, 186 bp, Neisseria meningitidis
gtggatgaagcactgttcgggatgcgtgcattgtatgcaaaagctgtcggcatgacaaattttctatttaaaatacaaacaattatcaaaagaaatagggcgtattccccgatgccttccaaatcaatgctctgtttcttatcgtttttttttgctgctaaaactaagaatccatctcatcaataa

SEQ ID NO: 36617 - DNA, 3921 bp, Neisseria meningitidis
ttgaactacattatcgccttttcaaactcgcctgaaaccgacttttcagacggcattcaaataaaaactgccaaacacggacacaccatgaccacgactaccgcccctcagcgtattcgggaaatcccctacaactatacttcctacaccgaccgcgaaatcgtcatccgattattgggcgacgaagcgtggcaaatcctgcaagacctgcgcggacagcgtaaaaccggacgttcggcacggatgctgtttgaagtgttgggcgatatttgggtagttgtgcgcaatccatatctggtcgatgacttgttggagcatccgaaacgccgcgccgcgttggtacgcgaaatgcgccaccgcttaaatgaaatccgcaaacgccgcgacgataatcggcaagtggatgtgttggttgccgcagcagaaaaagcagtcgagcgttttgatagcagttttgatgaaaccagccaaaaacggcggcagattttggagcgtttgagcaaaatcaccaagccgcacaatattatgttcgacgggctggcgcgggtaacgcacgttaccgatgcaaccgactggcgcgtggagtatccgtttgtcgtcgtcaatcccgacacggaggctgaaatcgcgcctttggtgcgcgccttaatcgagctggatttggtcattattccgcgcggcggcggcacgggttataccggcggcgcgattcctttggacgcaaacagcgcagtcatcaataccgaaaaactcgacaagcatcgtggtgttgaatacgttgagctggcaggcttggacggcaagcatccgattatccggtgcggcgcgggcgtggttacgcggcgggtggaagaaaccgcgcatcaggcaggtttggtgttcgccgtcgatccgacttctgccgacgcgtcatgcgtgggcggtaatgtggcgatgaacgcgggcggcaaaaaagccgtgctgtgggggacggcgttggacaacctcgcctactggaacatggttaaccctcaaggcgaatggctgcgtatcgagcgcgtgcgccacaatttcggcaaaatccacgacgaagaaaccgccgtgttcgacgttcacacgctggattcagacggcatcaatatcgttaaaaccgaacgcttggaaatccccggccacaaattccgcaaagtcggtttgggcaaagacgttaccgacaaattcttgagcggcctgcccggcgtgcaaaaagaaggtacagacggcatcatcaccagcgttgccttcgtgttgcataaaatgccgaaatacacgcgcaccgtgtgtatggagtttttcggtacggtcgccaccgctacgccttctatcgtcgaaatccgcgatttcctgcttgcccacgacagcgtgcggctggcgggtttggaacatttggactggcgttacgtccgcgccgtcggctacgcaaccaaagcggcgggcaagggacggccgaaaatggtcttgctggcggacgtggtttccgacgacgaagccgccgtagaggcagccgccgaacacatttgcgaacttgcccgcgcccgcgatggcgaaggctttatcgccgtgtctcccgaagcgcgcaaaaccttttggctcgaccgcagccgcaccgccgccatcgccaagcacaccaacgcctttaaaattaacgaagacgtggtcatcccactcgaaaggctcggcgagtattcagacggcatcgaacgcatcaacatcgagctttccatccaaaacaaactcaaactctgtgccgccttggagcaatatctttcgggcaaactccccatcgacaaaatgggaacagacctgccgaccgccgaactgttgggcgaacgcggcaaacacgcccttgcccacgtttccgccgtcaaagcgcgttgggaatggctgcttgccaacttggacgcgccgcttgccgactataaagcacgctatggcgcagccgtccacgccgcgcccgaagccaaagacaatgaaagttgctttattgccttccgcgatttccgcctgcgcgtgtctgtcaaagcggacgtaatgaagccgctttctgaaatcttcagcggcaaaaccgacaccaaaattatccaaggcttgggaaaaatccacgccaaaaccgtacgcagccgcgtctttgtcgccctgcatatgcacgccggcgacggtaacgttcacaccaatattccggttaactcagacgatgccgaaatgcttcagacggcataccgctcagtcgaacgcattatgaaaatcgcccgttcgcttaacggcgtgatttccggcgaacacggcatcggcattaccaagctcgaatttttaagcgacgaagaaatgcagccgttttgggactacaaaaaccaagtcgatcccaaacacaccttcaaccgtcacaaactgatgaaaggctcggacttacgcaacgcctacacgccgtctttcgagcttttgggcgcggaatcgctgattatggaaaaatcagacctcggcacgattgccgattccgtcaaagactgcctgcgctgcggcaaatgcaaacccgtctgctccacccacgttccgcgtgccaacctgctgtacagcccgcgcaacaaaatcctcggcgtggggctgttaaccgaagccttcttatacgaagaacaaacccgtcgcggcgtttccgtcaaacattttgaagaactggcagacatcggcgaccactgcaccgtgtgccaccgctgcgtcaaaccctgccccgtcaatatcgacttcggcgacgtaaccgtagccgtccgcaactaccttgccgattccggccacaaacgctttgcgccggcagcttcaatgggtatggcattcctaaacgcgaccggcccgaaaaccattaaaaccctacgtgccgcgatgatacaaaccggcttccccgcgcagaatttcgcctacaaaatcggcaaactgctgcccgtcggcacgaaaaagcaaaaagccgaacccaaggcaaccgtcggcaaagccccgattaaagaacaaattatccacttcatcaaccgtccgctgcccaaaaacgtgcctgccaaaacaccgcgctccttattgggcatcgaagacgacaaaagcatccccatcatccgcaatccggcttctccggaagatgccgaagccgtgttttactttcccggctgtggttcggaacgcctgttcagccaaatcggacttgccgttcaagccatgctttggcatgtcggtgtacaaaccgttctgccgcccggctatatgtgttgcggctatccgcaagacgcaggcggcaataaggctaaagccgaagaaatgagcaccaacaaccgcgtggctttccaccgtatggcgaacaccctcaactacctcgacatcaaaaccgtcgtcgttagttgcggtacctgctacgaccaactggaaaaataccgttttgaggaaatcttccccggctgccgcatcatcgacatccacgaatacctgctcgaaaaaggcgtgaaactgaacggcgtgaaaggtcagcaatacctctaccacgacccctgccacacccccatcaaaaccatgaacgccacccaaatggccagcagcctgatggggcagaaagtcgttttaagcgaccgctgctgcggcgaatccggtatgtttgcagtcaaacgaccagacatcgccactcaggtcaagttccgcaaacaagaggaaatcgagaaaaacctcaaagagctgccgcagggcgaacccgtcaaaatgctgacttcctgccccgcctgcctgcaaggtttgagccgctacgccgacgacaacaatatgcctgccgactacatcgtcatcgaaatggcgaaacacatcctcggcgaaaactggctggacgagttcgtcaaaaaagccaacaacggcggcgtggaaaaagtattgctgtaa

SEQ ID NO: 36618 - DNA, 288 bp, Neisseria meningitidis
atgaacacaataccgctccacaccatactcaaacttatggcgcatcccgaacgtatggcgatactgatccaactgttggacagcgaacgcaatatcgccgaactggcaaaatccttatccctgccggccaccgccgtttccggccatttgaaccgcctgagggcgggcggtctggtggactttacgcgttaccaccgcattatcgaataccgcctgatttccgaagacgcggcaacgattctgcggacaatccgcgatttggaaaacaaacgcgcggtatggtgttaa

SEQ ID NO: 36619 - DNA, 714 bp, Neisseria meningitidis
ttgaatttaatccacgatacattaccagttaacgtcctattgcttatgtgtacacgaaaacaacaaggtttcacgctaacagagctgctcatcgtgatggtcattgcagccattatggcgatgatagccctccccaatatgagccaatggattgcatcgcgccgcattgccagtcacgcggagcggattgccaaccttttgcgtttctccaggggagaagccgtccggctcaatcttcctgtctatatctgtcctgttcaagttaaaaaaggcggtgcgcccaacaataaatgtgactccggcaagaaggggcagggaatgttggcttttggcgataagaatggcaataagacatatgacggcgatacggtggatgttctcctccgcagtgtggtattgaatgatgatatcaatgataagcggattaattatgccttcaaccatatcgctttcggtcagactcagccgaccgctgaccgtgttgtttggacgttcaatcaaaacgggacgttcggttatacgaataaccagcatcttacaaaacaatccagcttttcttattccgacggttatattcaaatcgtgctgacagatgcgagagcagtttcagatgccgataagaaattccgttcggcggtggttttgattgacagcagcggcagggttgaggtttgtcctagaaacgataggcgtaccgtatgccaatataaatga

SEQ ID NO: 36620 - DNA, 669 bp, Neisseria meningitidis
atgaagacttttaaaaatatattttccgccgccattttgtccgccgccctgccgtgcgcgtatgcggcagggctgccccaatccgccgtgctgcactattccggcagctacggcattcccgccacgatgacatttgaacgcagcggcaatgcttacaaaatcgtttcgacgattaaagtgccgctatacaatatccgtttcgagtccggcggtacggttgtcggcaataccctgcaccctacctactatagagacatacgcaggggcaaactgtatgcggaagccaaattcgccgacggcagcgtaacttacggcaaagcgggcgagagcaaaaccgagcaaagccccaaggctatggatttgttcacgcttgcctggcagttggcggcaaatgacgcgaaactccccccggggctgaaaatcaccaacggcaaaaaactttattccgtcggcggtttgaataaggcgggtacaggaaaatacagcataggcggcgtggaaaccgaagtcgtcaaatatcgggtgcggcgcggcgacgatgcggtaatgtatttcttcgcaccgtccctgaacaatattccggcacaaatcggctataccgacgacggcaaaacctatacgctgaaactcaaatcggtgcagatcaatggccagtccgccaaaccgtaa

SEQ ID NO: 36621 - DNA, 2331 bp, Neisseria meningitidis
ttggttgccattgctattttggtaacgtatccgaaactgccgtctttggattctttgcagcattaccagcctaaaatgccgttgactatttattcggcggatggggaagtcatcggtatgtatggggagcagcggcgcgaatttacaaaaatcggcgatttcccagaggtgttgcggaatgcggttatcgccgccgaggacaaacgcttttaccggcattggggggtggatgtttggggtgttgcccgcgctgccgtcggcaatgtcgtgtccggcagcgtgcagtcgggtgcgagtacgattacgcagcaggtggcgaaaaatttttatttgagcagtgaaaaaacgttcacacgcaaattcaatgaggtgttgcttgcctataaaatcgagcagtctttaagcaaagacaaaatcctcgagttgtatttcaatcagatttacctcggtcagcgcgcctatggttttgcatctgccgcgcaaatctatttcaataagaatgtccgagatttgactttggcggaagccgccatgcttgcgggactgcccaaggctccgtctgcctataatccgattgttaatccagaacgtgccaagttgcgccagaagtatattttgaacaatatgctcgaggagaagatgattaccgtgcaacagcgcgatcaggcgttgaatgaggaactgcattacgagcggtttgttcggaaaatcgatcagagtgctttatatgtggcggaaatggtgcgtcaggaactgtatgagaaatacggtgaagatgcctatacgcagggttttaaggtttataccacggtccgcgccgatcatcagaaggtggcaaccgaggcattgcgcaaggctctacggaatttcgatcgcggcagcagctaccgcggtgcggaaaactatatcgatttgagtaagagtgaagatgtcgaggagactgtcagccagtatctgtcgggactctataccgtcgataaaatggttcccgccgttgtgttggatgtgactaaaaagaaaaatgtcgtcatacagctgcccggcggcaggcgggttacgcttgacaggcgcgccttgggttttgcggcccgcgcggtcaataatgaaaaaatgggggaggaccgtatccgcaggggcgcggtcatccgtgtcaaaaacaacggcgggcgttgggcggtggttcaagagccgttgctgcagggggctttggtttcgctggatgcaaaaaccggagctgtgcgcgcgctggtcggcggttatgattttcacagcaaaacattcaatcgtgccgttcaggcaatgcggcagccgggttcgacctttaagccgtttgtctattcggcggcattatctaaggggatgaccgcgtccacagtggttaacgatgcgccgatttccctgccggggaaagggccgaacggttcggtttggacacctaaaaattcagacggcagatattccggctacattactttgagacaggctctgacggcttccaagaatatggtttccatccgtattttgatgtctatcggtgtcggttacgcgcaacagtatatccggcgtttcggcttcaggtcgtccgagctgccggcaagcctgtctatggctttaggtacgggcgagacaacgccgttgaaagtggcggaggcatatagcgtatttgcgaacggcggatatagggtttcttcgcacgtaatcgataagatttatgacagagacggcaggttgcgcgcccaaatgcaacctttggtggccgggcaaaatgcgcctcaggcaatcgatccgcgcaatgcctatattatgtataagattatgcaggatgtggtccgtgttggtacggcaaggggggcagctgcgttgggaagaacggatattgccggtaaaacgggtacgaccaatgacaataaggatgcgtggtttgtcggttttaaccctgatgtggttactgccgtatatatcggcttcgacaaacctaagagtatggggcgtgtcggctacggcggtacgattgcggtgccggtttgggtggactatatgcgttttgcgttgaaaggaaagcagggcaaggggatgaaaatgcctgaaggtgtggtcagcagcaatggcgaatactatatgaaggaacgtatggtaaccgatccgggcttgacgctggacaacagcggtattgcgccgcaaccttcccgacgggcaaaagaagatgacgggggcgcggcagaaggcggacggcaggcggcggatgacgaagtccgccaagatatgcaggaaacgccggtgcttccgagtaatactggttccaaacagcagcagttggattctctgttttaa

SEQ ID NO: 36622 - DNA, 225 bp, Neisseria meningitidis
atgaggctggcaaccaaggatttggcggaagccattaaacgaggagaagtacgtagttctgcttttacaacaaagcaactaaaggcaatcgaaaaaggagaatctaaaataccggattacacttggcatcatcatcaagacactggaaggatgcaattgattaatgaagacttgcatcatgataccggccatatcggttggagagcgatgagtaaaggaaagtaa

SEQ ID NO: 36623 - DNA, 687 bp, Neisseria meningitidis
atggaaacctttaaagacagactggtttttttatggaaaagcgaagcgaagcaggcaaaaatcgcatccgatattgaaatgacgattgcgggcttcagcaggatatggaatgaaggcggtctgccgaagtctgaaacattaaaaaaaatcaagcagttgaaggggtgtagtatcgattggctgctgaccggggagggtaatccgtttccggatgaagccccaaaaaaatcccttgcttacgataccttgggcaatgaagtcgatacggacgagtttgtctttgtgccgagatatgatattcgggcggctgcgggatacgggcagtttgtcgatcatgaggaaccggtatttacaatggcgttcagacggcattggattgagaattatgttacccgcgatacgaaaaacctgtctgtaatttccgtcaagggggattcgatggagggggttttgaatgacggcgattcgattttggtcaatcatggtgaaaatacgccgagggacggtctgtatgtgttgcggattaatgaaaatctgctggttaaacgtttacagattgtaccgggcgggattatcaatgtgatttctgcaaacgaggcttatcctgcttttgaaatcaatttgaacgatttgaccgatgatgtggagattatcgggcgtgtcgagtggttcggcaggacgatttga

SEQ ID NO: 36624 - DNA, 1233 bp, Neisseria meningitidis
atggctaaaaacggaggattttctttgttcgcaaagaaagaaaaacgctttatctttgaaggcaggcattccgcctccgacaaactggtcaacggcgaagtatccgcgtttaccgaagaagaggcgcgcaaaaaactggcaaaacgcggcatccgcccgttgcagattacccgtgtgaaaacaagctccaagcgcaaaatcacacaagaagacatcaccgttttcacccgccagctgtccacgatgattaaagcgggcctgccgctgatgcaggcatttgaaatcgtggcgcgcggacacggcaacccgtctatgacggaaatgctgatggaaatccgaggcgaagtggaacagggcagctcgttgagccgcgcattctcaaaccacccaaaatatttcgaccgcttctactgcaatctggttgcggcgggcgaaacgggcggcgtattggaaagcctgctggacaaattggcaatttacaaagaaaaaacccaggccatccgcaaaaaggtaaaaaccgcactgacctatccggtatccgtcatcgccgtcgccatcggtttggtattcgtgatgatgattttcgtactgcccgcctttaaagaagtttacgccaatatgggcgcggagcttcccgcactgacccaaacagtgatggatatgtccgactttttcgtctcatacggctggatggtgctgatcgcactgggctttgccatatacggcttccttaaattgaaggcgcgttcgattaaaatccaacggcgtatggatgccatactgctgcgtatgccgattttcggagacattgtccgcaaagggacgattgcccgctggggcaggacgacggcgacgctgattgcggcaggcgtgcctttggtcgatgtattggactccactgccggcgcggcgggcaatttaatctatgaagaagccacccgggaaatccgtacgcgcgtcatccaaggtttgtctatgacttcggggatgcgtgcgacggaactgttccccaatatgatgttgcagatgtcttccatcggcgaggaatcgggttctttggacgatatgctcaacaaagccgccgaattttacgaagacgaggtggacaatgcggtcggcaggctgtccgctatgatggagccgatcattatcgtgattttaggcttggtcatcggcacgcttctggtcgccatgtatctgccgctgtttaatttgggcaacgtggtcgcctga

SEQ ID NO: 36625 - DNA, 1392 bp, Neisseria meningitidis
gtgtccgccgcccgaatattaacgaaagtaaatatgaaaccactggacctaaatttcatctgccaagccctcaagcttccgatgccgtctgaaagcaaacccgtgtcgcgcatcgtaaccgacagccgcgacatccgcgtaggcgatgtgtttttcgcattggcgggcgggcggtttgacgcgcatgattttgttgaagacgtattggctgcgggtgcggcggcggttgtggtttcgcgcgaagattgcgttgcaatggatggcgcgttgaaagtcgatgacacgcttgccgcattgcaaacgctggcaaaggcgtggcgcgagaatgtgaacccgtttgtgttcggtattaccggctcgggcggtaagacgacggtgaaggaaatgttggctgcggtattgcgccgccgtttcggcgataatgccgttttggcgacggcaggcaacttcaacaaccacatcggattgccgttgactttgttgaaattaaacgaaaaacaccgctatgccgtgattgaaatgggtatgaaccattttggcgaactggcggttttgacacaaatcgccaaacccgatgccgcattggtcaacaacgccatgcgcgcccatgtcggctgcggtttcgacggagtgggcgatattgccaaagcgaaaagcgagatttatcaaggcttatgttcagacggcatggcgctgattcctcaagaagatgccaatatggctgtcttcaaaacggcaacgcttaatttgaatacgcgcactttcggcatcgatagcggcgatgtccacgcggaaaatatcgtgctgaaaccgttgtcgtgcgaatttgatttggtgtgcggcgacgaacgcgccgccgtggtgctgcctgttcccggccgccacaatgtccacaacgccgccgctgccgccgcgctgtctttggctgcgggtttgagtctgaacgatgtggcggaaggtttgcaaggcttcagcaacatcaaaggccgtctgaacgtcaaagccggcatcaagggcgcgaccctgattgacgatacctacaacgcgaaccccgacagcatgagggcagcgattgacgtgttggcgcgtatgcctgcgccgcgcatttttgtgatgggcgatatgggcgaactgggtgaggacgaagccgccgccatgcacgccgaagtcggcgcgtacgcccgcgaccaaggcatcgaagcggcttattttgtcggagacaacagcgtcgaagcggcggaaaaatttggcgcggacggtttgtggttcgccgccaaagacccgttgattcaagtgttgcgccacgatttgcccgaacgcgccaccgtgttggtgaaaggttcgcgctttatgcagatggaagaagtggtcgaggcattggaggataagtga

SEQ ID NO: 36626 - DNA, 303 bp, Neisseria meningitidis
atgggctatcgtgtcggcataaattgttttgatacaagattgcaggcagacgactatttattgtcgtcccttcctcctactgttacccaggacggaaaaatcatcaggccggaaagggtgggcgataaatggattttgaacggaaagccggttacgttgtcttatccggaatgttccaattttgagcagataaagcaaggttcttatgtcggttcgacggttctaattctgtttgtagtcatttacggtttcaggcttctgattaattttttaaaagacataggcaaggttgggactgattga

SEQ ID NO: 36627 - DNA, 1326 bp, Neisseria meningitidis
gtgcaaacagactggcaggtggtttttttgaagatttcggaagtattggtaaaagtgggcgacggtgtccacactctgctgctcgacaggccgattgtgcgcgacggcaggaaattcgacgcgccgcttttgtggatggtggtgctgatgacggcgttcagcctgctgatgatttattcggcttctgtgtatttggcatcaaaagaaggcggcgatcagtttttctatttgaccagacaggcggggttcgtcgttgccggcttgatagcgagcggttttttatggtttctttgcaggatgaggacatggcggcggcttgtgccgtggatttttgccctatccggcctgttgctggtagtcgtattgattgccgggcgcgaaatcaatggcgcgacccgttggatacctttgggtccgttgaatttccagccgaccgagctgttcaagctggcggtcatcctttatttggcaagcctgttcacgcgccgtgaagaagtgttgcgcagcatggaaagtttgggttggcagtcgatttggcgggggacggccaatctgatcatgtccgccaccaatccgcaggcacgtcgtgaaacattagaaatgtacggccgtttccgggcgatcatcctgccgattatgctggtggcgttcggtttggtgctgataatggtacagccggatttcggttcgtttgtcgtcattaccgtcattgccgttggaatgctgtttttggcaggattgccgtggaaatattttttcgtcctggtaggcagcgtcttgggcgggatggtgctgatgattaccgccgctccctaccgtgtgcagcgggtagtggcatttttggacccgtggaaagacccgcagggtgccggctaccagcttacccactctctgatggcaatcgggcgcggagagtggttcggtatgggtttgggtgcgagtttgagcaaacgcggctttctgccggaagcgcataccgattttatttttgccatcatcgccgaagaattcggtttcttcggtatgtgcgtgctgatattctgttacggctggctggtggtgcgggcgttttccatcggcaagcagtcgcgcgatttgggtttgactttcaacgcctatatcgcttcgggtatcggcatttggatcggtatccaaagtttcttcaatatcggtgtgaacatcggtgctttgccgaccaaaggtctgacgctgccgttgatgtcctatggcggttcgtcagtctttttcatgctgatcagcatgatgctgctgttgcgtatagattatgaaaaccgccggaaaatgcgcggttatcgggtggagtaa

SEQ ID NO: 36628 - DNA, 825 bp, Neisseria meningitidis
atggacggcgcacaaccgaaaacgaatttttttgaacgcctgattgcccgactcgcccgcgaacccgattccgccgaagacgtattaaacctgcttcggcaggcgcacgagcaggaagtatttgatgcggatacgcttttaaggttggaaaaagtcctcgatttttccgatttggaagtgcgcgacgcgatgattacgcgcagccgtatgaacgttttaaaagaaaacgacagcatcgagcgcatcaccgcctacgttatcgataccgcccattcgcgcttccccgtcatcggcgaagacaaagacgaagttttgggcattttgcacgccaaagacctgctcaaatatatgtttaaccccgagcagttccacctcaaatccattctccgccccgccgtcttcgtccccgaaggcaaatcgctgaccgcccttttaaaagagttccgcgaacagcgcaaccatatggcgattgtcatcgacgaatacggcggcacatccggcttggtcacctttgaagacatcatcgagcaaatcgtcggcgaaatcgaagacgagtttgacgaagacgatagcgccgacaatatccatgccgtttcttccgaacgctggcgcatccatgcagctaccgaaatcgaagacatcaacaccttcttcggcacggaatacagcagcgaagaagccgacaccattggcggcctggtcattcaagagttgggacatctgcccgtgcgcggcgaaaaagtccttatcggcggtttgcagttcaccgtcgcacgcgccgacaaccgccgcctgcatacgctgatggcgacccgcgtgaagtaa

SEQ ID NO: 36629 - DNA, 1392 bp, Neisseria meningitidis
atgcaattgtttttagacaatctcaaagccttttttgaaaccatcagcggctgggtctggggacctgtcatgttggtattgctggtcggtacgggcattttgctgaccgttttgctgaaaggcttgcagttcactatgttgggttatgcactgaaacaggcgtttgtgccgtcaaagaagcatgaagacggcgaagaccacgaaggcgatatttcccatttcgcggcgttgatgaccgcgctgtccgccactatcggtacgggcaacatcgccggtgtggcgactgcggtggtaaccggcggcccgggcgcggtattttggatgtggatgaccgccattttcggcatggccaccaaatacggcgagggcgtgttggcggtgaaataccgcgtcaccaattccaaaggcgaaatgtccggcggcccgatgtattacatcgaaaaaggcttgggcaaaaactggaaatggatggccgttgcatttgcgctgttcggcacattcgcttccttcggtatcggcagctcggtgcagtccaactcggttgcacaggcggtgcaaaccagcttcggtatcgaacctgcctataccggcattacgttgaccgttctgactgccgttgtcgttttaggtggtattaaaggcatcgccaaagccgcttctttcatcgtgcctgctatggcggtgttttatgtgttgggcggtctttccattatcgcgattaattccgatgcactgatgcctgccgtcaagctgattttctccgatgcgttcagcgcgcaggcagtggcgggcggtgctatcggtacggtcatccgctacggcgtggcgcgcggcgtgttctccaatgaggcaggtatgggttctgcgcctattgccgccgcagccgcgaaaaccgaccatcccgtccgtcaggccttggtttctatgaccggtacgtttttggataccatcgtcgtttgctcgattaccggcatcgtgttggtaatgggactgctcggcgcgggcggcgagtttgtcaaacctgaagtgagcggcgcggcactgacaaccgtcacattccaaaaaatgctgcccggcatcggcggctggattgtcaccatcggcctgattttctttgcctactcaaccattttgggctggtgctattacggcgaaaaatgcgcggtgtatgttttcggcgagaaatttgccggtttgtaccgcgtcggttatgtttcttccgttatgctaggtaccgtgttgagccttgatttggtgtggctggcttcggacacattcaacggcttgatggcattgcccaacctgattgcacttttattgatggcgaaagtcatcgtcaatgaaacgcgcgacttcaaacaaaaaatcacaaacggcgaattgccgcattaa

SEQ ID NO: 36630 - DNA, 1041 bp, Neisseria meningitidis
atgaaagcaatggtttatcacggcgcaaacgacatccgttttgaagaaaaaccccgtccgcagattatcgatccgaccgatgcggtggtgaaaatcgtcaaaaccacgatttgcggtaccgacttgggtatttggaaaggcaaaaaccccgaagttgccgacggccgtattctcggtcatgagggcatcggtattgtagaagaagtcggcgaggctgtaaaaaacatcaaagtcggcgataaagtcattatttcatgcgtcagcaaatgttgcacttgcgacaactgcaaaacccaactctattcacactgccgtaacggcggttggattttgggttacatgattgacggtactcaggccgaatacgtccgcacgccttatgccgacaacagcctcgttccgctgcccgataatgtcaacgaagaaatcgccctgttgttgagcgacgctttgccgaccgcccacgaaatcggcgtgcaatacggcgatgtcaaacccggcgacaccgtattcatcgctggggcaggccctgtcggtatgtccgccctgttgaccgcccaactgtacagtcccgccgccatcatcgtttgcgatatggacgaaaaccgtttgaaactggcgaaagaattgggtgcgacccataccattaaccctgcttccggcgaagtatccaaacaagtctttgccatcgtcggcgaagacggcgtggattgcgccatcgaagccgtcggtatccctgctacatggaatatgtgccaagacattgtgaaacccggcggccatatcgctgtggttggtgtacatggtcaatccgttgatttcaaactggaaaaactctggattaaaaacctcgccattactaccggtctggtaaacgccaataccaccgaaatgctgatgaaggcgatttccagcagctccgtcgattacaccaaaatgctgacccatcatttcaaattcagtgaattggaaaaagcctacgacgtgttcaaacacgccgccgaaaaccaagtgatgaaagtggttttggaagcggattaa

SEQ ID NO: 36631 - DNA, 852 bp, Neisseria meningitidis
atgaacacgttgaaatttaccaaaatgcacggtttgggcaacgattttatggtgattgacgcggtcagtcaggattttacccccgaggacgcgccgattgcggcatgggcggaccgcttccgaggcgtgggcttcgaccagcttttggtggtcgggcgttcggaaaccgaaggcgtggatttccgttaccgtattttcaatgccgacggcagcgaggtcgggcaatgcggcaacggagcgcgttgttttgcccgttttgttgcagacaagggtttgaccgataagaaagaaatttgtgttgaaacggcaaatggcgttatttttccgaaattgtccgataacggcatggttacggtcaatatgggcaaaccgaagtttatgccgtctgaaataccgtttgtccccgaatcgggcgagggggatgatgcctgtatttacggggtgcatctcgaatccggcattcagcctgtcagctgcgtcaatatgggcaacccccatgcggtgattgtggtcgatgacgtagaatgcgcgccggtgcgcgaaaccggttcgcttatcgaaccgcacaggcagtttcccgaacgcgtcaacgtcggctttatgcagattgtcagccgaaccgcgattcgtttgcgcgtgttcgagcgcggcgtgggcgaaacccaagcgtgcggtacgggcgcgtgtgcggctgtggtggcgggtatccgtctggggttgttggatgaagggaaaacggtagaggtgattttgccgggcgggactttatatatcgaatgggcctgcggcggcgatgtgatgatgaccggccctgcggaagcggtgtttgaaggcgagttggcgtattcatga

SEQ ID NO: 36632 - DNA, 1074 bp, Neisseria meningitidis
atgagcattactattcaaaatctaaataaacacttcggagcgttccacgcgctgaaaaacatcaacctcaacgtccccaccggcaaactcgtttccctactcggcccttcaggctgcggcaaaactacacttttacgcattatcgccggactggaaaacgccgacggcggcaatattctctttgacgggcaagacgtaaccgccaagcatgtacgcgagcgcaaagtcggcttcgtgttccaacactacgccctcttccgccacatgaacgtgtttgacaacgtcgctttcggtttgaccgtattgcccaagtccgaacgcccgtccaaaggacaaatccgcgccaaagtcgaagaattactcaagctcgtgcagctctctcatttggcaaaatcctatccgcaccaactctccggcgggcaacgccagcgcatcgccctcgcccgcgcgcttgcggtcgaacccaaactcttgcttttggacgaacccttcggcgcgttggatgccaaagtacgcaaagaattacgcacctggctgcgcgacatccatcacaacctgggtgtaaccagcattctggttacgcacgaccaagaagaagccctcgaagtttccgacgaaatcgtcgtgatgaaccacggcaaaatcgaacaaaccggcagcgccgaagctatttaccgcaaacccgaaaatgccttcgttaccgagttcctcggcgaaaccgacgcttttgaaggacgcatcgaaaaaggcttctggcattacaacggcttcgcgtggaaattggacgcacaatacaaatggcaggagcaaaccgccatcggctacatccgtccgcacgaatggcagatcgccgccgaacacgaaacaccgatgatttgtgccgaaatcgaaaaaatccacgccgtcggcgcattgacgcatattctggtaaaacacgacaaacaggacgtacatatcacgctggctggcagcgatgccgcgcgttacccaatcgccgaaggcaaagaattgaagctgattccaaaacaggtttatgtcttttctcaaaacgagctgattgaatattcgatttaa

SEQ ID NO: 36633 - DNA, 354 bp, Neisseria meningitidis
gtgaacagacaaaccgcttacctccttacctctttcagcctgatcgcactgataatcctgtcccttgcttgggaactgtggattgcaccgttgcgcccgggcggctcgtggctcgcgctcaaagccctccccctctgtctgccgctttcaggcatcttgaaaaagaaaatctatacttaccaatacagctccatgctggttctgatttattttgccgaagccgtcatgcgcctgttcgacgcctatccggcagaacaaatttgcgccgcgctttccgcagtattcagcatcatcttcttcatatcatgcctgtcgttcgtcaaacaatacaaggaaacaaacaatgcccgctga

SEQ ID NO: 36634 - DNA, 1155 bp, Neisseria meningitidis
atggatacgcacacggacgaaacaaaacttcaaaacacgcaagccaaacgcaaacgctgcctgacggcattgacgctgctgttcgcgcttgccgccgcagccgccgggtcggcgttttttttatggtggcagcacgaagaggaaacggaagacgcttatgttgccggacgcgtggttcaggttacgccgcaaaagggcggtacggtgcggaaggttttgcacgacgatacggatgccgtgaaaaaaggcgacgtgctggcggtattggacgacgataatgatgtgctggcttacgagcgggcaaaaaacgagctgattcaggcggtgcggcaaaaccgccggcaaaatgccgccacttcgcaggcgggggcgcaggttgccttgcgccgggcggatttggcacgtgcgcaggatgatttgcgccgccggtctgctttggcggaatcgggcgcggtgtccgccgaagagctggcacatgcccgtgcggcagtgtctcaggctcaggcggcggtcaaagcggctttggcggaagaatcttcggcacgcgcggctttgggcggtcaggtttctttgcgcgaacagccggcggttcagacggcaatcggcaggttgaaagatgcgtggttgaaccttcagcggacgcaaatccgcgcgccggcggacggtcaggtggcgaagcgttcggtgcaggtcgggcagcaggtggcggcaggcgcgccgctgatggcggtggtgccgctgtcggatgtgtgggtggatgccaattttaaagagacgcagttgcggcatatgaaaatcggacagcctgccgaactggtgtccgatttgtacggcaaacaaattgtttatcgcggcagggtggcagggttttcggcaggtacgggcagcgcgttttcgctgattccggcgcaaaacgcaacgggcaactggattaaagtggtgcagcgcgtccccgtccgtatcgtgctgaaccgcgaagatgtggacaggcatccgttgcgtatcggtttgtcgatgacggttaaagtggatacttccgccgcaggcgcgcctgtttcaaaaacgccgggtgcggcattgccggaaatggaaagtaccgactggtcggaagtcgatcggacggtcgatgaaatcctcgggcaatccgcgccctga

SEQ ID NO: 36635 - DNA, 1530 bp, Neisseria meningitidis
gtgccggacgtgtccaacatcaaaaattcatatgatgatttgatgtatgaatccaaagcattttcccaaaccgccatcaacgccttggaggctcgcgcccgcatgatgggcctgaagcctgcagcagcggcaaaagccaaggtcttggagctgggctgttcgatgggcggcaatatcatcacgcaggctctttattacccggatgcggaatttgtcggtatcgacttgtccggcaggcaggttgcgcagggcaacgccatcattgaaaaaatgggcttgaaaaatgtgcgtctggaagaaaaagatattttgaccatcgatgagtcattcgggaagtttgactatatcatcgtccacggcatttggtcgtgggtgcctgacgcagttaaagacaaaattttttcgatttgccggaacaacctgaccgaacacggcattgcctatatttcatacaatgtttacccgggctggaaacggcaggagcagttgcgcgaaattatgtactttgccggcagggatgtgcttgaagaacccttggaagcgcggacgcggaaaggcttggacgcgctcaaggcgctggcggaaattttggaaaacgacaagggcttggacggcggcggcaaacttccggcgattcaaaaaatattgaatcataatttttattacatcgcacacgaatatatggaggcgtttaacgacccgatttacgtcaacggcttcatcgaatgggctaatcgccacaggctcgcatatatcggggataccgatttgcacgcgtcttttgtttcttggatggcggagcatacgcgggagcggattctggcattggcagggggcgattatattgccaaagaattttatagcgatattttatccgaccgccaattccgccgttcgcttttatgccgtgaggaagtcggggacaatatcaggcgcgatgagtcggttgccgtcgaagtgatagaaagtttgaatttccgcccggcaagaggggaaacaatcaactttgatgaaaatgataccctgctttcgggcatacgcgatgtgatgaaaaccggagaggcgtttaaaacggaagatgttgcggaaaacctcgcccgccgatttcccggtctggaatttgaccgtatgaaaatcaattcccagcttttattgcaaaccattctcgggcgtttttctgtttcatcagacaatgcgggcaaaccattttttgaagaccataaaacctatgtgccggcgcgttttacagattatgccgccgcctttgtggaacacggcgcggaagcgtttgtccggcctgccaaccgttacaacgaaagcaccccctcattcggatacgggcatttgtacattatgcggcaattgtcgcggccgacgagcaaacaggcggtgatagatgcggttgctgaaaacttgaacatcgtcagcaccacgcccgacggtttgacattccatccgcctgccgaagtgtatgtggaagaaatattggcagacttggcagacaggcattttctcgtttcggcggattga

SEQ ID NO: 36636 - DNA, 450 bp, Neisseria meningitidis
atgagtatttatgccgtcgcgcacatcgtccacctgtattgcgccatcgcctttgtcggcggcgtgttttttgaagtgctggttttgtccgtcctgcatacgggacgggtgtcgcgcgaggcgcggtgcgaagtggaaaaggcaatgtcttaccgcgccgtcagggtgatgccgtttgtggtcggactgctgttcgccagcggcatcgtgatggcggcaaaccgctatctttctatattgggcgaaccgtttgccacttccttcggtacgatgctgacgctgaaaatcctgttggcgttcagcgtgttggcgcacttcgccatcgccgtcgtcaaaatggcgcattccacgctgaccgtcggctggtcgaaatacatacacgccgtcgtctttacccatatgctgctgattgtctttttggcaaaagcgatgttttatatcagctggtaa

SEQ ID NO: 36637 - DNA, 543 bp, Neisseria meningitidis
gtgccgaagaaggtctggaaatcgcccgcgccgccggcgtatcggtttgacgttcagacggcatcaggaagaaacgctatgaaatgcccgttttgcgcccaccccgacacccgcgtcgccgattcgcgtctgatggaagaacgcaacgccgtgcgccgccgccgccactgccccaactgcggcaaacgcttcggcacgctcgaaaccgccgaactcaaaatgcccgccgtcatcggtccggacaaaaaacgctcgccctttaatgcacaacgcctccgcaacgacctgaccgccgccgcccgaaaatccgccctgacacccgaacagatcgacgaaaccgtccgcctgacggaacacaggctctacacttcgggtcagcgcgacatcccctctgccgcacttgccgacatggtgctaaaagaactgctccgacaagatacggaagccgccgtccgtttcgccgccctgcacaaacgcttcgacaatccggcagactttgcctcgtggctggcgcaagccgtcaaaacaggcggcaaagcctga

SEQ ID NO: 36638 - DNA, 708 bp, Neisseria meningitidis
ttggtcaaaacggcagacggctacaaagccattgcccatatccgagccggagaccgcgtcctttccaaggacgaggcaagcggagaaacgggatacaaacccgttaccgcccgatacggtaatccgtatcgggaaaccgtttacattaaagtttcagacggcatcggtaaaatacagaccctcgtttccaataaaatccacccgttttacagtcaaggaaaatggatacaggcaggtcgtctgaaaaaaggcgacaccctgctttccgaaagcggcgcaaaacagacggttcaaaacattaccttcaaacagcagccgctcaaagcctacaatctgaccgttgccgactggcatacttacttcgtcaagggtgatagggcggaaacggaaggggtttgggttcataatgattgtccgtatggagaaaaatataggacagaagttggttcttatactaatactcatgaaagtggtcgaacttattctggaaagggcacaagacaacgttcccaaatctctggagcaagagaagctagggttaataatgaccctcatatagctacagattttactcctgccaaaaataatcgagaggcattcaaagatgaatctagaagaattgacgctcacggtggttccaaaagtaccaataattacaatcgaattgaaagcccggggaaaaaataccgaaaacaagatggagattaa

SEQ ID NO: 36639 - DNA, 1245 bp, Neisseria meningitidis
atgaccctattttgcgaacaagtcccctacccccgccttgccgaagcattcggcacaccgctttatgtgtacagccaatccgcgctgaccgaagcatttgaacactaccaaactgcctttgccgagctctccccgctcgtctgctatgcggttaaagccaatggcaacctgagcatcatcaaacactttgcttctttggggagcggttttgacattgtgtccggcggcgaattggcacgcgttttggcggcaggcggcgacgcggcaaaaaccatattttcaggcgtaggcaaaagcgaggcggaaatcgagttcgcgctgaatgcaggcgtgaaatgcttcaatatggaaagcatccccgaaatcgaccgtattcagaaagttgccgcgcgtttgggtaaaaccgcgcccgtctccctgcgcgtcaaccccgatgtcgatgccaaaacccatccctacatctccacaggtctgaaagccaacaaattcggcatcgcctacgccgacgcgctcgaagcctaccgccatgccgcacaacagcccaatttgaaaatcatcggcatcgactgccacatcggctcccaactaaccgacttaagcccgctggtcgaagcctgcgaacgcattttgattttggttgacgcgcttgccgccgaaggcattgttttggaacatttggacttaggcggcggcgtcggcattgtttaccaaaacgaaaaagtgcctgatttgggcgcgtatgcccaagcggttcaaaaactgatcggcacacgccgtctgaaactcattcttgagcccggccgcagcttggtcggcaacgcaggcgcgttgttgacgcgtgtcgaattcgtcaaatacggcgaagagaaaaactttgtgatggtcgatgcggcgatgaacgatttaatgcgccccgccctatatgatgcctatcatcacatcgaagcggtagaaccaaaaaacatcgcgccgctgactgccaacatcgtcggcccgatttgtgaaaccggcgacttcctcggcaaagaccgcaccatcgcctgcgaagaaggggatttgctgcttatccgcagcgcgggcgcatacggagccagtatggcgagcaattacaacgcgcgcaaccgtgcggcggaagtgttggttaacggtggcggatacaaactcatccgccgacgcgaaaccttagaacagcaaatggcaaacgaactcgcctgcctgcaagccgaacatcaaaatgccgtctga

SEQ ID NO: 36640 - DNA, 1476 bp, Neisseria meningitidis
ttggacgaaaaccaaatcatcgccctgcgccgcgaaaaactgcacaacatccgccaacagcgcaacgcctatcccaacgacttcaaacgcgacagcttcgccgccgatttgcacgcccaatacggcgaaatcggcaaagaagaactcgatccgcaaggcattcccgtcaaagtggccggccgcatgatgctgaagcgtcaaatgggcaaggcgagctttgccaccattcaagacgtgtccgggcaaatccagctttatctgaacaacaaaggcgtgagccaagaagttttggacgacttcaaccattgggatttgggcgacatcgtcggcgcggaaggcactttgttcaaaaccaaccacggcgaactgaccgtacgcgtgtccggcatccgcctgctgtccaaatccctgcgccctctgccggacaaacataaaggcttgagcgatcaggaaaccaaataccgtcaacgctacgtcgatttgattgccaacgaagaatcgcgcaataccttcatcaaacgcagccaaatcatccaatccgtgcgtaattttatggtgggcgagcattatctcgaagtcgaaaccccgatgatgcacccgattcccggcggcgcgacggcaaaacccttcgttacccatcacaatgccttagatattccgctttatttgcgaatcgcccccgagctgtatctgaaacgcctggttgtcggtggtttggaacgcgtgtttgaaatcaaccgcagcttccgcaacgaaggcatgtccgtgcgccacaaccccgaattcaccatgatcgaattctacgaagccttctccgactacgaacgcatgatgcagatggcggaagacatcatccgcaacgcatcgcacacggtaaacggcacggcaaacatcacttacaacggcaaagaagtcgatttggaaagcccgtttgaacgcctgaccattctcgaagccatcaaaaaatacaatccgcactacaccgacgagcagttgaacgatgcggaatggctgaaaaaagaaatcgtcaaacacggcgaaagcctgccgccgtccccgggcatcggcagcctgcaactcgcgctgtttgaaggttgcgccgagggcaagctgtggaatccgaccttcatcgtcgattacccggtcgaagtttccccgttggcgcgcgcttcggataccaaacaaggtctgaccgaacgtttcgaattgttcgttgtcgggcgcgaactggcaaacggctattccgagttgaacgaccccgaagaccaagccgaacgcttcaaagcgcaagtggcgcaaaaagacgcgggcgacgacgaagcgatgcactacgatgccgactacatccgcgcgatggagttcggtctgccgccgaccggcggttgcggtatcggcatcgaccgcttggtaatgttgctgaccgattcgcaaaccatccgtgacgtgattctgttcccgcagatgcgccccgagtaa

SEQ ID NO: 36641 - DNA, 522 bp, Neisseria meningitidis
ttgctgccgcaaaccggtgtgccggaatatggagaaaaaagaccgatgcaaaaaatccccctgaccgtacgcggtgcggaattgctgaaacaggaattgcagcagcttaaaagcgtggcgcgccccgaagtgatcgaagcgattgctgaagccagatcgcacggcgatttgtccgaaaacgccgaatatgaagccgccaaagaacgccaaggctttatcgaaggccgcatttccgagctggaacacaaactttccgttgcccacatcatcaatccgaccgaaatccacgccgaaggcaaaatcgtgttcggtacgacggttacgctggaagatttggaaacggaagaacacgttacctatcaaattgtcggcgaagacgaagccgacatcaaacagggcaaaatctatgtcggctcaccgattgcccgcgccttaatcggcaaggaagagggcgatacggcggaagtccaagccccgggcggcgtgcgcgaatacgacattatcgaagtccgatatatttga

SEQ ID NO: 36642 - DNA, 867 bp, Neisseria meningitidis
atgaaagcaaaaatcctgacttccgttgcactgcttgcctgttccggcagcctgtttgcccaaacgctggcaaccgtcaacggtcagaaaatcgacagttccgtcatcgatgcgcaggttgccgcattccgtgcggaaaacagccgtgccgaagacacgccgcaactgcgccaatccctgctggaaaacgaagtggtcaataccgtggtcgcacaggaagtgaaacgcctgaaactcgaccggtcggcagagtttaaaaatgcgcttgccaaattgcgtgccgaagcgaaaaagtcgggcgacgacaagaaaccgtccttcaaaaccgtttggcaggcggtaaaatatggcttgaacggcgaggcatacgcattgcatatcgccaaaacccaaccggtttccgagcaggaagtaaaagccgcatatgacaatatcagcggtttttacaaaggtacgcaggaagtccagttgggcgaaatcctgaccgacaaggaagaaaatgcaaaaaaagcggttgccgacttgaaggcgaaaaaaggtttcgatgccgtcttgaaacaatattccctcaacgaccgtaccaaacagaccggtgcgccggtcggatatgtgccgctgaaagatttggaacagggtgttccgccgctttatcaggcaattaaggacttgaaaaaaggcgaatttacggcaacgccgctgaaaaacggcgatttctacggcgtttattatgtcaacgacagccgcgaggtaaaagtgccttcttttgatgaaatgaaaggacagattgccggcaaccttcaggcggaacggattgaccgtgccgtcggtgcactgttgggcaaggcaaacatcaaacctgcaaaataa

SEQ ID NO: 36643 - DNA, 1002 bp, Neisseria meningitidis
atgattgacggacaaacaaccgaacccaaacaaaaaacccgaatcatccttgcccctatgcagggtctggtcgatgacgtgatgcgcgacctgctgacgcgtattggcggctacgacgaatgcgtcagcgaatttgtacgcattacccataccgtgcattcccgatccatatggttaaaatatgtccccgaaatcgccaacggaaacaaaacgttttccggcacgccctgcaccgtccaacttttgggcagcgatgcggacaatatggcggcgaatgcgctggaagccgtccgcttcggtgcgaacaaaatcgatttgaacttcggctgccccgcgcccaccgtcaacaaacacaaaggcggcgcaatccttttaaaagagccggaactgatattccacatcgtcaaaacgctgcgcggacgtttgcccgcacatattccgctcaccgcaaaaatgcggctcggttacgaagacaaaagccgggctttggaatgcgcctgtgcgattgccgaagggggcgcatgcggactgaccgtacacgcgcgtaccaaagccgagggttacgaaccgccggcgcattgggaatggataaggaaaatccgagacagcgtcaatattcccgttaccgccaacggcgacgttttcagcctgcaagactatatcggcatcaaaacaatcagcggctgcaacagcgtgatgctcggtcgcggcgcggtcatccgccccgatttggcgcggcaaatcaagcaatacgagaacggcgggccggtcaaagacacggattttgccgaagtttccaaatggatacggcagtttttcgagctgtgcctgacaaaagaggcaaacaataaatacccgatcgcccgtcttaagcaatggttgggcatgatgaaaaaaacgttcgacccggcgcaaacgctgtttgaccgcgtccgaacggttaaggatgcggatgaagtccgccgaatcctgaacgcatttgagcatgagataaatgtttga

SEQ ID NO: 36644 - DNA, 225 bp, Neisseria meningitidis
atgaacagcgaaactttagacgtaaccagattgaaatgtcccctgccgattttgcgggcgaaaaaggctttggcgcaaatgcagcagggcgacgtgttgaccgttctggcaaccgacggcggcgcaccgggggattttgaggctttttgccgccaaaccggtcatgtgctgttggattcttccgaacaggacggcgtgttcacgctggtcgtcaagcacaaataa

SEQ ID NO: 36645 - DNA, 750 bp, Neisseria meningitidis
atgccatccgttgaactgctgttggagattgtcggactgccacgcggcaccttctattaccaattggccgtccaatcggcagaagacaaatatgccgatttgaaacagcatatccatgatatttatcgacgacataagggaagatacggctaccggaggattgcagcagccatccttcatgcaggaacaccggtcaatcacaagaaagtcagccgtctgatggcgaagacggggctgaaggcagtgatacggcggcgcaaataccgctcgttcaaaggagaagtcggcaaaattgcgccgaatatcctgcgacgctgtttccatgcagaaaagccgaatgagaaatgggtaacggacgttaccgagttcaatgtaggcggagaaaagatatacctttctccgattatggatttgtttaacggggaaatcgtcagttaccgtattcaaatccgcccgactttcgatttggccggcgagatactgaaaggtgcgccggagaaaccgggatcgtctgaaaagccgatactgcattcggatcaaggttggcaatatcagatgtttttttatagtggattaaatttaaatcaggacaaggcgatgaagccgcagacagtacaaatagtacggcaaggcgaggcaacgccgtactggtttaaatttaatccactatacaacaacgatagaatcaagttgaaattaaaagggctgagccttgttcagtacagaattcagtccctgaaagccgcttga

SEQ ID NO: 36646 - DNA, 2058 bp, Neisseria meningitidis
gtgcagcgcgctgaccgatgccggacagattgccgcctttatcgaagcgcactgacttcgttctgtaaaaagcagcctaccctcttcaggctgcttttcacgtccgaacggcggcagccccgtatttacgctataatccatcccgaccaaaccaccgacagcggctgccgttgcagttcccgccctaccgatatgatagaaaaactgactttcggactgtttaaaaaagaagacgcgcgcagctttatgcgcctgatggcgtacgtccgcccctacaaaatccgcatcgttgccgccctgattgccattttcggcgttgccgccaccgaaagctaccttgccgccttcatcgcccccctgattaaccacggcttttccgcacctgccgcgccgcccgagctgtctgccgccgccggcatcatttccaccctgcaaaactggcgcgaacagtttacctatatggtttgggggacggaaaacaaaatctggaccgtcccgctctttctcatcattctcgtcgtcatccgtggcatctgccgctttaccagcacctatctgatgacttgggtctccgtgatgaccatcagcaaaatccgcaaagatatgtttgccaaaatgctgaccctttcctcccgctaccatcaggaaacgccgtccggcaccgtactgatgaatatgctcaacctgaccgaacagtcggtcagcaacgccagcgacatcttcaccgtcctcacgcgcgacacgatgatcgttaccggcctgaccatcgtcctgctttacctcaactggcagctcagccttatcgtcgtcctgatgttccccctgctctccctgctctcgcgctactaccgcgaccgtctgaaacacgtcatttccgactcgcaaaaaagcataggcacgatgaacaacgtgattgccgaaacccatcagggacaccgcgtcgtcaagctgttcaacgggcaggcgcaggcggcaaaccggttcgacgcgatcaaccgcaccatcgtccgcctcagcaaaaaaatcacgcaggcaacggcggcacattccccgttcagcgaactaatcgcctcgatcgccctcgccgtcgtcatcttcatcgccctgtggcaaagccaaaacggctacaccaccatcggcgaatttatggcattcatcgtcgcgatgctgcaaatgtacgcccccatcaaaagccttgccaacattagcatccctatgcagacgatgttcctcgccgccgacggcgtatgtgcatttctcgacaccccgcccgaacaggacaaaggcacgctcgcaccgcagcgtgtcgaagggcgcatcagcttccgcaacgtcgatgtcgaataccgttcggacggcatcaaagccctcgacggcttcaacctcgacatcagacaaggcgaacgcgtcgccctggtcggacgttccggcagcggcaaatccaccgtcgtcaacctgctgccccgctttgtcgaaccgtctgccggcaacatctgcatagacggtatcgacatcgccgacatcaaactcgactgcctgcgcgcccaatttgccctcgtctcccaagacgtattcctgtttgacgacaccctgtttgaaaacgtccgatatagccgtcccgacgcgggcgaagccgaagtcctatccgccctccaagccgctaacctgcaaagcctgatcgacgcatcaccgctcggactgcaccagcccatcggatcgaacggcagcaacttatccggcggacagcggcaacgcgttgccattgcccgcgccattttgaaagacgcgccgatattattattggacgaagccaccagcgcattggacaacgaatccgaacgcctcgtccaacaggcgctcgaacgcctgatggaaaaccgcaccggcatcatcgtcgcccaccgcctgaccaccatcgaaggggccgaccgcatcatcgtaatggacgacggcaaaatcatcgaacaaggcacacacgaacaactgatgtcccaaaacggctactacacgatgttacgcaatatctcaaacaaagatgccgccgtccggacggcataa

SEQ ID NO: 36647 - DNA, 1017 bp, Neisseria meningitidis
atgaacacacgtcccttttatttcggacttatatttatcgcgattatcgctatatttgctaactatttaggaaacactgatttttcccatcattatcatatcagtgctttaattattgctatcttgctgggaatggcaatcggcaataccatttatccgcaattttcaacacaagtggaaaaaggcgttttgtttgccaaaggcacgcttcttcgcactggcattgtgctgtatggtttccgcctcacttttggcgatattgccgatgtaggattaaatgctgtcgttaccgatgcaatcatgctaatttcaaccttcttttttaccgtacttttaggcattcgttatctaaaaatggataaacaattggtttatctcactggggcaggttgcagcatttgcggtgcggcagcagtgatggcggcagagtctgttaccaaagcagaatcccataaagcttcagtggcgattgccatagtggtcattttcgggacgcttgctatttttacttaccccttgttctacacgtggtcacaagatttaattaacgcccatcaattcggtatttatgttggttctagtgtacacgaagtggctcaagtgtatgcgattggggaaaatattaatcctatcgtggcgaatactgccgtcatttccaaaatgatccgagtgatgatgctcgccccctttttattaatgctttcttggttattaacacgtagtgatggggtatcagaaaatacctcacacaaaattacaattccttggtttgctgtactttttattggtgttgccatttttaattcttttgatttattaccaaaagaactcgtgaaattattcgttgaaatcgattctttcttattaatttcatcaatggctgcgcttggcttaacgacgcaagcaagcgcaatcaaaaaggcaggattaaaaccgtttgttttaggaatactaacttatttatggctagtggttggtggatttttagtgaactatggaatatcaaaattaatataa

SEQ ID NO: 36648 - DNA, 495 bp, Neisseria meningitidis
atgtcttcatctgtttcaagtaaaacgcgctattgggtattggcacttgccgccatcgtgctggaccagtggtcgaagtgggcggtgctgtcgtcgtttcagtatcgggaacgcgtcaatgtcattccttcgtttttcgatctgaccttggtgtacaacccgggcgcggcgttcagcttccttgccgatcagggcggctggcaaaaatacttttttttggtgctggcggtggcggtgagcgcgtatttggtacgcgccatcttgcgcgatgagtttgcaaccctcggcaaaacgggtgcggcgatgattatcggcggtgcgttaggcaatgtcatcgatcgcctgatacacggtcatgtcgtcgatttcttattgttttattggcaaaattggttttatcccgcctttaatattgccgacagctttatctgcgtcggtgcggtgttggcggtgttggacaatatcgtccatcgcaaagatggcaaaaaaacgtga

SEQ ID NO: 36649 - DNA, 519 bp, Neisseria meningitidis
atgcgccttttcccgattgccgccgccctgtcgcttgccgcctgcggtactgtgcaaagcacacaatatttcgtgttgcccgacagccgctacatccgtcctgcaacgcaaggcggcgaaactgccgtcgaagtccgtcttgccgaaccgctcaaacgcggcggactggtctatcaaaccgacccctaccgcctcaacaccgcacaaaaccacgtttgggcggacaccttggacgatatgctcgaagcggcgttgagcaatgcattcaaccgtttggacagcacacgcatctttgttcctgcctcacgcagcggcagtaccgaaaaatggacggtctatattgacgcattccaaggcagctacacgggcaaaaccctcatcagcggctacgccgtcctacccgacggtacgaacagacccttccatatcgaaaccgaacagcagggtgacggctacgccgcgatgaccgccgcactcgaacagggactgaaacaggcggcgcaacagatggtcgagtaa

SEQ ID NO: 36650 - DNA, 1809 bp, Neisseria meningitidis
atgcgtaccaactattgcggcctgatcagcgagcaatacttagaccaaaccgttaccgtcaaaggctgggtacaccgccggcgcgaccacggcggtgtgatttttatcgacctgcgcgaccgcgaaggcatcgtccaagtcgtgatcgatcccgatacgcccgaagcgtttgccgctgccgattccgcccgtaacgaatatgttttgagcattaccggccgcgtacgcaaccgtcccgaaggtacgaccaacgacaaaatgatttccggcaaaatcgagattcttgccaaagaaatcgaagtcttgaacgctgccgctacacctccgttccaaatcgacgatgaaaatatcagcgaaaacgttcgcctgaccaaccgcgttatcgacttgcgccgtcctgccatgcaacgcaacctgcgcctgcgttaccaagttgctatgggcgttcgccgctacttggacgcacaaggctttatcgacatcgaaaccccaatgctgacccgctccacgcctgaaggcgcgcgcgactacctcgtgccgagccgcgttcatccgggcgagtttttcgctctgccgcaatctccgcaattgttcaaacaactgttgatggttgctggtttcgaccgttactaccaaatcaccaaatgtttccgtgacgaagacttgcgtgccgaccgtcaacctgaattcactcaaatcgacttggaaacctcgttcttgaacgaggatgaaatcatggacatcaccgaaggtatggcgaaacaagtcttcaaagatgctttaaacgtagatttaggcgacttcccgcgtatgccttacgccgaagccatgttctactacggctctgacaaaccggatatgcgtatcaacttgaaatttaccgagttgaccgacctgatgaaaacggaagaattcaaagtcttccgtggcgcggcagatatgaaaggcggccgtgtagtcgccctgcgcgtaccgaacggcgcaaaattcagccgcaaagaaatcgacgaatacactaaatttgtcggcatctacggcgcgaaaggtctggcatacatcaaagtaaacgatgtgggcaacctctcaaacggcgaagacagcggcctgcaatctccaatcgtaaaattcctgtctgagaatgccctgaaagaaatcatcgagcgtaccggcgcacaaaacggcgatattattttcttcggtgcggacaaaaccaaagttgtgaacgaagccatcggcgcattgcgtatcaaagtcggcttggaacacggcaaagacaacggctacttcacagacgaatggaaacctttgtgggttgtcgatttcccaatgttcgaatacgacgaagaagccgaccgctacgttgccgtacaccatccgtttaccgcgcctaaagaaggtcatgaagacctgatggtttccgaccctgcaaactgcctggcccgtgcctacgacatggtattgaacggctgggaaatcggcggcggctctatccgtatccaccgtgcagacgtacaagagaaagtgtttgccgcgctgaaaatcagccctgaagagcaacaagagaaattcggcttcctcttggacaacctgaaattcggtgcgcctcctcacggcggccttgcattcggcctcgaccgtttggttaccctgatgaccggcgccgaatctatccgcgacgtgattgccttcccgaaaacacaacgtgcccaatgcctgctgaccaacgcgcccaacagcgtggacgacaagcagttgcgtgaattgagcctgcgcctgcgccaaaaggcggctgaaaccaaagaagcataa

SEQ ID NO: 36651 - DNA, 1527 bp, Neisseria meningitidis
atgaacacgccccttccttattccgattacctcatccgcatcctgacggcatctgtctatgatgtcgcggtcgaaacgcctttggaaccggcacgcagcctttctgtacgtttgaaaaacaacatccttttgaaacgcgaagatttgcagccggttttttcgttcaaaatacgcggcgcgtacaacaaaatgtccaagttgccgaaagatgcgctcgcttgcggcgtgattgcggcaagcgcgggcaatcacgcacaaggcgtggcattgtccgcacagcgtttgggttgccgtgccgttatcgtcatgccggagactacgccgaaaatcaaagtggatgcggtcaaaagccgtggcggcgaggtggttttgcgcggtgtttcatacaacgatgcttacgattatgcgatggagctggcggaacaggaagggctgacctatatcgcaccgtttgacgatcctgatgtgattgcaggacaagggacggtagggatggaaattgtcagccagcatcccgatccaatccgcgccgtattcgtaccgataggggggggcggtttggcggcgggcgtggcggcatttatcaagcaggtccgtcccgaaatcaaagttatcggcgttcagaccaacgattcctgctgtatgaagcagtcggtcgaagcgggtgaaatcgtccatttgaaagatgtcgggctgttttcagacggcactgcggtcaaagttgtcggagacgaaaccttccgcctctgcaaagaacttttggatgaaatcattacagtcgataccgatgcggtttgcggcgcggtcaaggatattttcgatgacacgcgcagcattaccgagccggcgggcgcgttggcgttggcgggtctgaaagcctatatcgcccgagaaggcgcggaaaaccaaaccctgattgccgttaccagcggtgcgaatatgaattttcaccgtttgcgccatgtgtcggagcgtagtgaattgggcgagggcaacgaaggtatttttgccgttaccatccccgaagaacgcggcagcttccttaagtttgtcaatatattgggaaataggaatattaccgagttcaactaccgctacggagacgatgaaaaagcgcatatctttgtcggacttcaagcggcaggcccgcaggatttggcggttatcggcagccggttggatgaggcgggattgcccaatgtcgacctgactgatgatgagattgccaaaatccatatccgttatatggttggagggcggacggacaaagtagaaaacgagcgtttggtcagttttgagtttccggagcgtccgggggcattggcacgctttttgaaccatatgcagggagggtggaatattacgcttttccattaccgcaaccacggtgcggattacgggcggattttggtcggtatcgatgtgccgccgcacgatgccgccgcatttgacggtttcttggaaagtctgggatacagctatcatgaggaaacgcaaaatgccgcgtacaagctgtttcttgcctga

SEQ ID NO: 36652 - DNA, 660 bp, Neisseria meningitidis
ttgtgtgcgtcctgtttgaatgttaacaaaatcgttataatcgcaacattctaccgcaatcctgaaaggccgtctgaaatgaggaatgaggaaaaacgcgccctgcgccgcgaattgcgcgggcggcgttcgcaaatggggcgggacgtgcgggcggcggcaacggtaaaaattaaccgcctgctcaaacgttatatcaagcacggtcggaaaatcggcgtgtattggccgatgggcaaggaattgcgtttggacggctttgtccgcgcggcgcaaaaacgcggcgcaaaactttatctgccttatatcgaaccgcgttcgcggcggatgtggtttacgccgtatcctgaaagcggaatggaacgggagcgcatacggggcagggcgaggttgaacgtgccgcagtttgcagggcgcaaaatccgcgtgcacggtttgtcggtattgctcgttccgcttgtcggcatagaccgcgaaggctaccgtttggggcaggcaggcggctattacgatgcgacgcttgcagcgatgaaataccgtttgcaggcaaaaaccgtgggcgtgggctttgcctgccagttggtggacagactgtcggtcgaggcgcacgacctgccgctggacggttttgtgtcggaggcggggatattgtgtttttag

SEQ ID NO: 36653 - DNA, 1296 bp, Neisseria meningitidis
atggcacaaaaaatccaatccgtcaaaggcatgaacgaccttctgcctgtcgagcaaaaagatttcaaactgacggctgcgttttggcaggcgtttgaagatacggtcggccgctggacacgcacttacggttatcagcaaatccgtacgccgattgtcgagcaaaccggtttgtttgtccgctccatcggcgaggaaaccgatgtggtcggcaaggaaatgtacaccttctccgattcaaacgattctttgagtttgagcttgcgtcctgaaggtacggcttcctgcctgcgtgcggtggtcgaacacaaccttctctacaacagcccgcaaaagctgtggtatatggggccgatgttccgccgcgagcgtccgcaaaaaggccgttatcgtcagttccatcaggtcggtatcgaagctttgggttttgaaggtccggatattgatgcggaaatcatcgcgatgtctgccgacttgtgggaaaaattgggtattcgcgaatacctgactttggaaatcaacagcttgggcaaccgtgaggaacgcgcggcacaccgtgcggcattggttgaatatctgacccgttatgaagataaattggatgaagacagcaaacgccgtctgaaaaccaatcctttgcgcgttttagatacgaaaaaccctgatttgcaggaaatctgcaatgccgcgccgcgtttggtggattacttgggcgaggcttcgcaaaaccactatgcacgcttcaaggcgatgttggatggtttgggtattcaatatattgaaaatccgcgcttggttcgcggtttggattattacaatcagacggtttttgagtggacgaccgacaaactcggcgcgcaggcgactgtgtgtggcggcggccgttacgatggtttgattgaagaacttggcggcaaacctgcgccgtctatcggctttgcaatgggcatcgaacggttgctgtttttggtgagcgaatacggctcgctggaagtgaatgctgcgcctgatgtctatgcaatgcaccaaggcgaaagggcggacttgcaagtgatgaaatacgcgcaagccttgcgcacacaaggtttcaatgtaatgcagcattccggctatcaaagcctgaaagcgcaaatgaaaaaagccgacaacagcggcgcgcgctttgccctgattgtcgcgcaagacgaactggcgaacggtacggttacgctcaaagatatgaacggcgcacacggtcagcaaactgtcgccgccgctgatttgacaaacactttacaacaatggaagaacgcataa

SEQ ID NO: 36654 - DNA, 3039 bp, Neisseria meningitidis
atgaacagtcaaaagctgcccgaggtaaagtgggggaattcatataaaaaaggggagttgaggcccgaagacagggatcgtaaatttacctttacgagtacttatggaatcaaacgcgacactaatatcacattcaataataccgattatcttgtttctgaaaaaaacggtactgccgttttcggcgcggcgacctacctgccgccctacggcaaggtttccggttttgataccgataggctgaccaagcgcggcaatgccgttgattggattaatacgacccacccggggttgataggctacagctaccaaggtatcacatgcagcagcagcagcagctgtcctgaatttggctataaaacccaatttacctttggtaatcaagggttgaaaagaaagacaaacggcaggctggatatagacgaagacaaaagccgcgacggttcgcccatttacaaattgcagaattatcctgggttgggcgtgtctttcaatttgagcagcgatagcctcgtcaaacaaaagagacacaatagtttggtatcttcttttagcgaggatgtgacgcagagcaatggtacgcaaagcccatacaaagacagaaacctcgtttatcgtacagacgattaccataatcagggtaattatagccatcaggacgcacaccacgccatcgccttttatctgaacgccaagctgcacctgctggataaaaaacaaatcaaagatatcgcgcaaggcagtgaacttaatttgggtatgttgaaaacgcacatcgagctgccgaaaaattttaatcaaaggagcttggtaggtttggcggttagttggacggttaaagatgagggaaaagtcagcgtcaaactcaaattgccggaagtcaaagcagaccgctgcatcaataaaccgaaccccaatcccaacaaaaaagacctttcgccggcactgactgcccccgcgctgtggttcggagctgggcaagatggtaaggcggagatgtattccgcttcggtttccacctaccccgacagttcgagcagccaaattttcctgcaaaacctttcccgcaaggatgacacaagcaaaccgggccgctattccctcaaacccttgagtacgtcggagattaaaagtaaagagccgactttcacagggcggcaaaccatcatccgattggatggcggcgtacagcagattaaacttcaaggcaatgaggtcactagttttaatgtaaacaacggcaacaacactttcggcattgttaaggacttgggcgtcgatcctgatgccagcgagtggaaaaaagtgctgctgccttggacggttcggggttttgctgatgacagtaaatttaaagaattcaacaaagaagaaaaaaacaacgacaacaagccaaaatacagtcaaaaataccgcagccgcgacaacaacaacggcaatcgcaatttgggcgacatcgtcaacagccccatcgtggcggtcggcgaatatctagctacttccgccaacgacgggatggtgcatatcttcaaacaaagcggcggggacaagcgcagctacaatctgaagctcagctacatccccggaacgatgccgcgcaaggatattgaaaacaaagattccacccttgccaaagagctgcgcgcctttgccgaaaaaggctatgtgggcgaccgctacggcgtggacggcggctttgtcttgcgccgcattacagatgaccaagacaagcaaaaacatttctttatgtttggtgcgatgggcctgggcggcagaggcgcgtatgccttggatttgaccaaagccgaaaacggtgacccgaccgccgtttccctgtttgatgtcaaacatgacaataatggcaagaatagcaataatagcgtgcaattaggctacaccgtcggcacgccgcaaatcggcaaaacccacgacggcaaatacgccgctttcctcgcctccggttatgcgactaaacaaattgacagcggcgagaatacaaccgcgctgtatgtgtatgatttggaaaacaacaatggtacgctgattagaaaaatcgaagtaaccagcggcaagggcgggctttcgtcccccacgctggtggataaagatttggacggcattgtcgatatcgcctatgccggcgatcgcggcgggaatatgtaccgctttgatttgagcggtcaagatcctaatcaatggtctgtacgcaccattttcagcggcaacaaaccgattacttccgcgcccgccatttcccaactgaaagacaaacgcgtggttatcttcggcacgggcagcgatttgagtgaagaggatgtggacagcaaagaaatccaacacgtttacggtatttttgacaatgacacagacacgggtacggcgcaagacgggcagggcaaagggctgctcgagcaaaagctggaaaaagacaaagacggcaaaacgctgtttttaagcgactacaaaaggtctgacggctcgggcgacaagggctgggtagtgaaattggaagccggacagcgcgttaccgtcaaaccgaccgtggtattgcgtaccgcctttgtaaccatccataaatatacgggtaatgacaaatgcggcgcggaaaccgccattttgggcatcaataccgccgacggcggcaagctgaccaagaaaagcgcgcgcccgattgtgccggccgacaatacggctgtcgcgcaatattccggccataagaaaacttccagcggcaaatccatccctataggttgtatggaaaaagacaatggaatcgtctgcccgaacggatatgtttacgacaaaccggttaatgtgcgttatctggatgaaaagaaaacagacggattttcaacaacggcagacggcgatgcgggcggcagcggaacattcaaagagggtaaaaaacccgcccgcaataaccggtgcttctccagaaaaggtgtgcgcaccctgctgatgaacgatttggacagcttggacattaccggcccgatgtgcggtatgaaacgaatcagctggcgtgaagtcttctactga

SEQ ID NO: 36655 - DNA, 567 bp, Neisseria meningitidis
atggctaagaaaatcagtattttggtgggcagcctgcgccgtgcttcttttgcgcgcaaagtggcattgaatgcggcggagatgttccccgaaggctggcaggcggaaatcgtcgaaatcggacatctgccgctttacaatttcgattatgacgaccctgcggtggaagatgtgccgctgcccgaaagctacacggttttccgcgaaacgattaaggcttcggacggcattttgttcgttacgtccgaaaataaccgcaccattcccgcctgtttgaaaaatgcggtggacatcggctcgaaaccgaatgccgacgtggcgtggaaaaacaaaccggccggcatcatcagccattccgtcggcaagatgggcggttacagttcgcaaaaaaacctgcgccttgcgctgtcttatttcgatatgcccgtaaccggacagccggaagtgtttttgggcaattcgccgacgctgtttgatgaaaacggcaaattgatcgactcggcaagggattttgttcagtcatatattaatcagtttgtcggtttgattgaaagaaatgccaaataa

SEQ ID NO: 36656 - DNA, 441 bp, Neisseria meningitidis
ttgctgggtgtggttccgggtatcggtgaatcgatacaggcctataaagtagcgaaagcggcaaaaaatttacaaggcatgaaaaaagccttggacaaggcagtaaccgttgccactgcacagggctatgtcagtaaaaccaaaatcaaagtcggtcaaactgaattaagggttactgcagcaactgacaaacaattgctgaaagctattggcgaaggaagggacacgacaggtaaaatgaccgagcagttatttgactctttagctaaacaaaatggcttcagagtgctttcgggcggcaaatacggcggaaataacggttttgatcatgtatggcaggctgccgatggtagtgtcgttttgattgtagaaagtaagcagattaggaacggtacagctgaatccgaatggtgcgggtggatatacgcagatgagtcgtga

SEQ ID NO: 36657 - DNA, 471 bp, Neisseria meningitidis
atgtacgatgtcaatacccacgatgtccgccgctttttcgcccgcgtgtggcagcagcggctcaatccgctgcaactgagcgcactggaacagaaagccctccgcattgtcgaagcccatcccgaataccactgctatctcgaacgcatcgaagaccatctggacaccgactggctgcccgaaaacggcgaaagcaaccccttcctgcatatgtcgctgcatttgtccgtccaagaacaggcgggcatagaccagccgcacggcatacgcgcaatccacgacaccctgtgcgccaaacacggctggctggaagccgaacacgaaatgatggaggcactggcggaaacactgtggacggcgcaacgctacggcaccggtttggatgtcaatttctacatgacccgactgcgcaaactcatcggcttgggtgcagaaaatcaagccaggttgaacccgcatgaaatcgcctga

SEQ ID NO: 36658 - DNA, 654 bp, Neisseria meningitidis
atgaagataacgcactgcaaattaaagaaaaaagtacagaaagaactgctccgtttttttgtgctggaagttaccgcccgttctgccgccgatattttgggtatccatcccaattcggcagtactgttctaccgtaaaatccgcacggttatcaaccatcatttggccttggctgccgatgaggtttttgagggccctgtcgagccggacgaaagcgatttcggcggacggcgtaaaggcagacgtggtcgcggtgcggcaggaaaagtggttgtcttcggcattctgaaacgcaacggacgggtctataccgttgtggtggataatgccaagtctgaaacgttactccctgtcatcaagaagaaaatcatgccggacagcattgtttataccgatagtctgagcagctgcgacaagttggacgtgagcggttttatccattaccgcatcaaccattccaaggaatttgcagaccgtcaaaaccacattaacggcattgagaacttttggaatcaggcaaaacgcgtcttgcgcaaatacaacgaaattgatcgtaaatctttcccgctgttcttgaaagaatgcaaatttcggtttaacttcggcacaccgtcccgacagctaaaaattttgcgggattggtgtggaatttag

SEQ ID NO: 36659 - DNA, 1350 bp, Neisseria meningitidis
atggcaaaccaaaccaatagcaaagcaaaagcattgttaggctggatggacgctcgtttccccctgtctaaaatgtggaatgagcatttggctcaatactacgcaccgaaaaactttaatttttggtactacttcggctctttagccttgcttgtcctcgtgattcaaatcgtcagcggtattttcctgacgatgaactacaaaccggacggtaacctgaatgcctaccatctgcctgctgcctttactgcagtcgagtacatcatgcgcgacgtgtccggcggttggattatccgctacatgcattccaccggcgcatctttcttcttcattgttgtttatctgcacatgttccgtggtttgatttacggttcgtacaaaaaaccccgtgagttggtgtggattttcggttctctgattttcttggcattgatggcggaagcctttatgggctacctgctgccttggggtcagatgtccttttggggggcgcaggtaattattaacctgttctccgccatccctgttatcggtccggatttgtccacttggattcgcggcgacttcaacgtttccgacgttaccctgaaccgtttctttgccctgcacgttatcgcggtacctctggtattgctcggcttggttgtggcgcacatcatcgccctgcacgaagtgggttctaacaaccctgacggcgttgaaatcaagaaaaacaaagacgaaaacggtatcccgcgcgacggtatcccattccatccttactataccgttaaagacatcttgggtgtggttgtattcctgattgtcttctgtgccgtattgttcttcgcaccggaaggcggcggctacttcctcgaagcgccgaacttcgatgcggcaaatgcgctgaaaacacccccgcacattgcgccggtatggtatttcacaccgttctacgccattttgcgtgcgattccctcgttcttgggaacgcaggtttggggtgtaatcggtatgggcgcggcggtcgtgttgattgccctgctgccttggctggataggggcgaggtgaaatccgtccgttaccgcggtccgattttcaaaaccgcattggtcttgttcatcatttcctttatcggtttgggtattttgggcgcgatggtggcaaccgatacgcgtactttggtcgcgcgcatcctgtccttcgtctatttcgcattcttcctgggtatgccgttctataccaagctggataaaaacaaaccggttcccgaacgcgtaaccatgagcaccgccaaacaaaaaatcatgttctttgtttacgtcggcattaccgccgtgggtgcttacctgtttgcaaccaacatctga

SEQ ID NO: 36660 - DNA, 561 bp, Neisseria meningitidis
atgagctatcaagacatcttgcggggcctgttgccccccgtgtcgtatgcccgcaatgccccgcgtgtgcgggcgcaggcagaaatagacggcgcagcgctggatgcggtggcggaatcggctcaaagcgttgccgatgccgtcgacccgcgcagcgccggccaaatgctggccgattgggagcgcgtattaggtttggacggtacgggcaaaaaccgccagcaccgtgtgttggccgtcatggccaagctaaacgaaacaggcggcttgagtattccttattttgtgcgtttggccgaggcggcgggctatcaaatccaaatcgacgaaccgcagccgttccgcgccggtgtaaaccgcgccggcgaccgtcttgcgccgcaggaaatcatgtgggtgtggcacgttaacgtgcgcggcggcaacaaccgcattacccgattccgcgccggtatctcggcggcgggcgacaggctgaccgattacagcgatgccgtgatcgagagcctgttcaaccgcctcaagcccgcccacaccgctatccgatttacctaccgataa

SEQ ID NO: 36661 - DNA, 438 bp, Neisseria meningitidis
ttgcgcctgcttttagggatattgtgcgacctatcgatggttgcccccgtatatgcacaggggcagccggatgcggtcaatgcctatatccaaaagaaaaaagtcatcgtcgatacatccaaagcggaactctgtttcgctgacgaccgtcagtgccaccccgtcctcatcggcactgccacgcccaaggggacgttcgggctgacgctgaacagtaccgacaagcccggatacggcggcgaagtcatcggtttcaagcaggagggtgattttcttttcgccctgcaccgcgtttggaatcagataccgtcggaaaggcggaacgaacgcatcgcctccccgtccgtgtccgacaggattatgaccaacggctgcatcaacgtcagcgatgcggtgtacgaaaaactgcgtcattattttgtgttggaagtgatttga

SEQ ID NO: 36662 - DNA, 2379 bp, Neisseria meningitidis
gtgctggcattgggcctctgcttcggcacgcattgcgccgccgccgatgccgttgcggcggaggaaacggacaatccgaccgccggaggaagcgttcggagcgtgtccgaacccatacagcctaccagcctgagcctcggttcgacctgcctgttttgcagtaacgaaagcggcagccccgagagaaccgaagccgccgtccaaggcagcggcgaagcatccatccccgaagactatacgcgcattgttgccgacaggatggaaggacagtcgcaggtgcaggtgcgtgccgaaggcaacgtcgtcgtcgaacgcaatcggacgaccctcaatgccgattgggcggattacgaccagtcgggcgacaccgttaccgcaggcgaccggttcgccctccaacaggacggtacgctgattcggggcgaaaccctgacctacaatctcgagcagcagaccggggaagcgcacaacgtccgtatggaaaccgaacacggcggacggcggctgcaaagcgtcagccgcaccgccgaaatgttgggcgaagggcattacaaactgacggaaacccaattcaacacctgttccgccggcgatgccggctggtatgtcaaggccgcttccgtcgaagccgatcgggaaaaaggcataggcgttgccaaacacgccgccttcgtgttcggcggcgttcccattttctacaccccttgggcggacttcccgcttgacggcaaccgcaaaagcggcctgctcgttccctcactgtccgccggttcggacggcgtttccctttccgttccctattatttcaaccttgcccccaatctcgatgccacgttcgcgcccggcgtgatcggcgaacgcggcgcggtctttgacgggcaggtacgctacctgcggccggattatgccggccagtccgacctgacctggctgccgcacgacaagaaaagcggcaggaataaccgctatcaggcgaaatggcagcaccggcacgacatttccgacacgcttcaggcgggtgtcgatttcaaccaagtctccgacagcggctactaccgcgacttttacggcaacaaagaaatcgccggcaacgtcaacctcaaccgccgtgtatggctggattatggcggcagggcggcgggcggcagcctgaatgccggcctttcggttctgaaataccagacgctggcaaaccaaagcggctacaaagacaaaccgtatgccctgatgccgcgcctttccgccgattggcgcaaaaacaccggcagggcgcaaatcggcgtgtccgcccaatttacccgcttcagccacgacagccgccaagacggcagccgcctcgtcgtctatcccgacatcaaatgggatttcagcaacagctggggttacgtccgtcccaaactcggactgcacgccacctattacagcctcaaccgcttcggcagccaagaagcccgacgcgtcagccgcactctgcccatcgtcaacatcgacagcggcatgaccttcgaacgcaatacgcggatgttcggcggcggagtcctgcaaaccctcgagccgcgcctgttctacaactatattcctgccaaatcccaaaacgacctgcccaatttcgattcgtcggaaagcagcttcggctacgggcagctttttcgtgaaaacctctattacggcaacgacaggattaacaccgcaaacagcctttccgccgccgtgcaaagccgtattttggacggcgcgacgggggaagagcgtttccgcgccggcatcgggcagaaattctacttcaaaaacgacgcagtcatgcttgacggcagtgtcggcaaaaaaccgcgcagccgttccgactgggtggcattcgcctccagcggcatcggcagccgcttcatcctcgacagcagcatccactacaaccaaaacgacaaacgcgccgagaactacgccgtcggtgcaagctaccgtcccgcacagggcaaagtgctgaacgcccgctacaaatacgggcgcaacgaaaaaatctacctgaagtccgacggttcctatttttacgacaaactcagccagctcgacctgtccgcacaatggccgctgacgcgcaacctgtcggccgtcgtccgttacaactacggttttgaagccaaaaaaccgatagaggtgctggcgggtgcggaatacaaaagcagttgcggctgctggggcgcgggcgtgtacgcccaacgctacgttaccggcgaaaacacctacaaaaacgctgtctttttctcacttcagttgaaagacctcagcagtgtcggcagaaaccccgcagacaggatggatgtcgccgttcccggctatatccccgcccactctctttccgccggacgcaacaaacggccctga

SEQ ID NO: 36663 - DNA, 783 bp, Neisseria meningitidis
atgcaggaaacccgtttttccatactgctggacgaattggcggcaaaacaggaggcagccatcgccccccacctgcttgccgacgggagcaaggtatggatacgcaaagcaggcaggcacaatgcacgatggcgttacgcgctgctcggtatggttgcccgatatttgaaactgggggtgttgaagccggtccccagcctcggcggcgagcctgccattgcaaccgaatcaaaacgcctgtacgaattgcgcgcggcggggatagcagttcccgaattgctcgccgtccggaaaaatgcccttatgttcggcaatttggaaggcatcccgctcgatacgcaaatccgccaagaagccgaggctggaaagtcggacgcttggcttgccggtttggaagccattgcacgcgtgcataaaaaacggcagttcctcagtcaggcgtttgcgcgaaatatgatgtcggacggaaaaaacatcagctttttggattttgaagacgacccttccgaagtcctgaccatagcgcaatgccaagcccgcgattggctctgctacatccattcgaccgcgctgatattgaaaaacggcggactgctggaagcggctgcggaaaaatggggcggcgtattgtcagatcagcctgccgaaatacaaaagctgattgccgccaccgtcaaaccgatcctcccgatacgcaggctggaacacccccgctggggacgggacgcactcaggctggcagcctcgatttccctgatttcccttgccgatatgccgccgtaa

SEQ ID NO: 36664 - DNA, 1479 bp, Neisseria meningitidis
atgttcagcaagttaacccctttggctgaaaccggcatcccgaccctgtcgtgtgcaaacgcggcagggcgtttgttgcattcagacagccgccaaatcaaacaaggcgatattttcgttgcctgtccgggcgaatatgccgacggacgcagttatatccccgccgccgttgccaacggcgcggcttttgttttttgggacgacgatggcaaattcgcgtggaatcccgaatggaaagtccccaatcaaggcatcaaagatttgaaacaccgtgccggcatattggcggcgcaagtttacggcaacgtttcagacggtctcaaagtctggggcgtaaccggaaccaacggcaaaacctccatcacgcaatggctggcgcaagctgccgatttgttgggcgaaaaaaccgccattgtcggcacggtcggcaacggcttttggggtgcattggaagaaaccacgcataccacacccgcccccgtcgatgtccaaaccctgctctaccgtttccgtcaacaaggcgcaacagtcgccgcgatggaagtctccagccacgggcttgaccagtcgcgcgtcaacggcgtgtcattccgcagcgcaatctttaccaacctcacccgcgaccacctcgactaccacggcacgatggaagcctacggtgccatcaagtcgcgcctgttttactggcacggcttgaaacacgcagtcatcaacgtggatgacgaatacggcgcggaactcgtaggtcgtctgaaaaaagactgtcccgatttggccgtttatagctacggcttcagcgaacacgccgacatccgcattatcgatttcaccgcctcttcagacggcatagcagccgtattccaaaccccgtggggcgaagggaaatgccgcacgcgcctgctcggacggttcaacgcgcaaaacctcgccgcctgcatcgccttgctgtgcgccaacggctatccgcttgataatgtattggatgtgctggcaaaaatccgtcccgcttcagggcgcatggactgcatcatgaacagcggcaagcccttggtcgtcgtcgattacgcccacacgcccgacgcattggaaaaagcactcgccaccttgcaggaaatcaaaccgcagggcgcggctttgtggtgcgtattcggttgcggcggcaaccgcgatcgcggcaaacgcctgctgatgggcgcggcagccgtacagggcgcggataaagtcgtcgtaaccagcgacaatccgcgtttggaaaatccgcacgacatcatcaacgacatcctgcctgccgttcccgcgcccgaacgtgtcgaagccgaccgcgccgctgctatccgttatgcagtcgaacgcgccgccgcaaacgacatcatcctgattgccggcaaagggcatgaaaactatcaggatgtacaaggcgtgaagcaccgtttttccgatcttgaaatcgtcggacaggctttgttaactcgtaaataa

SEQ ID NO: 36665 - DNA, 564 bp, Neisseria meningitidis
gtgcacggtctgacgatagaggttttggaagggaaaaacgcgccgccgtttgcagaggtcggcaggcagattgccgatttcctgcgcggtgcggagttgattatccacaatgccaaattcgacgtgggcttcctcaatatggagttccgccggatggggttgccgactgtcgaggaactcggctgtaccgttaccgataccctggcgatggcgcgcgaaatgttccctgggcagaaagccagcctggatgccctgtgcaaccgtttttccgtcgaccgcagcaagcgcgtcctgcacggcgcattgatcgactgcgaacttttgggcgaagtctatcttgctatgacgcggcggcagttcgacctgatgggggaggccgcagaggaaaaaatggaaaccaaacccgtggtgcataccgaaaccaaacgcagcggcaaactgaaagtcatcagggcggacgaaaacgagttggcggcgcacgggcaatatttggacggcttgggcgaagcctgtatctggcgcaaggaagccgtgccgtctgaaaacggcgggacggacgcatga

SEQ ID NO: 36666 - DNA, 225 bp, Neisseria meningitidis
atgtcttggtgggaatttaggggattttggggaattttgcaaaggtctcactttgtcatttccaatgttccaagtacacctaatctgctaagaggaagacagcttgaaggaaaacttattttagaagttcctgctcaggtcaatccaattccacaatctgtattaagggcggcacaagaagaaaatgttatcattagagatacaacaggaaggatttacaaatga

SEQ ID NO: 36667 - DNA, 417 bp, Neisseria meningitidis
atgctgcagccaactagactgaaataccgtaagcaacaaaagggtcgcaataccggcatcgctactcgcggtaataaggtaagtttcggtgagttcggcttgaaagccgtaggtcgtggtcgtttgactgcccgtcaaatcgaagctgctcgtcgtgcaatgacccgtcatatcaaacgtggtggtcgtatttggattcgtgtattccctgataaaccgattactgaaaagcctattcaagttcgtatgggtggcggtaaaggtaacgtggaatattacattgccgaaattaaaccaggtaaagtgttgtatgaaatggatggcgttccagaggaactggctcgtgaagcattcgagttggctgctgccaaattgcctattcctacaacctttgtagtaagacaggtgggtcaataa

SEQ ID NO: 36668 - DNA, 366 bp, Neisseria meningitidis
atgaacctgattcaacagctcgagcaagaagaaattgcccgtctgaacaaagacatccccgaattcgcaccgggcgacaccgtagtcgtatccgtacgcgtcgtagagggtacccgtagccgtctgcaagcctacgaaggcgttgtcattgcacgccgcaaccgtggtctgaacagcaacttcatcgtccgtaaaatttccagcggcgaaggtgtggaacgtactttccaactgtactcccctaccgttgagaaaatcgaagtcaaacgccgtggcgatgtccgccgtgccaaactttactatctgcgcggtctgaccggcaaagctgcacgcattaaagaaaaattgcctgcacgcaaaggttaa

SEQ ID NO: 36669 - DNA, 453 bp, Neisseria meningitidis
atgaatattgaagtagaaatgaaagtattggacgagaggatggcggattttatccctgcctatgcaacggagggttctgcaggtttggacttgcgtgcctgtttggatgaggaagtcgttttacagccgggtgaaacgtttcttgtgccgacgggtttggcaatttatttggcgaatcccgcatatgccgccgttttgctgccccgttccggcttggggcataaacacggcattgtcttgggcaatttggtcggtttgattgactccgattatcaaggggaattgaaggtgtcgttatggaacaggggcagtgaaccttttgccgtcaaaccgttcgagcgtatcgcacagatggttatcgtgccagttgtgcaggcgggcttcaaacgtgtcgaggagtttgtcggaagcagccggggtgagggcggcttcggcagtacgggttctcactaa

SEQ ID NO: 36670 - DNA, 2595 bp, Neisseria meningitidis
atgtccaaatccgccgtttccccaatgatgcagcaatacctcggcatcaaagcgcaacataccgacaaactggtgttttaccgtatgggcgatttttacgagatgtttttcgacgatgcggtagaagcggcaaaacttttggatattaccctgaccacgcgcgggcagatggacggcgtgccgattaaaatggcaggcgtgccgtttcacgccgccgaacaatatctggcgcgcctggtcaagttgggcaaaagcgtggcgatttgcgaacaggtcggcgaagtcggcgcgggcaaagggccagtagaacgcaaagtcgtgcgcatcgtaacgcctggcacgctaaccgattccgcattgctggaagacaaggaaaccaaccgcatcgttgccgtgtcccccgacaaaaaatacatcggtttggcgtgggcatcgctgcaaagcggcgaattcaaaaccaagctgacaactgtggataaattggacgacgaactggcgcgcctgcaggcggcggaaattctgttgccggacagtaaaaacacaccgcaacttcagacggcatcgggtgttacgcgcctgaacgcgtggcagtttgccgccgacgcgggggaaaaactgctgacggaatatttcggctgccaagatttacgcggcttcgggttggacggcaaagaacacgccgttgcgattggcgcggcaggtgcgctgttgaactatatccgcctgacgcaaaacctgatgccgcaacatttggacggcctgtcgctcgaaaccgacagccaatatatcggcatggacgccgccacgcgccgcaatctcgaaatcacgcaaaccctctccggcaaaaaatcgccgaccctgatgtccacgctcgacctttgcgccacccacatgggcagccgcctcttggctctctggctgcaccaccctttgcgcaaccgcgcccacatccgagcacgccaagaagccgttgccgcgctggaaagccaatacaaacccctccaatgccgtctgaaaaacattgcggacattgaacgcattgccgcccgcatcgccgtcggcaacgcacgtccgcgcgacctcgccgccctgcgcgacagcctgtttgccctgtcagaaatcgacttgtccgcaaacggcagcagcctgttggaaaccctcaaagccgttttcccggaaaccctgccagttgccgaaaccctcaaagccgccgtgatgcccgaacctgccgtctggctgaaagacggcaatgtcatcaatcacggttttcatcccgaactggacgaattgcgccgcattcaaaaccatggcgacgaatttttgctggatttggaagccaaggaacgcgaacgtaccggtttgtccacactcaaagtcgagttcaaccgtgttcacggcttttacattgaattgtccaaaacccaagccgaacaagcacctgccgactaccaacgccggcaaacccttaaaaacgccgaacgcttcatcacgccggaactgaaagcctttgaagacaaagtgatgactgctcaagagcaagccctcgccttagaaaaacaactctttgacggcgtattgaaaaaccttcagacggcattgccgcagcttcaaaaagccgccaaagccgccgccgcgctggacgtgttgtccacattttcagccttggcaaaagagcggaacttcgtccgccccgagtttgccgactatccggttatccacatcgaaaacggtcgccatcccgttgtcgaacagcaggtacgccacttcaccgccaaccacaccaaccttgaccacaaacaccgcctcatgctgctcaccggccccaatatgggcggcaaatccacctatatgcgccaagtcgcgctgattgttttattggcacacaccggctgtttcgtgcctgccgatgccgccacaatcggacctatcgatcaaatcttcacccgcatcggcgcatcggacgatctcgcctccaaccgctccaccttcatggtcgaaatgagcgaaaccgcctacatcctgcatcacgccaccgaacaaagccttgttttaatggacgaggtcggacgtggtacttccactttcgacggccttgccctcgcgcacgccgttgctgaacacctgctgcaaaaaaacaaatccttcagcctgtttgccacccactatttcgagctgaccaaactgcctgaagcccatgcaaccgcagtcaatatgcacctctccgcgcttgagcaaggacaggacatcgtcttcctccaccacatcgaaccgggtcctgcaagcaaaagctacggcatcgccgtcgccaaactcgccggtctgcctgtacgcgcattgaaatccgcccaaaagcatttgaacgaactggaagaccaagccgccgcaaaccgtccacaactggatattttcagtaccatgccgtctgaaaaaggagatgaaccgaatgtggacagctttgtggacaaagcagaggaaaaacattttgaaggtatattggcagcagccctggagaaactcgatcccgacagcctgaccccgcgcgaagcattgtcagaactgtaccgtctgaaagatttgtgcaaatccgtatcttaa

SEQ ID NO: 36671 - DNA, 1059 bp, Neisseria meningitidis
atgtcaggctatacaggcggcctcgttgtttcaggtggtatatcattaattgacagacttgatattatggaaaatgtaaaccgcatcgttgcagaaggcattgccgcagtagaagctgcgcaagacttcaacgctctagaacaaatcaaagcccgttatcttggcaaaaccggcgagttgaccggacttctgaaaactttggggcaaatgtcgcctgaagagcgcaaaaccataggtgcgcatatcaatgaatgcaaaaaccggtttcagacggcttttaatgccaaacgcgatgccctcaacgaagtcaagctgcaagcccgacttgccgccgaagccctcgatattaccctgcccggacgcgctcaggaaggcggcagcctgcatcccgtaaccctgaccttgcaacgtgtggtcgaactctttcacggaatgggtttcgaagtggcggacgggcctgaaatcgaagacgattttcacaatttccaagccctgaacatccctgcaaaccatcctgcccgtgcgatgcaggatacgttttacgttgaaaacggcgatgttttgcgtacgcacacttccccgattcaaatccgctatatgctcgataaaaaagagccgcccatccgcattatcgcccccggccgcgtttaccgtgtggacagcgatgccacgcactcgcctatgttccatcaggcggaaggtttgtgggtagaagagggcgtaacttttgccgatttgaaagcagtgttcacggattttatccgtcgcttctttgaacgcgatgatttgcaagtacgtttccgcccgtctttcttcccgttcaccgaaccgtctgccgaaatcgacattatgggcgaaaacggcaaatggctggaagtcggcggctgcggcatggtgcatcccaacgtgttgaaaaatgtgaatatcgattctgaaaaatacaccggtttcgctttcggtatcggtctcgaccgtttcgcgatgctgcgttacaacgtgaacgatttgcgcttgttttttgataacgatttgaattttttgaagcagtttgtaaaatga

SEQ ID NO: 36672 - DNA, 270 bp, Neisseria meningitidis
atggcactgaccgtagaacaaaaagcacaaatcgttaaagatttccaacgcaaagaaggcgacaccggctcttccgaagtacaagtcgctctgttgactttccgcatcaacgacctgaccccccacttcaaagccaaccccaaagaccaccacagccgtcgcggcctgttgaaaatggtcagccaacgccgccgcctgctggcctacttgcgccgtacccagcccgatacgtatcgcgcgttgattacccgcttgggtctgcgtaaataa

SEQ ID NO: 36673 - DNA, 3204 bp, Neisseria meningitidis
atggctaaattttttatcgaccgccccattttcgcgtgggttatttcgattttcattattgcggcgggtattttcggcattaaaagcctgcctgtttcgcaatatccgtctgtcgccgccccgaccatcaccctgagggccacttatccgggcgcgtccgcgcaggtaatggaagacagcgtgctttccgtgatcgagcggaatatgaacggcgtggaaggtttggattatctgtccacttctgccgattcgagcggcagcggcagcgtgagcctgacctttacgcccgataccgacgagaatctggcgcaggtggaagtgcagaacaagctttccgaagtattgagcacgctgccggcaaccgtccagcaatacggcgtaaccgtatccaaggcgcgttccaatttcctgatgattgtgatgctttcgtcggatgtgcagtcaaccgaagagatgaacgactacgcgcagcgtaatatcgttcccgagttgcagcgtatcgaaggcgtggggcaggtacgcctgttcggcgcgcaacgcgcgatgcggatttgggttgatcctaagaaactgcaaaactacaatttgtcgtttgccgatatcggcagtgcgctgtccgcccagaacgtccagatttcagcgggttctatcggttcgcttcccgccgttcgcggacagacggttacggctaccgtaacggcgcaagggcagttgggtacggcagaagaattcggcaacgtcatcctccgcgccaataccgacggttctaatgtttacctgaaggatgtggcaagggtcggactgggtatggaagactattcttcctcaacccgtctgaacggtgtaaataccaccggtatggcggtgatgctgtccaacagcggcaatgcgatggcgacggcaaaggcggttaaagaacgcatggcgacgttggaaaaatactttcctcagggtatgagctggaaaaccccttacgatacttccaaattcgtcgaaatttcgattgaaaaagtgattcatactttaatcgaagcgatggtgctggtgtttgtcgtaatgtatctcttcctgcaaaacatccgttatacgctgattccgaccatcgtcgtaccgatttcgctgttgggcggtttcgccttcatctcttatatgggcatgtcgattaacgtactgaccatgtttgcgatggttttggtcatcggcatcgtggtcgatgacgcgattgtggtggttgaaaacgtcgagcgcattatggcgggtgaaggcttgccgcccaaagaagcgaccaaaaaagcgatgggtcagatttcgggcgcggtcatcggtattaccgccgttctgatttccgtgttcgtaccgttggcgatgttcagcggggcgacgggcaatatttacaaacagtttgccctgacgatggcgtcatcaatcgcattttccgccttccttgcgctgacccttacccctgctttgtgtgccacaatgttgaagacaatcccgaaagggcatcacgaagagaaaaaaggtttcttcggctggtttaacaagaaattcaacagttggacgcacggttacgaaggccgggttgccaaagtgctgcgtaagactttccgcatgatggttgtctatatcggcttggcggttgtgggcgtgttcctgtttatgcgcctgccgacttcgttcctgccgaccgaagaccaaggcttcgtcatggtcagcgtacaactgcctgcaggagcgacccaagagcgcaccaatgcgactttggcgcaagttacccaactggcgaaaagcattcctgaaatagaaaacatcattaccgtttccggcttcagcttttcgggcagcggtcagaatatggcgatgggttttgccatattgaaagattggaacgagcgtaccgcgcccggcagcgatgccgttgcgattgccggcaagctgacgggtatgatgatggggacgcttaaagacggttttggcatcgccgtcgtcccgcctccgattttggagttgggcaatggttcgggcctgagcatcaacctgcaagaccgcaacaataccggccataccgcattgctggcgaagcgcaacgagttgattcagaaaatgcgtgccagcggtttgtttgaccccagcaccgtccgtgccggcggtttggaagactcgccgcagttgaaaatcgacatcaaccgtgccgccgcggcggcgcaaggcatttcgtttgccgacatccgcaccgcattggcaagtgcgctgagttcgtcttatgtcagcgacttcccgaaccaaggccgtctgcaacgcgtgatggtgcaggccgacgaggatgcccgtatgcagcctgccgatattttgaacctgaccgtgccgaacaaatccggcgtcgccgtaccgctttccaccattgctactgtttcttgggaaaacggtacggaacagagcgtacgcttcaacggttatccttcgatgaagctgtccgcttcgcctgcaaccggcgtttccaccgggcaggctatggcggcggttcaaaaaatggttgacgaattgggcggcggttacagcttcgaatggggcggacagtcgcgcgaagaggcaaaaggcggctcgcaaaccctgattttgtacggtttggcggttgcagccgtatttttggtacttgccgcgctttatgaaagctggtcgattccgctggcggtcatccttgtgattccgttgggtttgatcggtgcggctgcgggcgtaaccgggcgcaacctgtttgaaggactgttgggcagcgttccctcgttcgccaacgacatctactttcaagtcggtttcgttaccgtgatgggtttgagtgcgaaaaacgcgattttgattatcgaatttgccaaagaccttcaagcgcaagggaaaagcgcggtcgaagctgctttggaagccgcccgcctgcgtttccgtccgattatcatgacctcgttcgcctttattttgggcgtggttcccctgtatattgccggcggtgcaagttctgccagccagcgcgccatcggcacgaccgtattctgggggatgctcatcggcacgctcttgtccgtgttccttgttccgcttttctatgtggtggtgcgcaaattcttcaaagaaaccgcgcacgaacacgaaatggcagtaaaacacgccgccgaagcgggcatcaccggttcggacgacagccaacattaa

SEQ ID NO: 36674 - DNA, 1335 bp, Neisseria meningitidis
atggcaaaaaaatatttcggcacggacggcgtgcgcggcgaagtcgggcagtttccgattacgcccgattttgtattgaaactcggctatgcggcggggcaggttttggttcagcacgacaccgaccagaaaccgaccgttttgatcggcaaggatacgcgtatttccggttatatgctggaagccgctttggtggcaggttttaccgccgcaggtgtcaacgttatccaaaccggtccgctgcctacgcccggcgtggcttatctgacccgtgcgctgcgtttgtccgccggtgtgatgatttccgcgtcgcataatgcctattccgacaacggcatcaaattctttgccgagggcggcgtgaaactgagcgatgaaatcgagttggaaatcgaagccaaaatcgacgaagaaatgaaaacccagccttctgcacgcctcgggcgcgcacgccgcatcagcggtgcggacgaccgctatatcgaattttgcaaatccaccttccctacgcattccgatttgcgcgggctgaagctggtcgtcgatgccgccaacggcgcggcttacagcgtcgcacccaaagtgtttcacgaactgggcgcgcaggtcgtcagcatcggcgacgaacccgacggctacaatatcaatgaaaaatgcggcgcgacccataccaaaaccctacaggccgccgtgttgcaaaacgaggcagactacggcatcgccttggacggcgacggcgaccgcctgatgatggtcgataaaaacggtaaggtttacgacggcgacagcctgatttacgtcatcgccaaagcccgcgcccgagaaggtatcaacatcggcggcgtggtcggcacggtcatgaccaatatggcgatggaaatcgccctgaaagagcagggcgtcgatttctgccgcgccaaagtcggcgaccgctatgtgttggaacagctgaaccaacgcagctggctcatcggcggcgaagccagcggccatattttgtgcatggacaaacacaacaccggcgacggcattatttccgcgctgcaagttttggcggcactgcaaacgctgaaccaagacctcgccaccgtttgcgccgattggcagccgtatccgcaaactatgattaacgtgcgcatccaaaaaggtcagaaatggcaggaagcctcaaaagacgtgttggcggaagtggaaaaagaactcgaaggcaaagggcgtgtcgtgttgcgcgcttcgggaaccgaacccgtcgtgcgagtgatggttgaggcgcggcaggcggattgggcgcgcgacggtgcggaacgtattgcttccgccatcggcagcctttag

SEQ ID NO: 36675 - DNA, 189 bp, Neisseria meningitidis
ttgtttcgagttacagcctatcaaaatcgaaaaaaaaatgccttgaccggcattgccttcttaagggggatagatgtctatgaccctcccatttcaaaagaaaaagcattaaaagccttagagaaacatcctgaaatttatcagaagtttcggcatttctttccgtttgtagaactgcccccgctttaa

SEQ ID NO: 36676 - DNA, 618 bp, Neisseria meningitidis
atgtccgcttatcgaaaaggcaacatctttatcatttcggccgcttccggcacgggcaaaaccacgctggtgtcgcggctgttggcaaatcataacggtttgcgcgtttccgtgtcgcacacgacgcgtccgccgcgtgaaggcgaagtaaacggcgtgcattatcactttgtctccaaagaagagtttgagtcgcttatcgcgcaggaagcttttttggaatacgccgatgtgttcggcaactattacggcacaagcgcggagggcgtgaatgcgttggcggcggcaggctatgacgtgattttggaaatcgacgttcagggtgcggctcaggttcgagatgcgctgcccgaagccgtcggcatctttatcctgccgccttctttcgacgtacttgccgcgcgcctcaacgggcgcgggacggacagtcgggaagttatccaaaggaggctgtcgaaggcaaggcatgaaatcgaacagtccgtattgttcgactttgtcgtggtcaatgacgacttggcgcgggcggaggaggatttgcgccatattgtgaatgcctgccgtctgaaaaggtcgcggcaactgggatttattgcagatttgttggaaaattcctaa

SEQ ID NO: 36677 - DNA, 567 bp, Neisseria meningitidis
ttgttattgcccttcgccacgctggcattgtgcaccaatgcttttgccgctccgcccagcgacgcgtcgttggcgcgttggctggatacgcagaattttgaccgggatatagaaaaaaatatgattgagggctttaatgccggatttaaaccgtatgcggacaaagcccttgccgaaatgccggaagcgaaaaaagatcaggcggcaaaagcctttaaccgctatcgtgagaatgttttgaaagatttgattacgcccgaagtgaaacaggctgtccgcaatactttattgaagaatgcccgtgagatatacacgcaagaagaaattgacggcatgattgccttttacggttcgcccgccggtcagtccgtcgttgccaaaaatccgcgcttaatcaagaaatcgatgagtgaaatagcggtatcttggactgcattgtcagggaaaatcgcgcgacatcatctgcccgagtttacggaagagttgcgacgcatcatctgcggcggtaaaaatcccgatgcgggctgcaagcaggccggacagcttgggaaaaggcatcagaaataa

SEQ ID NO: 36678 - DNA, 1284 bp, Neisseria meningitidis
atgaaccgtaacgaaattttattcgaccgcgccaaagccatcatccccggcggcgtgaattcccccgtccgcgcattcggcagcgtcggcggcgtgccgcgcttcatcaaaaaagccgaaggcgcgtatgtttgggacgaaaacggcacgcgttataccgactatgtcggctcttgggggcctgcgattgtcggacacgcgcaccccgaagtcgtcgaagccgtgcgcgaagccgcgttgggcggtttgtcgttcggcgcgcccaccgagggcgaaatcgccattgccgaacaaatcgccaaaatcatgccgtccgtcgaacggctgcgcctcgtcagctccggtaccgaagcgacgatgaccgccatccgtttggcacgcggttttaccggtcgcgacaaaatcatcaagtttgaaggctgctaccacgggcattccgacagcctgctggtgaaagccggcagcggcctgctgacgttcggcaatccttcttccgccggtgtgcctgccgactttaccaaacacactttagtccttgagtacaacaacatcgcccaattggaagaagcctttgctcaaagcggcaatgacattgcctgtgtgattttggagccttttgtcggcaatatgaaccttgtccgcccgaccgaagccttcgtcaaagccctgcgcgaattgaccgaaaaacacggcgcggtgttgatttacgacgaagtgatgaccggtttccgcgtcgcgctcggcggcgcacaatcgctgcacggcatcatgcccgacctgaccacgatgggcaaagtcatcggcggcggtatgccgcttgccgcgttcggcgggcgcaaagacattatggaatgtatttccccactgggcggcgtgtatcaggcaggcaccttgtcgggcaacccgattgccgtcgccgccggtttgaaaacgctggaaatcatccgccgcgaagggttttatgaaaacctgacggcgcgtaccgaacagttggttcaaggttttcggacggcagcggatgcggcgggcatcgagttcaccgccgacagcgtgggcggtatgttcggtctgtatttcgccgcacacgcgccgcgaaactatgccgatatggcgcgttccaatattgacgctttcaaacgcttcttccacggtatgctcgaccgcggcattgccttcggcccgtccgcttatgaagcaggtttcgtttctgccgcgcatacgcccgagctgattgacgaaacggttgcggttgcggttgaagtgttcaaggcgatggctgcatga

SEQ ID NO: 36679 - DNA, 786 bp, Neisseria meningitidis
gtgaagcatatcagttcggcaaacaatgaacacatcagacacctgcaccgcctgttgtctcaagggaagttcagacggcaatacgcccaaaccgttttggagggcgtgcacctgcttcaggttttcctgcaatccggcggaaggccagtcggggtatatattcccgaagcgaaaatgccgtctgaagaagtccgtaaattgacggcggttttgccggaagacggggttttttccgtttcagacggcatattgaagaaaatcagcagcctgacttgcgcggatgatgtgcttgcgctgattgatattccggatgcgggtgctttgccggccggcggcgactgtgtggttttggacggcgtgcaagatccgggcaatgtcggcacggtgttgcggagcgcggcggcggcaggaatcggcgcggtcgttttgggcaaaggttgtgcggacgcgtggtcgcccaaagtgctgcgagccggaatgggcgcgcatttcttgtcggagatttatccgcaggcggatttggaaatatggttggcgagctataaaggccgtgtgtttgccaccgcgttgcgtgaggaaaaacaggcggttctgtataacgaagatttgcgcgaaccgacagcctgggtgtttggcaacgaaggcgcgggggtcggtaaagcggttttggacagggcggacaagtgtgtcaggattccgatgcacgatgcaaccgagtctttaaatgtcgcgatggcggcgacaatctgcctgtttgaacagatgcggcagcggtcggcgtattga

SEQ ID NO: 36680 - DNA, 1371 bp, Neisseria meningitidis
atgatcaaccccatcgcctcgctttcccctttagacggccgttatgcccaatccgttgaagcattgcgcccgattttttccgaatacggcctgatgaaagcgcgcgtcaaagtcgaattaaactggctcaaagccctcgccgccgagccgaagattgccgaagtgccgcccttcagtgccgaaacgcttgccgaaatcgacacggtgattgaaaacttttcattggaagacgcggccgccgtcaaagccatcgaagccacgaccaatcatgatgtcaaagccattgaatattggctgaaaaaacgttttgccgaagtgccggaagtcgccgccgtgagtgagttcatccacttcgcctgcaccagcgaagacatcaacaacctgtcccacgctttaatgctgcaagaagcgcgtgaggctgttttgctgccgaagctggccgaaatcatcgaaaaactgaccgctatggcgcacgaccttgccgccgtcccgatgatgagccgcacccacggccagcccgccacgccgaccactttgggcaaagaaaccgccaatgtcgtgtaccgcctgcaacgccagtttaaaaacctgcaagcgcaagagttcctcggcaaaatcaacggcgcggtcggcaattacaacgctcacatggtcgtctatcccgacgtcgattgggaaacccactgccgtaacttcgttgaaatcagcctcggcctgaccttcaacccctacaccatccaaatcgagccgcacgactacatggctgaattcttccaagccatcagccgtgtcaacacgattctgatcgacttcaaccgcgatgtttggggctacatttctttgggttacttcaaacaaaaagtcaaagcaggcgaagtcggttcttccaccatgccgcacaaagtcaaccccattgactttgaaaactccgagggcaacctcggtatggccaacgccgtattgggctttttgtccgaaaaactgccgatttcccgttggcagcgcgacctgaccgacagcaccgtcctgcgcaatatgggcgtgggcgtgggctatgccgtgttgggtttcgccgcccacttgcgcggtctgaacaagcttgaaccgaatcctgccgcccttgccgccgatttggacgctacttgggagctgctcgccgagccgattcaaaccgtaatgcgtcgttacggcgtggccaatccttacgagaagctgaaagacctgacgcgcggtaaagacggcattacgcccgaagtgctgaaagtcttcatcgaatcgctggaaatccctaccgaagccaaagcaaaattgcttgagctgacccccgcactgtatgtgggcaaggctgaagcgttggcgaaacggatttga

SEQ ID NO: 36681 - DNA, 321 bp, Neisseria meningitidis
gtgtgcggcggtcttggctctgacgggcaaaaatccctgtattattacggtggctatcccgataccgtctatgaaggtttgaaaaacgacgacacttcgttgggcaagcagaccgaaaagatggaaaaatactttgtggaagccggcaacaaaaaaatgaatgccgccccgggtgcgcacgcccatctgggactgctgctttcccgttcgggagacaaagagggcgcgttccgccagtttgaagaagagaaaaggctgtttcccgaatcgggcgtatttatggacttcctgatgaaaacaggtaaaggaggcaagcgatga

SEQ ID NO: 36682 - DNA, 615 bp, Neisseria meningitidis
atgtcttttgataactatcttgtccctaccgttatcgagcagagcggtcgcggtgagcgtgcattcgatatctattctcggcttttgaaagagcgcatcgtattcttggtcggcccggtaaccgacgagtccgccaatctggtggttgcccaactgttgtttttggaaagtgagaatccggataaggatattttcttctatattaactcgccaggcggttcggtaacggccggtatgtcgatttacgacaccatgaattttatcaagcccgatgtatcgactttgtgcttggggcaggcagcaagtatgggcgcgttcttattgtcggcaggcgaaaaaggcaaacgtttcgccctgcccaacagccggattatgattcaccagcctttaatcagcggcggcttgggcggtcaggcatccgatattgaaattcacgcacgcgaactgttgaaaatcaaagaaaaactcaaccgcctgatggcgaaacattgcggccgcgatttggcagatttggagcgcgacaccgaccgtgataatttcatgtccgccgaagaggctaaagaatatggtctgattgatcaaatcttggagaaccgtgcttctttacagttttaa

SEQ ID NO: 36683 - DNA, 2178 bp, Neisseria meningitidis
atgacacgcttcaaatattccctgctgtttgccgccctgttgcccgtgtacgcgcaggccgatgtttctgtttcagacgaccccaaaccgcaggaaagcactgaattgccgaccatcaccgttaccgccgaccgcaccgcgagttccaacgacggctacactgtttccggcacgcacaccccgctcgggctgcccatgaccctgcgcgaaatcccgcagagcgtcagcgtcatcacatcgcaacaaatgcgcgaccaaaacatcaaagcgctcgaccgcgccctgttgcaggcgaccggcaccagccgccagatttacggctccgaccgcgcgggctacaactacctgttcgcgcgcggcagccgcatcgccaactaccaaatcaacggcatccccgttgccgacgcgctggccgatacgggcaatgccaacaccgccgcctatgagcgcgtagaagtcgtgcgcggcgtggcggggctgctggacggcacgggcgagccttccgccaccgtcaatctggtgcgcaaacgcccgacccgcaagccattgtttgaagtccgcgccgaagcgggcaaccgcaaacatttcgggctgggcgcggacgtatcgggcagcctgaacaccgaaggcacgctgcgcggccgcctggtttccaccttcggacgcggcgactcgtggcggcagcgcgaacgtagccgcgatgccgaactctacggcattttggaatacgacatcgcaccgcaaacccgcgtccacgcaggcatggactaccagcaggcgaaagaaaccgccgacgcgccgctcagctacgccgtgtacgacagccaaggttatgccaccgccttcggcccgaaagacaaccccgccacaaattgggcgaacagccgccaccgtgcgctcaacctgttcgccggcatcgaacaccgcttcaaccaagactggaaactcaaagccgaatacgactacacccgcagccgcttccgccagccctacggcgtagcaggcgtgctttccatcgaccacaacaccgccgccaccgacctgattcccggttattggcacgccgacccgcgcacccacagcgccagcgtgtcattgatcggcaaataccgcctgttcggccgcgaacacgatttaatcgcgggtatcaacggttacaaatacgccagcaacaaatacggcgaacgcagcatcatccccaacgccattcccaacgcctacgaattttcccgcacgggcgcctacccgcagcctgcatcgtttgcccaaaccatcccgcaatacggcaccaggcggcaaatcggcggctatctcgccacccgtttccgcgccgccgacaacctttcgttgatactcggcggcagatacagccgttaccgcaccggcagctacgacagccgcacacaaggcatgacctatgtgtccgccaaccgtttcaccccctacacaggcatcgtgttcgacctgaccggcaacctgtcgctttacggctcgtacagcagcctgttcgtcccgcaatcgcaaaaagacgaacacggcagctacctgaaacccgtaaccggcaacaatctggaagccggcatcaaaggcgaatggcttgaaggccgtctgaacgcatccgccgccgtgtaccgcgcccgtaaaaacaacctcgccaccgcagcaggacgcgacccgagcggcaacacctactaccgcgccgccaaccaagccaaaacccacggctgggaaatcgaagtcggcggccgcatcacgcccgaatggcagatacaggcaggttacagccaaagcaaaacccgcgaccaagacggtagccgcctgaaccccgacagcgtacccgaacgcagcttcaaactcttcactgcctaccactttgcccccgaagcccccagcggctggaccatcggcgcaggcgtgcgctggcagggcgaaactcacaccgaccctgccacgctccgcatccccaaccccgctgccaaagcccgcgccgccgccaacagccgccaaaaagcctacgccgtcgccgacatcatggcgcgttaccgcttcaatccgcgcgccgaactgtcgctgaacgtggacaacctgttcaacaaacactaccgcacccagcctgaccgccacagttacggcgcactgcggacagtgaacgcggcgtttacctatcggtttaaataa

SEQ ID NO: 36684 - DNA, 855 bp, Neisseria meningitidis
atggcagaaattactgcaaaaatggttgccgatctgcgcgccgctaccggcctgggcatgatggaatgcaaaaaagccttggttgaagccgaaggcaacttcgacaaagccgaagaaatcctgcgtatcaaatccggtgcgaaagccggtaaactggccggccgtaccgctgccgaaggcgtattggcttacgcgatcaacggcaatgtcggcgcattggtcgaagtaaactgcgaaaccgacttcgttgcgaaagacgcgggcttcgtagaatttgccaacttcgttgcgaaaaccgccgccgagaaaaaaccggcttctgttgaagaactgagcgaactggttgaagcagaacgcaaagccatcatcgccaaattgggcgagaacatgtctgtccgtcgcttccaagtgatcgacactgccaaccaactggttgcctacatccacggcgcattggcgaccgaaggcgtattggttgagtacaaaggctctgaagacgtagcacgcaaaatcggtatgcacattgttgccgctaaaccacaatgcgtaagcgaagccgaagtagatgccgaaaccgttgaaaaagaacgccacatctacaccgaacaagccatcgcttccggcaaacctgccgacatcgccgctaaaatggttgaaggccgtatccgcaaattcttggctgaaatcactctgaacggccaagcattcgtgatgaaccccgatcaaactgttgcccaattcgccaaagaaaacggcactgaagtggtcagcttcgtccgctacaaagtaggcgacggtatcgagaaagccgttgtcgactacgcagccgaagtagccgcagccgccaaagtgtaa

SEQ ID NO: 36685 - DNA, 696 bp, Neisseria meningitidis
gtggcgcggggtgttaaggtagccggtaccgacaggttgacgaggaatattttgatgaaactgtatatttacgaccattgcccgttttgcgtgcgtgcgcggatggctgccgggctgtttggcgcggacgttgaagaagccgtgctggcaaacgacgacgaggcaacgccgatcggtatgatcggtgcgaaacaagtgcccgtcctgcaaaaagaagacggttcgtttatgggcgagagtttggacattgtgcggcatttcgaccgcgaagaccgtctgaaagacgaagtccgccccgagatacgggcgtggctggacaaggtgggcggatacaacgacaaactggtgcagccgcgcgtgatcaaaatcgggctgcctgaatttgcaacgccggaagcggtgaaatattttacagacaaaaaagagaaaagcatcggcagcttttccgccaatttgaataaaaccgcccaatacctcgaacggataaacgcagatttgcaagagttggaaaatttgatggacggtgcttcagacggcatcaacggcggaatcggtatggaggatattttggttttccccgttttgaggaatctgaccgtggtgcgcggcatcgaatggccccaaaaggtgatgggttatttgatgacgatgagtgaaaaatcgggcgtgccgctttattttgacagggcattgtaa

SEQ ID NO: 36686 - DNA, 564 bp, Neisseria meningitidis
atgcgccatttggaaaacaacggctatgcgaacgttgccggattggaacgcatcctcgccgtcaaaaccgacaattacaaagaaaaagaaaacctgctccatgaaattttcagcaaaagcaggataggcgataccgaattgttcgccgtggacgaaaaccttgtaaaacgtttgtttttatcgcttcgcggcgaaatcgtgtttccgaaaaacgaaacggcggaatcggaatttgaaaaaagcgtccacgaacgcaggcaggaagggaatgccgggtccggccgcaaacaactgcttgatttggtacggcgcggacaccgggaatacccttacgcgctgccccggcttttggcgggcgcggcatcctacaagccgaaaaaatcgaaaatccgcctttttaaagaagcatatttcggcaaaagcggcacgaggctgaccgacgaaattgcagacggcatccatatttacacctgtttttcgcgggcggatttggaaaaagcctattccgaatatttggaacttttcaaatccgaatcggatgccgaaggcagaaagccgcagtaa

SEQ ID NO: 36687 - DNA, 1221 bp, Neisseria meningitidis
ttgatcgacatgggtttggagcgcacgagcgaagtgaaaaaacgcatgaagctcgagccgcaatgccccgtcgtcgttgtcgcgggaaccaacggcaaaggttcggtctgtgcctacctgacacagatttacaaacaggcgggctacaaaaccggtacgctgaccagcccgcatttattacgttacaacgaacgcatcgctgtcaacgccgaacccgtttcggacgatacgattattgcctctttcgagcgcatcgaagcggcgcgcggcgaaatatcactgacttattttgaattcaatgccttggcggccgtcgacatcttcatgcgcgaacaggttgacgtgatgatattggaagtcggcttgggcggacgcttggacgcggtcaacgcatttgacggcgattgcgcggtggttaccagcgtggatttggaccatcaggcatttttgggcgatacggtcgagcaggtcggctttgaaaaagcaggcgtgttccgcggcggcaaacccgccatctgcggtcaaaaccccgcgcccgcatcgttgctttcacacgccgaagccataggcgcgaaactgctgatggtgcagcgcgatttcgagtttcacgcgatggaaaacatccaatggaactaccgcttccggccgcagcattcagacggtcccgcacgcaaccgcaatgccctgcctttccccgcattgcgtggcgcataccagctttccaacgccgcctgcgcgttgaccgtattggaatgcttgaacgacaaattgcctgtggacatcggcgccatcaaacgcggattgctgctggttgaaaatcccggacgcttccaagtcctgcccggccgtccgctgaccgttttggatgtcggacacaatccccacgctgcccgcgccctgcgccgcagcctgattaatttggcgtttgcgcaaaaacgcaccgccgtattcagtatgctgtccgacaaagacatagacggcgtgttggaaatcgttaaagaccagtttgacgagtggtatatcgcaccgttggacgtaccgcgcggcatgacgctcgagagcctgcaaaacaaactgcacgaacacagcatcgaaaacatacagacattcgccgccgtccgcgaagcataccgggcggcagcctcaaaagcgggcgaaaacgacagaatcgtcgttttcggctcatttcataccgttgccgatgtcatgtcggtactttaa

SEQ ID NO: 36688 - DNA, 279 bp, Neisseria meningitidis
atgccggccgtcgatttgatccgcgaacgcctgcagacgctcgatccgctggtgttggaaatcggcgatgagagccatctgcacaaaggacacgcgggcaataccggcggcggacattatgccgttttggtcgttagcggccgttttgaaggcgtaagccgcctgaaccgccagaaaacggtcaaatcgctgctcaaagatttgttttcaggcggcatgattcacgcgctcggcatccgggcggctacccctgacgagtatttccatacggcggactga

SEQ ID NO: 36689 - DNA, 1311 bp, Neisseria meningitidis
atgaacacgccgcatccgcgcccgaaaatcgccgtcatcggcgcaggctgggccggcttgtccgccgccgtcaccttgacgcggcacgccgacgttaccctgtttgaagccggccggcaggcgggcggcagggcgcgcacactggccggaaataccgacggtttcggttttttggacaacgggcagcacattttgctcggcgcataccggggcgtgttgcgcctgatgaaaaccatcggttcggatccccgtgccgcctttttgcgcgtaccgctgcactggcatatgcacggcggtttgcagttccgcgccctccccctgcccgcaccgctgcatattttgggcggcgtgctgcttgcccggcgcgtaccgtccgcattcaaagccaaactgcttgccgatatgtccgatttgcagaagtccgcacgcctcggacagcccgacacgacagttgcacaatggctgaaacagcggaacgtgccgcgtgccgccgtgatgcagttttggcagccgctggtgtggggcgcgctcaacacgcctttggaaaccgcaagcctgcgcgtgttgtgcaacgttttgtccgacggcgtgctgacgaaaaaatccggcagcgactatctcctacccaagcaggatttgggcgcaatcgtcgccgaacccgccttggcggagcttcaacggctcggcgcggacatccgcctcgaaacgcgcgtatgccgtctgaacaccatcccggacgggaaagtgctcgtcaacggcgaagctttcgatgccgccgtccccgccaccgcgccctaccacgccgccgcgctcctgcccgaaggcacgcccgaacacgttcagacggcatatcaaaaccttcgctatcacgccatcaccaccgtctatctgcgctacgccgaacccgtccgcctgcccgccccgctgaccggccttgccgacggcacggcacaatggctgctttgccggggcaggctcggactgcctgaaaacgaagtgtccgccgtcatcagcgtttccgaccgcgtcggcgcgtttacaaaccgagcgtgggcggacaaagcccacgccgacctcaaacgcatccttccgcatttgggcgaacccgaagccgtgcgcgtcatcaccgaaaaacgcgccacaaccgcagccgatgccccgccgccggatttgtcgtggctgcaccggcaccgcatcttccccgccggcgactacctccacccggactaccccgccacgctcgaagccgccgtacaatcaggtttcgcggcggcggaaacctgcctgcaaagcctgagcgatgccgtctga

SEQ ID NO: 36690 - DNA, 825 bp, Neisseria meningitidis
atgattaagaagataatcggcggcatcataccgatttttacggcggttttcatccctgcatcggcaggcgcggcggatttgatgctggcgcaggaatacaaagggcaggacattgccggctgggcgatgagcgagaaactcgacggcgtgcgcgcctattgggacggaaagcacctgataagccgtcaggggtatgcgtttgctccgcccaaaggttttaccgctcagtttccgccttatcctttggacggcgaattgtatagcggacgcggtcagttcgagcagatttccgctaccgtgcgttctgtttcttcagactggcgcggcatccgcctgcacgttttcgatgtacccaaggcgcagggcaatctctaccaacgtttggcagtcgcaacgcagtggctgaaaacgcatccgaacgcgccgattaccatcatcccgcaaatcaaagtgcgcgaccggcagcacgcgatggactttttaaaacaaatcgaagcgcagggcggcgaaggcgtgatgctgcgtcagcccgaatcccgttacagcggcggcaggagcagccaattattgaagctgaaaagccaatacgacgacgaatgcacggtaacgcggcactatgagggcaaagggcgaaacgccggacggctgggcgcggtcggctgcaaaaaccgacacggcgaattccgcatcggcagcggtttcaaagacaaagaccgcgacaacccgcccaaaatcggcacgctgattacctatcgctaccgtggttttacgcggaaaggcacgccgaaattcgccacgtttgtgcgcgcgcgtaccgaccgctga

SEQ ID NO: 36691 - DNA, 1200 bp, Neisseria meningitidis
ttgtccgacaatgcttgcgaaatccattccctgctcaaatccgacgataccgaccgtatgctcgaagcactcgataaactcggcgttgaaatcgaatatcttgccgaagaccgtctgaaagtgcacggcacaggcggacgcttccccaaccgcactgccgatttgtttttgggcaacgcgggcacggcgttccgcccgctgaccgccgcgcttgccgttttgggcggcgattatcgcctgcacggcgttgcgcgtatgcacgaacgccccatcggcgatttggccgatgcactgcggattgccggcgccgatgtcgaatatctcggcaaggaacactatccgccgcttcatatcggcgaacgccaagacaacggcgagcgcgtgattccgattaaaggcaatgtatccagccagtttctgaccgcccttttaatggcgttgccgctgaccgggcaggcgtttgaaatccgtatggtcggcgagttaatttccaagccctatatcgacattactttaaaactgatggcgcaattcggcgtacaggttatcaatgaaggctaccgcgtcttcaaaattcccgccgatgcgcactaccacgcgcccgaacacttgcacgtcgaaggcgatgcctccagcgcgtcctacttcctcgcagccggtttgattgccgccacgcccgtccgcgttaccggtatcggcgcaaacagcatacagggcgatgtcgcctttgcctgcgagctggaaaaaatcggtgcggacgtggtttggggcgaaaacttcgtcgaagtctcgcgcccgaaagaacgtgccgtccaagcctttgatttggatgcaaaccatatccccgatgccgccatgaccctcgccgtcgtcgcgcttgctacagggcaaacctgcacgcttcgcaacatcggttcgtggcgcgtcaaagagaccgaccgcattgccgcaatggcgaacgagttgcgcaaactcggtgcaaaagtcgccgaagaagccgaagcaattcacatcaccccgcccgaaacgccgacacccgacgccgtcatcgacacttacgacgaccaccgcatggcaatgtgtttctcgctggtttcgctgttgggcgtacccgtcgtcatcaacgatccgaaatgcacccataaaaccttcccgacttatttcgacgtgttctcttcactgaccgaaacaacggaataa

SEQ ID NO: 36692 - DNA, 1131 bp, Neisseria meningitidis
atgattaaaatcagcacccgcttcgatgccggctcggtcgttgtcaaagacctgaccgatccttccaacatccgcctcgccctgcgtcccgacaacgcctccgattttgcacaatggttctacttccggctgcaaggcgcggcatatcaaaactgcatcatgcattttgaaaacgcggcagaagccgcctacccgaaaggctgggaaggctatcaggcgtgtgcctcatacgaccgccgcaactggttccgcgtaccgacttcctacgaaaacggcgtactgaccgtcaatcatacgccgctgtccaacagcgtgtattacgcctatttcgaaccttactccgaagaacagcatttaaacctcctcggcgacgcgcaaggcagcggcctgtgccgcatcgacgacttgggcagcaccgtgcaagggcgcgacatcaatctgctgaccataggcaaccaggtcgaaagcgatttgaaaatctggattaccgcccgccagcatccgggcgaaaccatggcggaatggtttgtcgaaggactgctcggcaggctgctcgatccgcaagacccgacagcacgcaccctgctcgaccgcgccacgttctatatcgtccccaatatgaaccccgacggttcggcactgggcaaccttcgtaccaacgccgccggtgcgaacctcaaccgcgagtgggaaaacccgactgttgaaaaaagccccgaagtgttcttcgtgcgtgaaagaatgttggaaaccggcgtggatttgtttttggatatccacggcgacgaagggctgccctttgtctttgttgcaggaactgaaggcgtgccgaactacaatccacgcatttccgcgttggaaacacagttcaaaaccgcccttttgaacgccagccccgatttccaagatgaatacggttacgaaaaagatgcgcccggtcaggcaaacgtgaccttggcaacaaactgggtcggcaaccgtttcaactgccttgcctatacgttggaaatgccgttcaaagacaatgccaacctgcccgacgacgacttcgggtggaacggtcaacgttcgttgcgcctgggcgaagccgcgttgtccgcgatcctcaacgtcatcggcgatttgcgctga

SEQ ID NO: 36693 - DNA, 483 bp, Neisseria meningitidis
atgccgtctgaaaatccgtgttcggacggcattcccttctgtcggaacggacagtccgaaaccacagattgggctataatctcttttttgcgcataccgcgcgacagcaaaggaaaaaccatgtacgaagtcaaccgcagcgtattcgtcctcatccctttagaacctttttggaactggctgcaaaccctgccgggcaaccacctcgacggactgactcttgaagacatccaagccgacgccaattcctaccttgtccgcccgtgcgaaaccgccgacgaagtatgggacgaaatcgaagcccgttttgaagacattttcgccgccgaacttgccgactggtgcgaagacgaacgcgagtggcctgcgctcgatgccgacattttcaacgaatggttcgacatccagctttctaccgtcatcaccgacctcgaacacgaaccgcttgcccgcgaagccttccaacccatcaacctgaactga

SEQ ID NO: 36694 - DNA, 846 bp, Neisseria meningitidis
atgaatattgcggacggacggcaggcgtttcccgcacctgcaaaactgaatctcgatttgaggattaccggcaggcgggaagacggttatcacaatatcgaaagcatattctgcctgatagatttgcaggataccgtatatttgaaaccgagggacgacggcaaaatcatcctgcacaatcctgtcggcggaataccgcaggaagccgatttgagctaccgtgccgcatcgttgctgcaaaaatatgcgcgcaaccccgccggcgtggaaatatggctggacaaaaaaatcccgacaggggcgggtttgggcggcggaagctcggatgcggcaaccgttttgctggtgttgaaccgttggtggcagtgttcccgaacgacgcagcagctgattgacttgggcgcaactttgggtgcggacgtaccattttttattttcgggaaaaatgcttttgcaagcgggataggtgaaaaactgataggaatggatattccgaaacagtggtatgtcatcgtcaaaccgcccgtccacgtttccactgcaaaaattttcacacacgaaggcttgacacgaaattccgcctcaagcataatgccgactttccaaaacctgcaaccgtttagaaatgatatgcaggcagttgtatttaaagaataccctgaagtttggaaagcctattccgaattgtcccgatatggatttgccttaatgacaggttctggtgcgtgtgtattcacggcgtgtcaagatagggatagcgcatacaatatataccgacaagtttcaggtttgtacgaggcatatttggcagagggtctttcaaaacatcctttgttgtccgtataa

SEQ ID NO: 36695 - DNA, 1452 bp, Neisseria meningitidis
ttggggaatgcgaaacggtgtgcgcttatactgcggacgatttgtttcgcggttttgcgcccgaaacggatggagaggtgtgggaaacggtctgtcggagtagaatacgcgtttgcgtttgaatacagtaagaagaaaagagagaaacttatgccgtctgaacatcaacacatatcatcattgctcgattttgaccgtacccatctgcttcatccctatacttccatgaccgatccgctgcccgtttatcctgtcaaacgtgcagaaggggtgtttatcgaattggcggacggcacgcggttgattgacgggatgtcctcctggtggtgtgcgatacacggctacaatcatcctgttttgaatcaggcggttgagacgcagatgaaacagatgtcgcatgtgatgttcggcggtttgacgcatgagccggcggtggagctaggcaaattattggtcgggattttgccgcaggggctggaccgtattttttatgcggattcgggttcggtttcggtggaagtcgcgttgaagatggtggtgcaatatcagcaggcgcggggtttgcgtgcaaaacaaaatatggcgacggtacggcgcgggtatcacggcgatacttggaacgcgatgtccgtctgcgatccggaaacggggatgcaccatattttcggcagcgcgttgccgcagcgttattttgtcgataatccgaaaagccgtttcgacgatgaatgggacggggcggatttgcagcctgtccgcgccttgtttgaagtgcatcatgcggatattgccgcctttattttagagccggtcgtgcagggcgcgggcggcatgtatttttatcatccgcagtatcttcgcggattgcgcgatttgtgcgacgagtttgatatcgttttgatttttgatgaaatcgccaccggattcgggcgcacgggcaagatgtttgcctgcgaacacgcggaggtcgtgccggatattatgtgcatcggcaagggtttgagcggcggctatatgacgctggcggcagcaatcacttcgcaaaaagttaccgaaacgatttcgcgcggcgaagcgggcgtgtttatgcacggcccgacgtttatggcaaacccgctggcgtgtgccgttgcctgcgcttcggtcaaactgcttttgtctcaagactggcaggcaaatatccgccgcattgaaagcatcttaaaaggccgtctgaaagccgcgtgggacattcgcggcgtgaaagacgtacgcgttttgggtgccatcggcgtgatcgagctggataaaggcgtggatatggcgcgttttcaagcggattgcgtggcgcagggcatttgggtgcgcccgttcggcaggctggtgtatctgatgccgccttacatcatttcagacggcgttttgaccaaacttgccgacaaaaccgtgcaaatcttgaaggaacacagcaaatga

SEQ ID NO: 36696 - DNA, 369 bp, Neisseria meningitidis
ttgaataatattcctgttgaaatccgtttgttgaaaaaccgtaccgtgttggttttgacttatggggacgaacctaaaaatctgcctgccgaatttttacgcgtctattcgccgagtgcggaagtgcgcggacacggcgtgggacaggatgttttgcagaccggcaaggcggatgtgcaaattacggatttgcagcctgtcggacagtacgcgctgaaaatcagtttttcggacgggcacgacagcggtctttacgattgggcgtatctgcatagactggcatacggatacgatgcgatgtggcaggaatatttggacaaattggcggcggcgggtgcttcccgttttgaaaagcgatcagattgttaa

SEQ ID NO: 36697 - DNA, 582 bp, Neisseria meningitidis
atgaaacacactgtatccgcatcggtcatcctgcttttgaccgcttgcgcgcaattacctcaaaataacgaaaacctgtggcagccgtccgaacacacccgcagtttcacggcagaagggcggttggcagtgaaagcggaagggaaaggttcgtatgcaaatttcgattggacataccaaccgcccgtggaaaccatcaatatcaatacccctttgggcagtacgctcgggcagttgtgtcaagacagggacggcgcattggcagtggacggcaaaggaaatgtctatcaggcggaaagtgcggaagaattgagcaggcagctggtcggtttcaaactgccaatccaatatctgcatatctgggcagatggcaggcgtgtggcgggcgcgccttaccgcatcctgccggacggcatattggaacaatacggttggactgtcggcagaaccgccgacagtggggggcaagtccgaacgttgcaactgaataacggaaatttgaacatcaggctggttttcaccgaaatcggtatgccgtctgaaaccgaaaccccggaacgctgtgcggcgcgcacgagataa

SEQ ID NO: 36698 - DNA, 798 bp, Neisseria meningitidis
atgctgaaacaacgggtaataaccgccatgtggctgctgccgctgatgctgggcatgctgttttacgcgccgcaatggttgtgggctgcattttgcggactgattgccctgattgccttgtgggaatatgcccgtatgggcggtttgtgcaaaattaaaaccaaccattacctcgccgcaaccttggttttcggcgtggttgcctatgcgggcggctggatgctgcctaatttggtttggtatgttgttttggcattttggctcgccgttatgcctttatggttgagattcaaatggaggctcaacggcggttggcaggtttatgccgtcggctggcttctggtcatgccgttttggttcgcgctcgtatccctgcgcccgcatcccgatgatgccctgccgctgctcgccgtgatgggtttggtgtgggttgccgatatttgcgcgtatttcagcggcaaggcgttcggcaaacacaaaatcgcaccggcaatcagccccggcaaaagctgggaaggtgcaatcggcggcgcggtttgcgtggcagtgtacatgaccgccgtacgaagtgccggctggctggcattcgatacaggctggttcgataccgtgttaatcggtttggtgctgaccgttgtcagcgtatgcggcgacctgttggaaagctggctcaagcgcgcggcgggcattaaagacagcagcaacctgctgtccggacacggcggcgtgttcgaccgtaccgacagcctgattgccgttatcagcgtctatgcggcgatgatgtcggttttaaattga

SEQ ID NO: 36699 - DNA, 1386 bp, Neisseria meningitidis
atgattgttgcttcccgctggcccttgctggaaaaggtatttttacggtttggaatgcctgttgccgtggtcgatttggaatcgacgggcggcaatctgtatgaagacagggtaaccgaagtggctttggtcaagtttgagcagggaagggtggtgaggcatgagtggttggttaatcctcaaaaaccgattccgcagtttgtggcggggctgacggggatttcagacggcatggttgccgatgcgcctgtttttgcagagattgccggcgagttgttttcggtattgaagggttgtgtgctggttgcacataacagccgtttcgactatacgtttttaaagcatgagtttcatcgtgtgggtatcggattttcatcgcctgctttgtgcagtgtgcagctgtcccggtgtctgtatccgcaattttacaagcacagcctggacagtatcatcgaaaggttggggattgttgtggaagacaggcatcgtgcgatggcggatgtgtcggcattgtgtgattatttggaatacagtctgtcggaacacggggttgaggagtggattaggcagtgtttccgtttgatgaatccgaaaccgctgcctgccgcgctgcccgaacggttgagggaacagttgtacggtttgcctgacggtatgggggtgctggcttgtttcgacggcggagggaaagtaaattacatcggtacgtttgaacgggtatatagcgaggtttcggctttattggattccggaaaagccccgtttgattggtgcaatacggaggaagtccgtttttttcccgcattgggcagcctgcatgcatataagattaaagcggaattggtcgggcgttatcattcgggttgttatgtatctgccaaaaatctgcttaaaacatttacgaccgtcaggtttgaaaaaggttcagacggcatgttgaatgcgaaaacagcggctttgaaaaacggtgtgacggataatccgcctaccggattattttccaataaaaaggcggcgagacgggctttgtcgtcgtgggcggaaacatacggattgtgtcctgcctcagccggtatccttccggatggttatgcagaggatgagccctgttccgtatatgtttcaggccgatgcgataaggcgtgcggccgttctgacgaacaggttttggcgtttgcacacaagttgcctattttggattggggaaaaatgcatgaggtggaaattaccgaaaccgatcctttaacgggggaaaaagttgttctgcatggaatgggcggcgcattggaaatggatgacgggttttggtatttcgataaagatttaccggatgcgtttaaggcgaagtttaaaacggacaggaaaaatattaaggaaatcggttaa

SEQ ID NO: 36700 - DNA, 2121 bp, Neisseria meningitidis
atgcgccgttttctaccgatcgcagccatatgcgccgtcgtcctgttgtacggactgacggcggcaaccggcagcaccagttcgctggcggattatttctggtggattgttgcgttcagcgcaatgctgctgctggtgttgtccgccgttttggcacgttatgtcatattgctgttgaaagacaggcgcgacggcgtattcggttcgcagattgccaaacgcctttctgggatgtttacgctggttgccgtactgcccggcgtgtttctgttcggcgtttccgcacagtttatcaacggcacgattaattcgtggttcggcaacgatacccacgaggcgcttgaacgcagcctcaatttgagcaagtccgcattgaatttggcggcagacaacgccctcggcaacgccgtccccgtgcagatagacctcatcggcgcggcttccctgcccggggatatgggcagggtgctggaacattacgccggcagcggttttgcccagcttgccctgtacaatgccgcaagcggcaaaatcgaaaaaagcatcaacccgcacaagctcgatcagccgtttccggataaggcgcgttgggaaaaaatccaacaggcgggttcggtcagggatttggaaagcataggcggcgtattgtacgcgcagggctggttgtcggcgggtacgcacaacgggcgcgattacgccttgtttttccgtcagccggttcccaaaggcgtggcagaggatgccgtcttaatcgaaaaggcaagggcgaaatatgctgagttgagttacagcaaaaaaggtttgcagacctttttcctggcaaccctgctgattgcctcgctgctgtcgatttttcttgcactggtcatggcactgtatttcgcccgccgtttcgtcgaacccgtcctatcgcttgccgagggggcgagggcggtggcgcaaggcgatttcagccagacgcgccccgtgttgcgcaacgacgagttcggacgcttgaccaagttgttcaaccacatgaccgagcagctttccatcgccaaagaagcagacgagcgcaacaggaggcgcgaagaagccgccagacattatcttgaatgcgtgttggaggggctgaccacgggcgtggtggtgtttgacgaacaaggctgtctgaaaaccttcaacaaagcggcggaacagattttggggatgccgcttacccccctgtggggcagcagccggcacggttggcacggcgtttcggcgcagcagtccctgcttgccgaagtgtttgccgccatcggcgcggcggcaggtacggacaaaccggtccatgtgaaatatgccgcgccggacgatgccaaaatcctgctgggcaaggcaaccgtcctgcccgaagacaacggcaacggcgtggtgatggtgattgacgacatcaccgtgctgatacacgcgcaaaaagaagccgcgtggggcgaagtggcgaagcggctggcacacgaaatccgcaatccgctcacgcccatccagctttccgccgaacggctggcgtggaaattgggcgggaagctggatgagcaggatgcgcaaatcctgacgcgttcgaccgacaccatcgtcaaacaggtggcggcattgaaggaaatggtcgaagcattccgcaattatgcgcgttccccttcgctcaaattggaaaatcaggatttgaacgccttaatcggcgatgtgttggcattgtatgaagccggtccgtgccggtttgcggcggagcttgccggcgaaccgctgatggtggcggcggatacgaccgccatgcggcaggtgctgcacaatattttcaaaaatgccgccgaagcggcggaagaagccgatgtacccgaagtcagggtaaaatcggaagcggggcaggacggtcggattgtcctgacggtttgcgacaacggcaaagggttcggcagggaaatgctgcacaacgccttcgagccgtatgtaacggacaaaccggcgggaacgggattgggtctgcctgtggtgaaaaaaatcattgaagaacacggcggccgcatcagtttgagcaatcaggatgcgggtggcgcgtgtgtcagaatcatcttgccaaaaacggtaaaaacttatgcgtag

SEQ ID NO: 36701 - DNA, 516 bp, Neisseria meningitidis
atgatgacactgaaaaccgccccgctcaaacgccgctttgccgccatgctgtacgaaatgctgctggtcggtgcggcaacctgtttggcagcattgattgccggtattgccgccatttttctgaatcccgtttctatcgcggtttctgcattggtaacaagtatcctgataatgggagcatggtggctttatttccgcgccaactggcatggtcaggggcagaccttggcgatgaggacatggaaaatcggcttgtgcgaccttaacggcatacagccgtctttgcacctgctgcgcctgcgctttatttgggcgtgcatatttatcgtatttatccctatgttagcctatgccggattacgccacttcctcggcattccgcccaagggcgcggccggcgcggcattgatttggctgattttaccgtgggggttcgcactgctgaatcccgatcggcagtttctgtatgattttcttgcaggaacaagattggtggcggtcaaaggaaagccttaa

SEQ ID NO: 36702 - DNA, 690 bp, Neisseria meningitidis
atgaagcgcaaaaatatcgcgctgattcccgccgccggcatcggggcgcgtttcggtgcggacaaacccaagcaatatgtcgaaatcggaagcaaaaccgttttagaacatacgattgggatttttgaacggcatgaggccgtcgatttgaccgtcgttgtcgtctcgcccgaagacacgtttgccgataaggttcagacggcatttccacaggttcgggtgtggaaaaacggcggacagacccgcgccgaaaccgtccgaaacggtgtggcaaaactgttggaaatcggcttggcatcggcggatgacaatattctggtacacgatgccgcgcgctgctgcctgccgtctgaagctttgacgcggttgatagaacaggcgggcaacgccgccgaaggcgggattttggcaatttccattgccgatacgctcaaacgcgcagaaggcggacaaatcagtgccactgtcgagcggacgagcctttggcaggcacaaacgccgcagcttttccgcgcggggctgctgcaccgcgcattggctgcggaaaacttggacggcattaccgatgaagcgtccgccgtggaaaaattgggcatccgccctttgctggtgcagggcgacgcgcgcaatttgaaactgacgcagccgcaggacgcatacatcgtcaggctgctgctcaatgccgtctga

SEQ ID NO: 36703 - DNA, 1116 bp, Neisseria meningitidis
atgaagattgtaattgcaccggattcgtttaaggaaagcttgacagctcaacaggtagctgaagcaataaaaagaggcttccaacaagcgatagcagatgtggaatgtctcctctgtcctgtcggtgatgggggagaaggcactgtagatgctatccgacattctcttgacctagaagaaaaatgtctccaagtgacaggaccttttggacaaaaagaagtcatgcgctattttcaaaaagaacaactagccctattcgaagttgctgatttggttggtcttggaaaaatcccgctagagaaacgaaatccattacaaatccaaactcgtggtattggagaattgattcgccacctcattagtcaagaaattaaagaaatctatattggcgttggcggtacggccagtaatgatggaggtattgggattgctgctggtttaggttatcaattttatgatgaggatggaaataccttgcccacttgcggtcaagccttactaaacctagcttctgtttcaacagaaaatcgctatgaaattcctgaagatgttcacattcgtattttagcagatgttgtgagtcccttatgtggacaccaaggtgcgacctatacgtttggcaagcaaaaagggttggattctactatgtttgaggccgtagatcaggcaatacaagatttttatgaaaaagtctcccctgcaacattaaaacttaaaggagcaggagctggtggaggcatcgctggtggtttgtgcgcctttgctcaggcaagtatcgtatctggaattgacacctgcctggacttgattgactttgataagaaagtgtcagatgttgacttggttatcattggtgaaggaagactagatcgtcaaagtttagcagggaaagcgcctattggtgtagcaaaaagaacccctgtcggagttcctgttgtcgctatttgtggcagtctcgttgaagatttgccttccctgccatttgaaaatatccaagctgccttttctattttggagaaaagtgaacctttagaagatagtttgaaaaatgccagtctctatttggagcatacggcttctaatattggacacttattaaatatgcctaagatttag

SEQ ID NO: 36704 - DNA, 924 bp, Neisseria meningitidis
atgacgaaaaccgaaccgaacaacgcccaactcgactggttggaatccgaatccatccacatcatccgcgaagtggcggcggaatgcgaaaaccccgccctgctcttttccggcggcaaagattccgtggtcctgctcgccctcgcctgcaaagccttccggctgggcagcaggccggtaaaactgcccttcccgctggtgcatatcgacacggggcacaactaccccgaagtgattgctttccgcgacgcgcaggcggcaaaactcaatgcccgcctgatagtggggcgcgtggaagactccattgccaaaggcacagtagttttacgcaaagaaaccgattcgcgcaatgcggcgcaggcggttacgctgttggaaaccatcgaggcaaacggctttgacgcgctgatgggcggcgcgcggcgcgacgaagaaaaagcccgcgccaaagaacggattttctcgttccgagacgagttcggacaatgggatccgaaggcgcaacgccccgagctgtggtcgctgtacaacaccaggctgcacaaaggcgaaaatatgcgcgtcttcccgatttccaactggacggaactcgacatctggcaatacatcgcccgcgaaaacctcgagctgccgccgatttattacagccacaggcgcgaagtggtcagacgcagggggctgctggtccctgtaacgccgctcaccccgaaaatgccgtctgaaacctccgaaatccttgatgtccgcttccgcaccgtcggcgacatcagctgcacctgcccggtagaaagcaccgcgtccacgccgacggagattatcagagaaacagcggttgccgacatttccgaacgcagcgcgacccggctggacgatcaggcaagcgaggcggcaatggaaaaacgcaaaaaagaaggctatttctaa

SEQ ID NO: 36705 - DNA, 1455 bp, Neisseria meningitidis
atgactacgcaaaccatcaagttccacatgaagccggaaactttcaagcaaaacgccgcaatttcccttcaagacaagcctttgcgcaaaagcctgcgtaccgcgatggatatgctgatgaccaaacgcaaagccgttttgaccgacgaagaagagctgcaaagcctgcgcgatttgtgcgaacacatccgccagcgttccctgtccaaattgcccgcgctgttggagcagttggaagaaaacctgaccaagttgggcgtgaaagtacactgggcggaaacccctgccgaagcctgccaaattatccacgacatcatcacagccaaaaacggcaagctgatggtcaaaggtaaatccatggtcagcgaggaaatcgagctgaaccattatcttgaagcaaaaggcattaaagcggtagaaagcgacttgggcgagttcatcgtccaaatggcaggcgaaaaaccgacccatattgtgatgcctgctatccacaaaaccaaagaacaggttagcgaactgttccaccaaaacctcggtacgccgctgacagacgatgtagaccaactgaccggcttcgcccgtaaagcactgcgcgatatttacagcactgccgatgtcggtttgagtggcgtaaacttcgccgttgctgaaacaggtacgctgtgtctggtggaaaacgaaggcaacggtcgcttgagtaccaccgtaccgcccgtgcatatcgctattaccggcattgaaaaagtggtggcgaaattgtccgacatcccacccttgtacagcctgctgccgcgttctgccattggtcagaacattaccacttatttcaatatgattaccggcccgcgccgtagcgaagagctggacggtcctcaagaaatgcacttggtcctgcttgacaacggtcgcagccaagcctatgccgaagaccaaatgcgccgcaccttgcaatgtatccgttgcggcgcgtgtatgaaccattgcccggtttatacccgtatcggtggcgcggcatatggcacaacctatcccggtccgattggcgagattatttccccgcacctgttaggcttggatgccacccgcgacctgccgaccgcctgtaccatgtgcggtgcgtgtgtggaagtctgtccggtacgcatcccgattaccgaacaaatgcagcgtttgcgcgttgaagcgcaacgttcgccgaccgaaaccgtgccgcaccccatccgagggcaaggcgcatcgcataccttcggcgaacaaatggcgtggcgcacattcaacggtattttcagcggcagcaaaacctaccgcgccttcggttgggcagccaccaagttccgcaacctgaccccgcgcaaacagttgggttggacgcaaaaccgcgtgccgatgaaaccggcgaagaaaaccctgcacgaactaatggcagaaaaaatgcgccaaaaagaacaggcataa

SEQ ID NO: 36706 - DNA, 435 bp, Neisseria meningitidis
atgtgcgggttgtggctgctgcgcgccctgactgccaaattgccccaacagcgttatgcggctttgtttattacactgttttttgccgcagtattggtgttcgggcggcatgattcgatgtattggtatcccgtcctcgtcaatctgatgatgttggcggtgttcggcggcagcctgtttgccgggcagacggtgattgaaaaacttgcgcggctgcaacagcccgacctgcctgaaaaagctgtgcgctatacccgccgggtaacgcaggtttggtgcgtattctttattgccaacgggacgcttgccgctttgttggcacggttggggcgatatgattggtgggcggtttataccggcgtgattgcctatgtattgatggggatgccgtttgccggcgaatggctttaccgcaaactcgttttgaaagtctga

SEQ ID NO: 36707 - DNA, 1353 bp, Neisseria meningitidis
atgccgcgcggtgaggcacttgccgtcgtcgtcgctctgattgccgcgatgggctataccatcatttcattggagtggctgccgcatatgtccattattgccgccatcgtcgtgctgattttgtacggcttggcgcgcggtttgaaatacaacgatatgcagcagggcatgataggcgcgttgaatcagggtatgggcgcgatttacctgtttttcttcatcgggctgatggtcagcgcgctgatgatgagcggtgcgattccgacgctgatgtattacggtttcgggctgatttccccgacttatttttatttttccgctttcgcgctgtgttccgtcatcggcgtgtccatcggcagcagcctgaccacctgcgccaccgtcggcgttgcctttatggggatggcggcggcgtttcatgccgatatggcgatgacggcgggcgcgattgtttccggtgcgtttttcggcgacaaaatgtccccgctttccgacaccacgggcatttccgcgtccatcgtcggcatcgacctgtttgagcacatcaaaaatatgatgtacaccaccattcccgcgtggctcatcagtgcggcactgatgctgtggcttcttcccagtgtcgccgcgcaggatttgaacagcgtcgaatccttccgcagccagcttgaagccacgggattggtgcacggctattcgctgattccgtttgcactgttggtcgttttggcattgatgcgcgtcaatgccgtggtcgccatgctctttaccgtcatggttgccgttgccgtaacgtatctgcacagtacgcccgatctgcgtcagctcggcgcgtggttttacggcggctacaaactcgaaggcgaagcgtttaaagacattgccaaactcatttcgcgcggcggtttggaaagtatgttcttcacgcagactatcgttatcctcgggatgagtttgggcgggctgttgtttgcactgggcgcgattccttccctgctggatgccgtccgcagctttttgacgaatgccgggcgtgccacattcagcgttgctatgacttcggtcggggttaatttcctgattggcgagcaatatttgagtattttgttgtcgggtgaaacgttcaaacccgtttacgataagctcggtctgcattcgcgcaacctgtctcggacgctcgaagatgcggggacggtcatcaacccgcttgttccgtggagcgtgtgcggcgtatttatcagccatgcgctgggtgtgccggtctgggaatatctgccctatgcctttttctgctatttgagtttggctttgaccctgttattcggctggacggggctgactttgagcaaaaaataa

SEQ ID NO: 36708 - DNA, 366 bp, Neisseria meningitidis
atgaagcggcaggctttcttcaaactgatggcgtgtgcggcatttctgtctgccgtttcgctgcgcctccccgtattgggcgcgtgttacgcaatattgtccctctatgcgtttgcactttacggcatcgacaaacggcgtgccgtgcggggaaaacgccgcattcccgaacaccgcctgctgctgcctgccttgttcggcggttgggcgggcgcatacttgggcagcaggatattcaggcataaaacggcgaaaaagcgttttgttgtgctgttccgtctgactgtttcgggcaatgtcctggcgaccctcatcctgatttatagtggattaaatttaaaccagtacggcgttgcctcgccttag

SEQ ID NO: 36709 - DNA, 207 bp, Neisseria meningitidis
atggatgaagcggtttttgccgattgggcgttgaaaatctgcctgaccggtttgattatttttttgggttttatcgtttggaatttgggcaaggagtctaaagcgggcaaattcggcatcgccattttgtttttggttttgggcttgggcgtgttcggttttgtgttcaaagagttattgattaagtttttggtattgccgaaatag

SEQ ID NO: 36710 - DNA, 900 bp, Neisseria meningitidis
atgtggttcaagcagattagtttttatccgctcaacaaagaaaagctgcctgaggcggacgcacttgccgacaaacttgctgaagctgaatttacccattgccaaggcttagactggttcagcgaaggctttaccgcaccggtttcattctccccggaactcgttttccctgccgactttaccttgcgcgtcgccctgaaaaaagaagaaaaagtcctgcctgccggcgtcatccgcgatattttggaagagaaggtagcggaaatccaaaacaatgaagcccgcaatgtcggtcgcaaagaaaaacaagagcttaaagagcaaattacagacgacctgctgccccgagcgtttacccgcagcagccgtacagaagcggtgtttaacacccgccacggctacctgctcgtcaataacgcggcttccgccaaagcagaaaacatcctgaccaagctgcgcgaagctttgggcggtttggaagcctcactgccgaataccaaacaatcgccctcttccctgatgaccggctggctgttgcaagggcattgcgaaggcggttttgaattggacagcgattgcgaactcaaaggcacgggcgatattgttcccgtcgtcaaagtatccaaacaagatttaaccgccgacgaagtggttcaacacgtcaaaaacggtaaaaccgtaacccagctcggtttggtttggcgcgaacaaatcgcctttatcctcacgcaagacttcacactcaagcgcatccaatacctcgacgtattgcaggaagaagccgaaagcaacggcgacgatgccgccggtctcgccttcgcctcgcaaatcctgatggcggaatccgtcagcatcatgttggaagagctggtttcctatttgggcggctggcaagattga

SEQ ID NO: 36711 - DNA, 558 bp, Neisseria meningitidis
gtgctgatgctgctgaaaaccataggacacggggacggctaccgtatcttcagcgtatcggtttacggcatcagccttcttctgctctatttgagttcctcgctgtaccacggaattgcagccggaaaactgaaaagcattttgaaaaaaaccgaccactgcatgatttatgtcctgattgccggaagctacacaccgtttgcactggtttctttgagaaacgggccgggctggacggtattttcactgtcctggctgctggcggctgcaggaatcgcacaagaactcaccatcggacggaaaagcgaaaaacgtctgctgtctattgtgatttatgtcgtcatgggttggatggtcttggcggtaatgaaatccctgacagcctcactcccgtcggcaggactggcttggctggcggcaggcggtatgctgtacagcgtcggcatttactggtttgtaaacgatgaaaaaatccgacacgggcacggaatctggcatctgttcgtattgggcggcagcatcacccaatttgtcagtgtgtacggttatgtaatctga

SEQ ID NO: 36712 - DNA, 498 bp, Neisseria meningitidis
atgaatagcctccccattgccgacctcctcgtctccgccgtcatcgccgcctgcatcgtgctatccgcgatgcgcggcgtgattgcggaggcaggctcaatggcggcatgggtggtttccttctttttcgccaaactctttgccgcctccttcgccgacctcgcctttgcctcgttccaaccccgcctgtttgcattggctctgtcgttcatttccctgttcgtcattgcctgtctgatccagaaaatgctccgttcgctgctgaccggcgcaatttcggcggtcggtttgggctttgccaaccgcattttgggcggcgtattcggtgcattgaaaggcgttttgattattaccctgctggtcatgcttgcttcaaaaaccgacctgcccgataccgaagaatggcggcaatcttacacactgccgtttttcgtatcgctttccgaagccgtgttgaaccatagcggcggcacggcggaaactccggaagacgattga

SEQ ID NO: 36713 - DNA, 378 bp, Neisseria meningitidis
atgatttacggcatcggcacagacattgtttccctcaagcgcatcatccgcttaaacaaaaaattcggacaggcgtttgccgggcgcatcctcactccggaagagctgcttgaatttccgcaagcgggcaaacccgtcaactacctcgccaaacgctttgccgccaaagaagccttcgccaaagccgtcggcacgggcatacgcggcgcggtttccttccgcaacatcggcatcgggcatgacgcattgggcaagcccgaatttttctacggccccgccctgtccaaatggctggaggaacaaggcatcagccgcgtcagcctcagcatgagcgacgaagaagacaccgtattggcgtttgtcgttgccgaaaaataa

SEQ ID NO: 36714 - DNA, 927 bp, Neisseria meningitidis
atgtcttttgccttcttttttcccggacaaggttcccaaagcctcggtatgatgaacggctttgccgaacacgccatcgtcaaaaacacatttgacgaagcctccgccatattagggcaggacttgtgggcgatgattaacggcagcgatgccgaaatcatcggtcaaaccgtcaatacccaacccatcatgctcgccgccggcgttgccgtttaccgcgcctatttggaagctggcggcaaaacgcctgccgccgttgccggacacagcctcggcgaatataccgcgcttgtcgccgccggcgcattggattttacagacgccgtcaaactcgtacgcctgcgcgccgaactgatgcagtctgccgtaccgcaaggcgtgggcgcgatggcggcgattctcggcttggaagatgaacaggtaaaacagatttgcgccgaagccgcccaaggcgaagtggtcgaagccgtcaacttcaactcgcccggacaagtcgtgattgcaggcaacgccgccgccgtcggacgcgccatggctgccgccaaagaagccggtgccaaacgcgccctgccgctgcccgtgtccgtaccttcccattgcagcctgatgaaacccgccgccgacaaacttgccgaagccctgaaaaccgttgaaatcaagcagccgcaaatccgcgttatccacaacgccgacgttgccgcctacgatgatgccgacaaaatcaaagacgcgctcgtccgccagctttacagccccgtacgctggacggaaaccgtcaacgcccttgtttcagacggcattgccgaatccgccgaatgcggaccgggcaaagtgttggcgggcttggcaaaacgcatcaacaaaaccgccgcgtgcagcgcgctgaccgatgccggacagattgccgcctttatcgaagcgcactga

SEQ ID NO: 36715 - DNA, 918 bp, Neisseria meningitidis
atgaaaaaaaccaaagtccacctgatttcaggttttctgggaacaggcaaaaccaccgcgctcaaaagcctgatggcgcaaaaagacccgaacgaaaaatgggtcatcatcgtcaacgagttcggcgaaatcggtattgacggcgcggtattgagcgacaacggcatccctgtggcagaaatcgccggcggctgtttgtgttgcaccgccggcccgcaaatgggcgtaaccgtgcagaaaatgctgcgcgacgccaagcccgaccgcctgatgattgaagcaagcggactggctcacgcagccagcgtcatcgacgaactcaaagccaaaccgctggacagccttttggaaatcggcgccgtctttaccgtcgtcaatccgcgccagttcatcaaccccgattacgcgcaacaggcgttgtataaagaccaaatcggcatctgcgacgtattggtcgccagcaaaaccgatttatgcaccaccgaacagcttgccgaatttcacgacaaagcggcaaaactgttcccgcccaaagccaaagtggtcgaagtccaaaacgcacaactcgacatccggtggctcgatattcccgtcatcgaaaaatcacgctaccgcctcaaagccctgccggacaacaccatgggcttccagtcgcaaggtttcacattccccgccggacgcgatttcgacggcgaaaagctgaccaactttttcaacgacctgcccaaaatgaccgaaggactcgtccgcgccaaaggcgtgtttcaagtattgggaacgtgggtgtggctcaactgggtagacggacagtggggcgcgaaccaagtctcatggcggcgcgattcgcgttttgaattgattgccaaatcgtttgatgcggatttaatcgaacaaaagctcaaagacgcattggaatag

SEQ ID NO: 36716 - DNA, 888 bp, Neisseria meningitidis
ttgaaatctcaggcagtaagttttcgtgctcgttcacgcacctcgaagaggcttgaaaaacaagcattaaatcatagcattacggcttttttgttaaatgactggctcgagacagaatttacactaagtcaagccgtattgcctgatttttctgatatttctcctgaagaggctgctcaggaactaagattagaatgggggcttggcaatgaacctattccgaatatgatcaccctacttgaagctaagggtgttcgtgtattttcattatctttagatacaaaggacattgatgccttttgtacttggtatgaaaatcatccatttgtatttttaaatacacaaaaatctgcagaacgtagtcgatttgatgctgcccatgaattagggcacttaatccgtgataaatacagtatggaacatagtaaaaatagtgaaattacagaagatgaacctcgtgatattatcgaaaaagaggctaatgcctttgcttcagcttttttaatgccggaggctgcactacgcttatatcgtcatgttcctatcactattgaaaatttattaaaaatcaaaagacgatttggtgtatcacttgttgccttagcatatcggatgcataaattaggaatgattactgataggatgtatatacacaatctttgtcctttgtttgcaaagaaaaaatatcgaactatcgaaccagagccaatggaaagggaaatatcaagcgcattacgtaaaatgcttactattttaaaaaatgatggcattggtattgaacagattgctgaaaatttaaacgtatcccccaaagatgttgctgatttaacttttggattagttgagagggacttaaatagatataggaaacttcgattagtcaaataa

SEQ ID NO: 36717 - DNA, 258 bp, Neisseria meningitidis
atggtattgttattaattgtaaataaatattggaaggtaaatgatatgaaaaatgaaattcaaaaaatcatggacaaatataatccatggcatgaagatgattttgagtcgtatgaagacattgccagagatgtatcgctgacgacagataaaacgttcattgaacattatttgttagaagtttattcagaagaaaacggacattttgaccaagagaatgtccatgcaatgatagaagaaattaaaaatgcaatttag

SEQ ID NO: 36718 - DNA, 2286 bp, Neisseria meningitidis
atgaataccaaactgacaaaaatcatttccggtctctttgtcgcaaccgccgcctttcagacagcatcggcaggaaacattacagacatcaaagtttcctccctgcccaacaaacagaaaatcgtcaaagtcagctttgacaaagagattgtcaacccgaccggcttcgtaacctcctcaccggcccgcatcgccttggactttgaacaaaccggcatttccatggatcaacaggtactcgaatatgccgatcccctgttgagcaaaatcagtgccgcacaaaacagcagccgtgcgcgtttggttctgaatctgaacaaaccgggccaatacaataccgaagtacgcgggaacaaagtttggatattcattaacgaatcggacgataccgtgtccgcccccgcacgccccgccgtaaaagccgcgcctgccgcaccggcaaaacaacaggctgccgcaccgtctaccaagtccgcagtatccgtatccaaaccctttaccccggcaaaacaacaggctgccgcaccgtttaccgagtccgtagtatccgtatccgcaccgttcagcccggcaaaacaacaggcggcggcatcagcaaaacaacagacggcagcaccagcaaaacaacaggcggcaacaccagcaaaacaaaccaatatcgatttccgcaaagacggcaaaaatgccggcattatcgaattggctgcattgggctttgccgggcagcccgacatcagccaacagcacgaccacatcatcgttacgctgaaaaaccataccctgccgaccacgctccaacgcagtttggatgtggcagactttaaaacaccggttcaaaaggttacgctgaaacgcctcaataacgacacccagctgattatcacaacagccggcaactgggaactcgtcaacaaatccgccgcgcccggatactttaccttccaagtcctgccgaaaaaacaaaacctcgagtcaggcggcgtgaacaatgcgcccaaaaccttcacaggccggaaaatctcccttgacttccaagatgtcgaaatccgcaccatcctgcagattttggcaaaagaatccgggatgaacattgttgccagcgactccgtcaacggcaaaatgaccctctccctcaaagacgtaccttgggatcaggctttggatttggttatgcaggcacgcaacctcgatatgcgccagcaagggaacatcgtcaacatcgcgccccgcgacgagctgcttgccaaagacaaagccttcttacaggcggaaaaagacattgccgatctgggcgcgctgtattcacaaaacttccaattgaaatacaaaaatgtggaagaattccgcagcatcctgcgtttggacaatgccgacacaaccggaaaccgcaatacgcttgtcagcggcaggggcagcgtgctgatcgatcccgccaccaataccctgattgttaccgatacccgcagcgtcatcgaaaaattccgcaaactgattgacgaattggacgtacccgcgcaacaagtgatgattgaggcgcgtatcgtcgaagcggcagacggcttctcgcgcgatttgggcgttaaattcggcgcgacaggcaagaaaaagctgaaaaatgatacaagcgcattcggctggggggtaaactccggcttcggcggcgacgataaatggggggccgaaaccaaaatcaacctgccgattaccgctgccgcaaacagcatttcgctggtgcgcgcgatttcctccggtgccttgaatttggaattgtccgcatccgaatcgctttcaaaaaccaaaacgcttgccaatccgcgcgtgctgacccaaaaccgcaaagaggccaaaatcgaatctggttacgaaattcctttcaccgtaacctcaatcgcgaacggcggcagcagcacgaacacggaactcaaaaaagccgtcttggggctgaccgttacgccgaacatcacgcccgacggccaaatcattatgaccgtcaaaatcaacaaggactcgcctgcgcaatgtgcctccggtaatcagacgattctgtgtatttcgaccaaaaacctgaatacgcaggctatggttgaaaacggcggcacattgattgtcggcggtatttatgaagaagacaacggtaatacgctgaccaaagtccccctgttgggcgacatccccgttatcggcaacctctttaaaacacgcgggaaaaaaaccgaccgccgcgaactgctgattttcattaccccgaggattatgggtacggccggcaacagcctgcgctattga

SEQ ID NO: 36719 - DNA, 648 bp, Neisseria meningitidis
atgaaacctttgattttagggcttgccgccgtgttggcgctgtctgcctgccaagttcaaaaagcgcccgatttcgactacacgtcattcaaggaaagcaaaccggcttcaattttggtggttccgccgctgaacgaatcgcccgatgtcaacggaacatggggtgtactggcttcgaccgccgctccgctttccgaagccggctattacgtcttccccgccgcagtcgtggaggaaaccttcaaagaaaacggcttgaccaatgccgccgatattcacgccgtccggccggaaaaactgcatcagattttcggcaatgatgcggttttgtacattacggttaccgaatacggcacttcatatcaaattttagacagcgtgacgaccgtatccgccaaagcacggctggtcgattcccgcaacggaaaagagttgtggtcgggttcggccagcatccgcgaaggcagcaacaacagcaacagcggcctgttgggggctttggtcagcgcagtggtcaatcagattgccaacagcctgaccgaccgcggttatcaggtttctaaaaccgccgcatacaacctgctgtcgccctattctcacaacggcatcttgaaaggtccgagattcgtcgaagagcagcccaaataa

SEQ ID NO: 36720 - DNA, 360 bp, Neisseria meningitidis
atgctttccaacatcatccccctttccatcggtgcggcactcggtgcaacggcgcgttggctgctcaacctcgccgttcctgccgccatgtctcccgccacgggcaacctgtttgccaactggacgggcgcgctgctcatcggcatctttgccgaaaccgtcaatcacccgcaatggaagctgctgctgattaccggttttctcggcagcctgaccacgctttccggattttcactggaaaccgtaaccctgctccaatcgaatcgtcccgcttcagcactttccaatattttcctacacacggcaggttcgctgctgctgacttggctcgggctgaagatagggacggcagtcaaataa

SEQ ID NO: 36721 - DNA, 1047 bp, Neisseria meningitidis
atggaggcacgcccaccccgggcaaatgaagcccaagccccccgcgcggttgaaatgaaaaaagaaagccgccccgcgtttgacgcggcagccgtatttgacgcggcagccgtaccggtatccgacagcgggtttgccgccaatgcaaatgtccgccgttttgtggacgatgaagtcgggaaaggggatttttcccgggcggaatggcaggatttttttgacaaagcggcttacaaggcggacatcgtcaagattatgcaccgcccctccacatcgcgtccgtggtatgtgttccgcacgggaaattcgggcaaggcgaaatttcgcggcgcgcgccggttttatgcggaaaaccgcgcgcttatcgatgatgtggcgcaaaaatacggcgtgcctgccgaacttatcgtggcggttatcgggattgaaacgaattacggcaaaaatacgggcagtttccgtgtggcggacgcattggcgaccttaggctttgattacccccgccgcgccgggtttttccaaaaagaattggtcgagcttttaaagctggcaaaagaagaaggcggcgatgttttcgcctttaaaggcagctatgcgggcgcaatggggatgccgcaatttatgccttcgagctaccggaaatgggcggtggattatgacggggacggacatcgggacatatggggcaacatcggcgatgtcgcggcatcggttgccaattatatgaagcagcacggttggcgcacgggcgggaaaatactggtgtctgcaacattggcgccgggtgcggatgttcaggcaatcattggcgaaaaaaccgccctgacgcggacggtggcggatttgaaggcgtacggcatcatccccggcgaagagcttgccgatgatgaaaaggcggttttgttcaaactggaaaccgcacccggcgtgtttgaatattatttgggcttgaacaatttttatacggtatggcagtacaatcacagtcggatgtatgtaacggcggtcagggacattgccaattcgctcggcggcccgggattgtaa

SEQ ID NO: 36722 - DNA, 1572 bp, Neisseria meningitidis
gtgcgccgccgccgcacgtttgccatcatctcccaccctgacgctggtaaaaccacgttgaccgaaaagctgttgctgttttcaggcgcgattcagagtgcgggtacggtaaaaggcaagaaaaccggcaaattcgccacctccgactggatggaaatcgagaagcagcgcggcatttccgtcgcttcgtcagtgatgcagttcgactacaaagaccacaccgtcaacctcttggacacgccgggacaccaagacttctccgaagacacctaccgcgttttgaccgccgtggacagcgcattgatggtcatcgacgcggcaaaaggcgtggaagcgcaaaccatcaaactcttaaacgtctgccgcctgcgcgatacgccgattgttacctttatgaacaaatacgaccgcgaagtgcgcgactcgctggaactcttggacgaagtggaaaacatcctgcaaatccgctgcgcgcccgttacctggccgatcggtatgggcaaaaacttcaaaggcgtataccacatcctgaacgatgaaatctatctctttgaagccggcgacgaacgcctgccgcacgagttcgacatcatcaaaggcatagacaatcccgaattggaacaacgctttccattggaaatacagcagttgcgcgacgaaatcgaattggtacaggcggcttccaacgagttcaatctcgacgaatttctcgccggcgaactcacgcccgtattcttcggctctgcgattaacaacttcggtattcaggaaatcctcaattcattgattgactgggcacccgcaccgaaaccgcgcgacgcgaccgtacgcatggtcgagccggacgaggctaagttttccggatttatctttaaaatccaagccaatatggatccgaaacaccgcgaccgcatcgcttttttgcgcgtctgctccggtaaattcgagcgcggcatgaaaatgaaacacctgcgtatcaaccgcgaaatcgccgcctccagcgtggtaaccttcatgtcccacgaccgcgagctggttgaagaagcctacgccggcgacattatcggtatcccaaaccacggcaacatccaaatcggcgacagcttctccgaaggcgaacaactgacgtttaccggcatcccattcttcgcgcccgaactgttccgcagcgttcgcatcaaaaacccgctgaaaatcaagcaactgcaaaaaggtttgcaacagcttggcgaagaaggtgcggtgcaggtgttcaaaccgatgagcggcgcggatttgattttgggcgcggtcggcgtgttgcaatttgaagtcgttacctcgcggctggccaacgaatacggcgtagaagccgtgttcgacagcgcatccatctggtcggcgcgctgggtatcgtgcgacgacaagaaaaaactggcggaatttgaaaaagccaatgcaggcaacctcgccatcgacgcgggcggcaacctcgcctacctcgcccctaaccgcgtgaatctgggactcacgcaagaacgctggccggacatcgtgttccacgaaacgcgcgagcattcggtcaaactttaa

SEQ ID NO: 36723 - DNA, 354 bp, Neisseria meningitidis
atgcctgaaatcaaaattttccacaatccgcgttgcagcaaatcgcgtgccgccttgtccctattggaagaacgcggcattgctgccgaagtggtcaaatatttggatacgccgcccgacttgtccgaattgaaggatattttcaacaaattgggcttggcatcggcgcgcgggatgatgcgcgtgaaagatgatttgtataaggaattgggtttggacaaccccaatttggacaatgacgcgctgctgcgtgccatcgccgatcatcccgccctgttggagcgtccgattgttttggcaaacggtaaggcggctgtcggcagaccgctggaaaatatcgaagcggtattgtga

SEQ ID NO: 36724 - DNA, 396 bp, Neisseria meningitidis
ttgttaatccactatacctccgccaatgcccatgagtgcaaacacctgtcgccgttgttagaagggatagctgaaggtacgaccgtctatgccgacaaaggctatgacagtgcggaaaaccggcaacatctggaaaagcgtcagttgttagacggtattatgcgcaaagcctgccgcaaccgtccgctgacggaggcacagaccaaacgcaaccggtatttgtcgaagacccgttatgtggtcgaacaaagcttcggtacgctgcaccgtaaattccgctatgcccgggcagcctatttcggactgattaaagtgagtgcgcaaagccatctgaaggcgatgtgtttgaacctgttgaaagccgccaacaggctaagtgcgcctgctgccgcctaa

SEQ ID NO: 36725 - DNA, 711 bp, Neisseria meningitidis
ttgccgaacatcaacacgaaaattgaacccttctatttttgcaaggcatatatggatatgttggaaattttgttccgccatcaagacttcgtcgccatcaacaaaccgggcggcatatccgtccaccaagacagcggcgagaccggactggcccgaacactcgccatacagttgggcgtagagcgtgtgtggctgctgcaccgattggacaaacagaccagcggcattttactgtttgccctcaacaaagaaagcgcgtccgcccttagcggacagtttgccggcaaaagcatcaaaaaaacctatttggcactatccgaccgcaaaccgtccaaaaagcagggttggattaaaggcggaatggaaaaatccagacgcggaatgtggaagttgacgcgcaatacagaaaatatcgccgttacccgattccacagcatcagtatcgccgaaaaactgcggctgttcatcctggaaccgcatacgggcaaaacgcaccaattgagagtggcgatgaaaagtttgggcagtccgattctgggcgacagcttatacggcggaacagaatccgaaaccatgtttctgtatgcatggagaatacaatttgcctaccaaaaccgacaaatcgaaattgttgcacccttaaaaaacgaatggcagactgaaaatatctctcatgcgctggaagaattttatatggcaaaagcaggttaa

SEQ ID NO: 36726 - DNA, 651 bp, Neisseria meningitidis
atgccgtctgaaccgccttcagacggcattgcccgacacccccaaagcacaatcaaaatggcaaaaaaaccgaacaaacccttcaggctgacccccaaactcctgatacgcgtcgtattgctcatctgtatcaccgccatcggcgcattggcaataggcatcgtcagcacattcaacccgaacggcggcaaaaccctccaaaccgaaccgcaacacaccgacagcccccgcgaaaccgaattctggctgccaaacggcgtagtcggacaagatgccgcccaacccgaacaccaccacgccgcctcatccgaacccgcacagccggacggcacagacgaaagcggcagcggactgccgtcccctgccgcacccaagaaaaaccgggtcaaaccgcaacctgccgacacagctcaaaccgacaggcagccggacgacgccggaacacaagctgaaaacacactcaaagaaacccccgtactgcccacaaacgtcccccgtcccgaaccccgaaaagaaacacccgaaaaacaggcgcagcccaaagaaacacccaaagaaaaagaaacgcccaaagaaaaccataccaaaccggacaccccgaaaaacacgccgcccaaaccccataaagaaattctcgacaacctcttctga

SEQ ID NO: 36727 - DNA, 936 bp, Neisseria meningitidis
atgaaagcgaatatggatattgaaaccttccttgcaggggaacgtgccgccgacggataccgttgcggcttcgtggcgattgtcggtcgtccgaacgtgggcaaatcaacgctgatgaaccatctcatcggtcagaaaatcagcatcaccagcaaaaaggcgcagacgacgcgcaaccgcgtaacggggatttataccgacgataccgcgcagtttgtgtttgtcgatacgcccggttttcaaaccgaccaccgcaacgcgctcaacgaccgtttgaatcaaaacgttaccgaggcactcggcggtgtggatgccgtggttttcgtcgtggaggcgatgcgctttaccgatgccgaccgagtcgtgttgaaacaactgcccaagcacacgccggtcgttttagtggtcaacaaaattgacaaggacaaggcgaaagaccgttacgcgttggaggcgtttgttgcccaggtgcgcgccgaatttgaatttgcggcagcggaggcagtcagcgcgaaacacggattgcggattgccaacctgttggagctgattaaaccgtatctgcccgaaagcgtgccgatgtatcccgaagacatggttacggacaaatcggcgcgttttttagcgatggaaatcgtgcgtgaaaaattgttccgctatttgggcgaggaattgccttatgcgatgaacgtcgaagtggagcagtttgaagaggaagacggtttaaaccgcatctatatcgccgttttggtcgataaggaaagccaaaaggcgattttaatcggcaaaggcggggagcgtttgaagaaaatttccaccgaagcgcggttggatatggaaaaactgtttgataccaaagtgtttttgaaagtgtgggtcaaagtcaaatccggttgggcggacgacatccgcttcctgcgcgagctgggtttgtag

SEQ ID NO: 36728 - DNA, 915 bp, Neisseria meningitidis
atggatgccgtacaattaaaatcatttgtcgccgtcgcgcacgagggcaaccttacccaagccgccaaacgacttttcctttcccagcctgccgtttccgcccaaattaaagcccttgaagaatatgtcggcacgccgctgttcaggcgcacggggaaaggcatggtattgacgcgggcgggcgaaatactgttgcccgaagcggaatccctgctgcaatacaaacacaagttggagtattttgccaaaacgctggcaggcgattattcggaagagaccagtttgggcattatccaccccatcgattcggcaaagctcgtcgcgctgacggacaatatcggtcaaacagcccccaaaacgcgcctgcacatccaatacggaatgagcggcgaaatcctctcgcgcatccaacacaaaaccctgcacggcggctttatactcggcaacgccgcccaacggggcatccgcagcgtattcctgcaaaacctgacctacgcgctgatttgcccgcaaagccaatatccccatctgacccgctcccttccgcagagcctgcaagaatgcgtatggatagaaatgtcgggcgtgtccggaagtaggaagcacctgcaccagttttggcgcagcaaccggctctcacccaaaaaacagatattgtgcgactacccccaaaccattatcgatttggttgcaggcggtataggtgtggcaatggtgccgggaaacaaagccgaagcggcggcaaaagaaggcgcgggcgtggctattatcgaatcgtgccgccacagtatgccgctcaatttcatttatgcggaagaatacgaggataatccccacgtctcactcctgctcgagtgcattgaaaaagtatggggagtgcaggcggtgcagccgcccgttgtctcggacaactga

SEQ ID NO: 36729 - DNA, 723 bp, Neisseria meningitidis
atgccgtctgcaccgtcggcgcctattcagacggcattattgtttcaaccgacaaaggacatccacaccatgcaggataatgctttgaccatcgccttatccaaggggcgcatttttgaggagacgctgccgctgcttgccgctgccggcattgttccgactgaagagcctgaaaaatcgcgcaagctgattatcgggacgaaccatgaaaacatccgccttgtcattgtccgcgcaaccgatgtgccgacttatgtccgctacggcgcggcggacttcggcattgcgggcaaagacgtgctgatcgaacacggcggcacggggctttaccggcctttggatttggagattgccaagtgccgcatgatggttgctgtgcgtaaagggtttgattacgaagcagcttcgcaacccggatgccgtctgaagattgccacgaagtatcctgaaatcgcggcatctcattttgccggcaagggtgtccatgtggacattatcaaactgtacggctcgatggaacttgcgccgctggtcggcttgagcgatgcgattgtggacttggtttcgacgggcaacaccttgaaggcaaacggcttggaagcagtcgaacacatcgtcgacatttccagccgcctggtggtcaacaaggctgctttgaaaacgaaatacgcgctgctggagccgattattcaggcgttcggcggcgcagtgaaggcgaagtaa

SEQ ID NO: 36730 - DNA, 957 bp, Neisseria meningitidis
ttgcgttccccgcaagtccccaaagggctttatttctatggcggggtcggacgcggcaaaagctttctgatggacgcttttttcggctgcctcccttaccgccgcaaacgccgcgtccactttcatgcctttatggcagaaatccaccagaggctgaaaaccctgaaaagcgaaagcaacccgttgaaatccgttgccgccgagattgccaaagaaacccgcgtattgtgttttgacgaatttcatgtcagcgatattgcggatgcaatgattttaggccgtctgctggaaaacctgcttaacgagggcgttgttttggtggcgacttcaaactacgcgccttccgaactctacccgcaaggtcaaaaccggagcagttttcttcccacaatcgcgctcatcgagtccagcctgaccgtcttaaacgttgacggcggtgaagactaccgactgcgtaccctccgccccgccgagattttctttacgcctgccaatgaagaaaatgaggcaaaactggcaaaactgttcaaagaaatgacaggcattaccgatttgaaccccggcatcagcaccatccacggtcgggagattccccacaaagccgagtccggccgtgccatatggtttgatttccgcgcactgtgcttcggcccccgctcacagtccgactatctgtatttggccgaacattatgaaatggtttttatttcaggtttggaacaactctcaccgcaagaaaaggcggaggcgcggcggctgacttggctgattgacgtactctacgatttccgggtcaaactgtgtgccaccggcgcggtagatgtcaaccatatctatacggaaggcgattttgccgaagaatttacccgcaccgccagccggatggtcgaaatgcagtccgaagtttatttggaacagccgcacctgaccctatctcccaaggcttcaggcggataa

SEQ ID NO: 36731 - DNA, 918 bp, Neisseria meningitidis
atgagcatcatccactacctctcgctgcacgtcgaatccgcgcgcaccgcgctcaaacagcttctgcgccaacctttcggcacactgcttaccctcataatgctcgccgtcgccatgaccctgccgctgtttatgtacttgggcatccaaagcgggcaaagcgtgttgggcaaactcaatgagtcgccgcaaatcaccgtctatatggaaaccgccgccgcacaaagcgacagcgataccgtccgcagcctgctggtgcgcgacaaacggctcgacaacatccgctttatcagcaaagaagacggtttggaagaattacagtccaatctcgaccaaaatctgatttccatgcttgacggtaaccccctgccggatgtctttatcgttacccccgacccggcaaccacgcccgcccaaatgcaggcaatctaccgggacattaccaaactgcctatggtcgaatccgccaacatggatacggaatgggtacagacactgtaccaaatcaacgaattcatccgtaaaatcttatggtttctttccctgacgctggggatggcgttcgtccttgtcgcgcacaacaccatccgactgcaaatcctcagccgcaaagaagaaatcgaaatcaccaaactcttgggcgcgcccgcgtcgtttatccgccgcccattcctttatcaagccatgtggcagagcatcctttccgccgccgtcagcttggggctttgcggttggctgctctctgccgtgcgccccttggtcgatgccatcttcaaaccctacggacttaatatcggctggcgtttcttctacccgggagaaatcgcactggtgttcggcttcgtcatcgcactggggatattcggcgcgtggcttgccaccacccagcacctgctcggcttcaaagccaaaaaataa

SEQ ID NO: 36732 - DNA, 405 bp, Neisseria meningitidis
atgagaaaaagtcgtctaagccggtataaacaaaataaactcattgagctatttgtcgcaggtgtaactgcaagaacagcagcagagttagtaggcgttaataaaaataccgcagcctattattttcatcgtttacgattacttatttatcaaaacagcccacatttagaaatgtttgatggcgaagtagaagcagatgaaagttattttggcggacaacgcaaaggcaaacgcggtcgcggtgctgccggtaaagtcgccgtattcggtcttttgaagcgaaatggtaaggtttatacggttacagtaccgaatactcaaaccgctactttatttcctattatccgtgaacaagtgaaacctgacagcattgtttatacggattgtgtagctatgatgtattag

SEQ ID NO: 36733 - DNA, 486 bp, Neisseria meningitidis
atgatacaaatcggcatcatcatgggcagcaacagcgattggcccgttatgcggcaggcagcgcagtttcttgaagaattcggcgtagaatatgaggcgcgcgttgtttccgcacaccgcaccccggatttgatgttccaatacgccgaaaccgcacgggcgcgcggcatcaaagccatcatcgcgggtgcgggcggcgcggcgcatttacccggtatggttgccgccaagaccaccgtccccgttttgggcgtacccgtccccagcaaatacctgcgcggcgaagattcgcttttatcgattgtacaaatgcccaaaggcgtacccgtcgccacattcgccatcggcgaggcaggtgcggcaaatgccgcattgttcgccgtttccatgctcgccaacgaaaaccccgaactggcgcaaaaactggcagacttccgagccaaacaagaacagactgttttgaatatggaattggaacagatttaa

SEQ ID NO: 36734 - DNA, 1389 bp, Neisseria meningitidis
atgaatgcagtcgtagttgccgtaatcgttatgctggtgctgtcgctgtcgcgcgtgcacgtggtattgagcctgacgatcggcgcgtttgtcggcggcgcggtggcgggtatgccgctgcaaaacattgccgatgcggcgggacaggtcagtcaggcggggattatccccgtgtttaacaaaggtttggaaggtggtgcgaagattgcgctttcttatgcgatgctcggtgcgtttgcgatggcgattacccattccggcctgccgcagcagcttgccggcgcggtcgtccgcaaactgaaccggggcggtatgcccgacagcgtgcgttcgggcgagggcgcggtcaaatggctgctgctttccatcatccttgtgatgggcattatgagtcagaacatcatccccatccacattgcctttatcccgatgattgttccgccgctgcttttggtgttcaaccgcctgaaaatcgaccgccgcctgattgcgtgcgtcatcactttcgggctggttacgacttatatgttcctgccttacggcttcggcgcgatttttttgaacgaaatcctgttgggcaacatccattccgccgcgccgcagcttgatgtgaaaaacattaacgtgatggcggcaatggcgattcccgcgttgggaatgctggccggactcctgctggcgtttgtccattaccgcaaaccgcgcctgtaccaaagcaacaatgccgatacggcgggcaacgccgatgcggcaaaccgtccgcagccgtccgcctaccgcagcctggccgccgccgccgccattgccgtatgttttgccatccagttgatgtatgaagactcgctggtgttgggcgcgatgctcggtttcgccgtatttatgatgttgggggtcatcaaccgcgacaaggcaaacgacgtattcggcgaaggtatcaagatgatggcgatggtcggcttcattatgattgccgcgcagggttttgccgccgtgatgaatgcgaccgggcatatccagccgctggtggaaagcagtatggcgatattcggcaacagcaaaggtatggcggcattggcgatgctggtggtggggcttttggtaacgatgggcatcggttcgtccttttccactttgccgattattgccgcgatttatgtgcctttgtgtgtcggtttgggtttttcgccgcttgccaccgtcgccattgtcggcacggcgggggcgttgggcgatgccggttcgcctgcgtccgattccacgctgggcccgacgatggggctgaacgccgacgggcagcacgaccacatccgcgattccgttatcccgaccttcatccactacaacatcccgctgctgattgccggctggattgccgcgatggtgctgtaa

SEQ ID NO: 36735 - DNA, 1446 bp, Neisseria meningitidis
atggcgcattttttcaatattaattatccgacttacaaaggtaaaaacatgactgtccgtatcgaacacgatttattgggcgaccgcgagattcccgccgaagtgtattggggcatccacactctgcgcgccattgaaaactttaaaatctccacacaaaaaatttccgacgtgccgcagtttgtccgcagtatggtgatggtgaaaaaagcaaccgcgcaggcaaacggcgaattgggtgcagtaaaacccgaaatcgccgccgccattgaaaaggcttgcgacgaagttctgctgaacaaccgctgcctcgaccaattcccctccgacgtgtatcagggcggtgcgggaacttcggtcaatatgaacaccaacgaagtcatcgccaacctcgcattggaagccttgggatacgaaaaaggccgctacgacatcgtcaatccgatggatcatgtcaatgccagccaatcgaccaacgatgcctatcccacgggcttccgccttgccgtgtattacagcatcggcgaattgctcgacaaactgaccgtcctgaaaaacgcctttaccgccaaagccgaagaatttaaagacgttttgaaaatgggtcgcacccagcttcaagatgccgtaccgatgacggcaggacaagaattccaatctttccaagtgttgttggaagaagaaatcctcaacctcgaccgcacgcgccaactgcttttagaagtcaatttgggcgcaacggcaatcggcacgggcgtgaacacgcccaaaggctacgccgaactggtggtcaaaaaactctccgaagtcagcggcttgccttgcaaactgaccgaaaacctgattgaggcgacctccgactgcggcgcatatgtgatggtacacggcgcattgaagcgcacggcggtcaaactctccaaaatctgcaacgacttgcgcctgctctcttccggcccgcgtgccggcttgaaagaaatcaacctgcccgaattacaggccggttcttccattatgcctgccaaagtcaatcccgtgattcccgaagtggtcaaccaagtctgcttcaaagtcatcggcaacgatacgacgattaccttcgccgccgaagccgggcaactgcaattaaacgtgatggagccggtcatcgcccaatgtatgtttgaaaccatttccctcttgggcaatgcagcaatcaacctgtccgacaaatgcgtcaaaggcattacggtcaaccgcgaaatatgcgagcgttacgttttcaactccatcgggctggttacttatctgaatccgtatatcggacaccacaacggcgatttggtcggcaaaatctgcgcccaaaccggcaaaggcgtgcgcgaggttgtcttggaacgcgggctgttgagcgaagaagaactcaaccgcatcctctctcctgaaaacctgatgaacccccatctgtaa

SEQ ID NO: 36736 - DNA, 210 bp, Neisseria meningitidis
ttgattgacaaaagcggcaaattggagtgtaattcacggtttaattatctacccattctatttttaggaaacatcatgaaacgcacttatcaaccttccgttaccaaacgcaaacgcacccacggcttcctggtgcgctccaaaacacgcggcggccgcgcagtattggctgcacgccgcgccaaaggccgcaaacgcctggcggtataa

SEQ ID NO: 36737 - DNA, 1179 bp, Neisseria meningitidis
gtggcacaggcactcagtgccaaacctaatgaaaccgttaaaagaatttttttcatgcagaatacttcctttgataatgaatccgattatagcgacgattcagactttgcgtcagcttccggaactgaaaaccgtatcggtctgaccgttccgctcgagcttgccggcgggcggttggatgcggtgttggcgaaacttctgcccgactactcgcgcagccgcctgacatcatggattaaagaaggcgcggttattgtaaacgataaaccttcgcaacccaaagacaaaatgataggcggcgagcaaatttgtgtaaccgtccgtccgagtgaggaaaatctggcgtttgttccagagcctatggctttggatattgtttacgaagacgataccgtcatcgtcgtcaacaaaccggccggactggtggtgcatccggcggccggcaactggacgggaacgctgctcaacggcctcttggcgcactgtcccgaattgagccaagtacctcgtgcaggcatcgtacaccgtttggacaaagaaaccagcgggctgatggtggttgccaaaaccctgccggcgcaaaattccctcgtgcaacagcttcaagagcgcacggtcaaacgcatttaccgcgccgtcgccaacggcatcgttccctttgacggtaaaatcgaaacccaaatcggacgcgatccgcacaaccgcctgaaaatggcagtcgtcaaattcggcggcaaaccagccgttacccacgtcaaagtgttggaacgctatctggcgcacagctatatcgaatgctcgctcgaaacaggcaggacgcaccaaatccgcgtccatatgcgtgaggccaaccatccgcttgccgccgacccggtttacggcaacccgcgccatccgtgcggcgacacggtgaaagaagccgttaaaagtttgggtgcgcgtcaggcattgcacgcctaccgcttaagtttcactcatccgaaaaccggcgaaacccgttcgtttgaagcaccgattccaaacgacatatatcatttgttatccgtcctccgtcttgaagccggtttggattcgtctttgagcaatgaagaagaatggcaggacaaattcggcgcggacgacgacgatgattggaacgaagacgactatgatgtcgaagtggtttatgtaagggagtga

SEQ ID NO: 36738 - DNA, 894 bp, Neisseria meningitidis
atgattattgtcatgagcaggcgtgccgccgaagcggacattgccggcgttgtcgcctttatccgcagcagaggtctgcgagaacacatttctcacggcgacgagcgtactgtcatcggcgcaatcggcgacgatagggttttgagcgtcagggaggtgcagacgctgccggaggtcgagaaagccgtccgcattttggatacatggaaaaccgtcagtcgggaaaatcgggcggaagacagccgcgttgccgccaaaggcgtggctttcggcggcggggaaaccgtccgtatcgccgcagaaccgtcagtatggcgcaatgcggatgcagtgtttctggatccgtttttcacttcggcaaacttatacgacacttcaagtgcggatgaagggcggggacggtgcagacggttggcggaacagaccgcatcggcgcatgatgcagggaaacccgtattggtgcgcgtccgcaacgtccgccatgtcgaagcggctttgaatgcgggggcggacatcctgtatttgggcggcgggctgatgtccgatcttgccgtattgaatgaagccggaaacctgaacattcccttggtgctgtgtaaagacaagcaccattctgccgaagattggttgaatgccgcagaatatgtcgtctcgcgcggcaaccgccacctgattctgggcgagtcgggcgtattgaaccataccaaaggccatccctaccgtttggatgtcgaatccatcgtgaaagtccgccaaatcagccatctgcccgtgattgcgaatattacgggattatggaaccgcgatatgccgcaggaaatcctgtacggcttggcaaaggcggcaggcgcgtgcggaatcgtcggaacctgttttgaaaagtcgggcggatag

SEQ ID NO: 36739 - DNA, 633 bp, Neisseria meningitidis
atggatttgcacaatattcgggaagattacagcaaacgggaattgtcggaaggcgattgcgccgacaatccgatcgagcagttcgagcggtggttggacgaggcggtacgcgccgaggttaacgagccgacggcggtcaatgtggcggcggtcgacggacgcggcaggcctaacagccgtatggtgctgctgaaggaagttaattctgaaggttttgttttctttacgaattatcacagccgcaaggggcgttcgctggatgctcatccgtttgcggcgatgacgtttttctggccggagctggagcgtcaggtgcgcgtggaagggcgtgttgaaaggctggcggagaagttgtcggacgaatattttgagagtcgcccgtatcagagccgtttgggtgcgtgggcaagcgcgcagagcgaagtgattccgaacaaggcggtattggtggcaaaggcggcggcggtcggactcaaacatcctttgcatgtgccgcgtccgccgcattggggcggctatattgtgattcccgatttgcttgagttttggcagggcaggccgagcaggctgcacgaccgcatccaataccgtttgctggatggtggctggatacgcgagcggctgtcgccttga

SEQ ID NO: 36740 - DNA, 957 bp, Neisseria meningitidis
atgaatataatcgggctggacatctcaaaggacaccatagacgcaacattgcataaaacaaacggaagtatccattacattaaatttaagaataatgatgatggattaaaacagtttagattgtggataaagggaaacagaatcagaaaagcctatatcggcatggaggcaacaggcatctattacgaaaaggcagcagatatgctttcttcctactatactgtttacgttattaatcccttaaaaatcaaggactacggaaaaagcaggtttaaccgtaccaaaaccgacaaagcagattcaaacctgatagcagactacataaaaaggcatcaagatacattgataccgtatcagatacccaaaaacaaagcactgcaaaaactgattaaccttaaaaatcaattacatcaacatcagaagcaaattaaaaaccgtcttcatagcactgaagaagacttcataaggaacatacatcaagacttgatagataccatacaggacaagatggaacaggtaaaaatagccatatccgaacaaatcaaaaaacaaacggacaataaccattaccgcaatcttcaaaccatcccgagcataggcaaagacaccgcatcagttctttatgcgcaactgacagaaaaacattttaaaaccgcaaaccagtttgtatcctatgccggattaagtcccgccatcatacaatcagggacaagcgtaagaggtcggggcagattgagccgatacggaaacagacgattaaaaagtacgctgtatatgcccgccctttgtgcttaccgttttaacgcatttccgaaattaataaataatctgaaaaaagcgggtaagccaaagatggtaatcatcgttgccatcatgcgcaaactggcgaagctcgcctattacattgttaaaaccggccagccttacgatgcggaaagacaccgattgaatcaataa

SEQ ID NO: 36741 - DNA, 975 bp, Neisseria meningitidis
atgattgccaaacacatcgaccgtttcccgctattgaagttggaccaggtgattgattggcagccgatcgaacaatacctgaaccgtcaaaaaaaccgttaccttagagaccaccgcggccgtcccgcctaccctctgctgtccatgttcaaagccgtcctgctcggacaatggcacagcctctccgatcccgaactcgaacacagcctcatcacccgcatcgatttcaacctgttttgccgtttcgacgaactgatcatccccgattacagtaccttatgccgctaccgcaactggctggcgcaagacgacaccctgtccgaattactcaaactgattaactgccaactgaccgaaaaaggcttaaaagtagagaaagcatccgccgccgtcattgacgccaccattattcagaccgccggcagcaaacagcgtcaggccatagaagttgacgaagaaggacaagtcagcggccaaaccacaccgagtaaggacagcgatgcccgttggatcaagaaaaacggcctctacaaactcggttacaaacaacatacacgtaccgatgcagaaggctatatcgagaaactgcacattacccccgccaatgcccatgagtgcaaccacctgtcgcctttgctggaagggatagccgacggtacgaccgtctatgccgacaaaggctatgacagtgcggaaaaccggcaacatctgaaagaacatcagttgcaggacggcattatgcgcaaagcctgccgcaaccgtccgctgacggaagtgcaaaccaaacgcaaccgatatttgtcgaagacccgttatgtggtcgaacaaagcttcggtacgctgcaccgtaaattccgctatgcgcgggcggcctatttcggactgattaaagtgagtgcgcaaagccatctgaaggcgatgtgtttgaacctgttgaaagcggccaacaggctaagtgcgcccgctgccgcctaa

SEQ ID NO: 36742 - DNA, 324 bp, Neisseria meningitidis
atgatgaccgaaagcgagtttatccgcgcgagcgaagcattatttgaacacatcgaagaccaaatcgacgaaaacggctgggatttcgactgccggtttgccggaaacgtcctgaccatcgaagccggagacggcacgcaaatcatcgtcaaccgccacacgcccaatcaggaattgtggattgccgcaaaaagcggcggctaccatttcgccgaacaaaacggcaaatggctggcaacgcgcgacagccgcgatttttatgatgttttgaacgaagcactgagcgcggcttcgggcgaagcggttgagattgccgaattgtaa

SEQ ID NO: 36743 - DNA, 345 bp, Neisseria meningitidis
atgaacatcatccgcgcgctcctcatcatcctcggctgcctcgccgccggcgaaaccgccgttttcctagcaggcatcaaactgcccggcagcatcgtcggcatgggcgtgctgtttgcgcttttgcaggcaggttgggtcaaaacgtcttggctacaacagcttaccgacgcgctgatggcgaatctgacgctgtttctcgtgccgccctgcgtggcggtcatcagctatttggatttgattgccgacgattggttttcgatactggtttccgcctccgccagcactttgtgcgtactgctggttacaggcaaggttcaccgctggatacggagcattatctga

SEQ ID NO: 36744 - DNA, 1185 bp, Neisseria meningitidis
atggctaaggaaaaattcgaacgtagcaaaccgcacgtaaacgttggcaccatcggtcacgttgaccatggtaaaaccaccctgactgccgctttgactactattttggctaaaaaattcggcggtgctgcaaaagcttacgaccaaatcgacaacgcacccgaagaaaaagcacgcggtattaccattaacacctcgcacgtggaatacgaaaccgaaacccgccactacgcacacgtagactgcccggggcacgccgactacgttaaaaacatgattaccggcgccgcacaaatggacggtgcaatcctggtatgttccgcagccgacggccctatgccgcaaacccgcgaacacatcctgctggctcgccaagtaggcgtaccttacatcatcgtgttcatgaacaaatgcgacatggtcgacgatgccgagctgttggaactggttgaaatggaaatccgcgacctgctgtccagctacgacttccccggcgacgactgcccgattgtacaaggttccgcactgaaagccttggaaggcgatgccgcttacgaagaaaaaatcttcgaactggctgccgcattggacagctacatcccgactcccgagcgtgccgtggacaaaccgttcctgctgcctatcgaagacgtgttctccatttccggccgcggtacagtagtaaccggccgtgtagagcgcggtatcatccacgttggtgacgagatcgaaatcgtcggtctgaaagaaacccaaaaaaccacctgtaccggcgttgaaatgttccgcaaactgctggacgaaggtcaggcgggcgacaacgtaggcgtattgctgcgcggtaccaaacgtgaagacgtagagcgtggtcaggtattggccaaaccgggtactatcactcctcacaccaagttcaaagcagaagtgtacgtactgagcaaagaagagggcggccgccataccccgttcttcgccaactaccgtccccaattctacttccgtaccaccgacgtaaccggcgcggttactttggaagaaggtgtggaaatggtaatgccgggtgagaacgtaaccattaccgtagaactgattgcgcctatcgctatggaagaaggcctgcgctttgcgattcgcgaaggcggccgtaccgtgggtgccggcgtggtttcttctgttatcgcttaa

SEQ ID NO: 36745 - DNA, 387 bp, Neisseria meningitidis
atgaaaggtttagataagtatatcctatttaaaaattgtgaaacattaggagaattgtttcgaatatatcaagactatctatcattaaatattgatgacccaaatttaaaaattaaattttttgaccttttggaagaacttttatcagatggtgttattgaattatgcgattatcgtgaaaatcctccaaaaatattaaccggttcgccaaaaacacaggtagatgaattaagaaaaatttggccggatatggaagagatgttgctatattttccagataacccttggcattatgttgaatggttttggtggggagcaacttgccctattgaactgacacaattgcctaaaatagaaatttacgaagaacaaatgaaacaagcttaa

SEQ ID NO: 36746 - DNA, 930 bp, Neisseria meningitidis
atggattccattatcgaattgcgccacctcaaaaccctgctggcacttgaagaaaccggcagcgtctcccttgccgccaaacgggttttccttacccaatccgccctttcccaccagatccgtatgctcgaaaaccactacggcacgccgctgttcgaacgcaaatccacgcccttgcgctttaccccggtgggcgaaaggctgctgcgcctcgcccacgaactgatacctcaagttgctgttgcagaatgggatttagcgcgaatcacggaaggagaggcgggagagctgcggattgccgtcgaatgccatacctgtttcgactggctgatgcccgccatgggcgaattccgcccgatgtggccccaagtcgaattggatatcgtatcgggattccaagcggatcccgtcggactgctgctgcaacaccgtgccgaccttgccattgtttccgaagcggaaaaacaaaacggtatttctttccaaccgctgtttgcctacgaaatggtcggcatttgcgcaccagaccatccgcttgccgccaaaaacgtttggacggcggaagactttatcggggaaaccctgattacttatcccgttcccgacgagatgctggatttgcccaaaaaaatcctgattccgaaaaacatcaacccgccgcgccgacacagcgaactgaccatcgccattatccaactggttgccagcagacgtggcattgccgcccttccttattggacagtcatgccctaccttgaaaaaggctatgtcgtccaccgccaaattactgccgacggactgcaaagcaaactgtatgccgccatccgtaccgaagatacggacaagagctatctgaacaatttttgccaaatcatacgcgaacgcggttttgcagatttgcccggactgagcgaactggaatcggtctga

SEQ ID NO: 36747 - DNA, 1377 bp, Neisseria meningitidis
atgcacgacaaaacctggtccggacgtttcaacgaacccgtttccgaactcgtcaaacaatacaccgcctccatcggtttcgaccgacggcttgccgaatgggacatccaaggctcgctggcacacgcgcaaatgctgaaagaaaccggcgtgttggacgaaggcgatttggcggacatccgccggggtatggcggaaatcctcgaagaaatccgcagcggcaaaatcgaatggtcgtccgatttggaagatgtccatatgaacatcgaacgccgcctgaccgacaaaatcggcgacgcgggcaaacgcctgcacaccggccgcagccgcaacgaccaagtcgccaccgacatccgcctgtggctgcgcgaccagattaccgttatacaaagcctgattcaaagccttcagacggcattgctggatttggcggaacaaaacgccgaaaccgtcatgccaggctttacccacctgcaagtcgcccagcccgtcagcttcggacaccatatgctcgcctacgtcgaaatgctcggacgcgataacgaacggatggcggactgccgctgccgcgtcaaccgtatgccgctcggcgcagccgcccttgccgggacgacctacccgattcagcgcgaaatcaccgccgagctattgggctttgaacaaatctgccagaactcgctcgatgccgtatccgaccgcgatttcgccattgagttcacagccgccgcctcgctggttatggttcacctgagccgcctgtctgaagaattgattttgtggatgagcccgcgtttcggctttatcgacatcgccgaccgtttctgcacaggttcgtccatcatgccgcagaagaaaaaccccgacgtgcccgaactcgtgcgcggcaaatccggccgcgtcatcggacaccttatcggtctgattaccctgatgaaatcccaacccttggcgtacaacaaagacaatcaggaagacaaagaacccttgttcgacaccgccgacacgcttatcgacacgttgcggatttacgccgatatgatgcgcggcgtaaccgtcaaacccgacaatatgcgcgccgccgtgatgcagggcttcgctaccgccaccgacttggcggattatctggtcaaaaaaggcatgcctttccgcgatgcccacgaagtcgtcgcccaagccgtgcgccacgccgaccaagcgggcgtcgatttgagcgaactgccgctcgaagtcttacaaggtttcagcgatttgattgccgacgacgtttacggcgtgctgacacccgaaggcagcttaaacgcccgcaaccacttgggcggtaccgcgccggaacaagtccgcttccaagtgaaacgctggcgggaaatgttggcttaa

SEQ ID NO: 36748 - DNA, 525 bp, Neisseria meningitidis
atggatggagttggcaaaaacagacgcggtataaagattgggaaaaatatggaacacctatttgggaaatggctgcccgacttgcccacccccatttcagacggcatcagcctgccgatggtgcggctgctgcacacccggtcgctgaccgccgcattgcgcgccttgccgcatacattttcggtggaactgctgaaactgggcgaattggagacggaatgcggagggaggctggtgcgcgaagttttgttgaagctggacggtatccctgttgtcgcggcaaggagcgagtgccggataggttcggcgttttggcaaaacattttggactgcggcacgcgccctttgggcgagcgtctgtttcaagccgatttggaaggggcgcgttcggcgtttgagtttgccgtttccggcgaaggatgcggacggtactttgccgcgcggcgttctcggttttcccgtcacggcgaggaaatgctgctgaccgagtattttctgcccgaactgaaacgctttatcggataa

SEQ ID NO: 36749 - DNA, 390 bp, Neisseria meningitidis
atgaaaaacgttcaaaaaggctttacgctgctcgagctgatgattgccgtcgccatcctcggcatcctgacgcttatcacctacccttcctataaaacctacatccggcgcgtccgcctgtcggaagtcaggacgaccctgctgcacaacgcgcagaccatggaacgttactaccgccaaaaagggacgtttgaaaactacgacaaaaacaaactgaaacaaaacgaatatttcgatatcactttaagcgaagtcagccccgaccattttacccttaaggcaacgcccaatcccaccaccaacgacggcgaaacctgcgtcgttacgctcaacgacggcggtaccattgccgcttccgatacaaaccaatcctgccccggcttcgactaa

SEQ ID NO: 36750 - DNA, 798 bp, Neisseria meningitidis
atgaaccgtctttacccccacccgattatcgcccgtgagggctggccgattattggcggcggtttggctttgagcctgctggtgtcgatgtgttgcggctggtggtctttgccgttttgggtgtttaccgtatttgccctgcagtttttccgcgaccctgcgcgtgagattccgcaaaatcctgaagcagtgttgagtccggttgacggccgtatcgtggtggtcgagcgcgcacgcgatccgtatcgtgatgtcgatgctttgaaaatcagtatttttatgaacgtgttcaacgtgcattcgcaaaaatcgcctgccgattgtacggtaacgaaagtggtctataacaaaggcaaattcgtgaatgcggatttggacaaagccagcacggaaaacgaacgtaatgcggtgttggcgactacggcttccggtcgtgaaattacttttgttcaagtggccggtttggtggcgcgccgtattttgtgctacacccaagcaggtgcgaaactgtctcgcggcgaacgctatggctttatccgttttggctcgcgcgtggatatgtatctgcctgtcgatgcgcaggcgcaagtggcgattggcgataaagtaaacggtgtcagcactgtattggcgcgtttgccgctgactgcgccgcaaatcgaatccgagcctgaatctgagcctgctttacaaactgctccggttgaaacagcggcaaacccatctgccgaacaacggcaaatcgaggcagtggcggctaagattcaggcggctgtgcaagatgtgttgaaagattaa

SEQ ID NO: 36751 - DNA, 1554 bp, Neisseria meningitidis
atgctgtctgaaaggtcggcggattgttgcccggcgcactttgtggtaaagtttagaaaatcaactctaaactgtggcaggcggtttgaccggccgccgattaatgggaaccgacagaggaagccgatgatacacaccgaaccgagcgcgcagccgtcaactatggacacggctgcttttttaaagcacatcgaatccgcattccgccgcattttttcagacggtatcgacctgatgcgatacctgcccgaagacaaatggcttgccttgaagcaggcgggtttgctgttgcccttcctcgacaaaaaacacggcgggcgcaagggcagccagtttgaaattcaggaagtcttgcggattgcggggcattacggcgtgcccgttacgctgcgtaccggcatcgaaggcgcgctggtgttgcagccactgcaagagttcggcgatgaagcgcaaatcgcacagggtttggacatggttttcaaaggcgagggcggtggtttgggcgttaccgaacccgaaacctccggcgcggcgattgcccgagaaatgcagtcttactacgaatataccgacggacaaaccatttacgtcaacgccgcaaaatactggcagggcaactcgcaaagcgacttcctcctcgttgccgccaaagaacgcaaaaacggcaaactcgccaaagtcatcgacctgctgctcgtccccaaaacatacatccgctgcgaaaccctcgcatccgaaggcttgcgcgccgtccgttacgccgtcaaccgcatcgatgccgaaatgcctgcaaccgccgtgatgaaactctcccagagcgacgctgccggtttgcgcgcgttccaaaacatctttatccgcagccgcctgcaactgatcggcatgacgcacggcattatggaatacatccttgaaaacctggaacgatacgtccgcaacgacatcagattcgtcgattacgaacgccgcgaaatccggcgccgccatcaggtttccgagattctttaccgctacgtctgccattccgtttcgcccgttgcacccgtcgcccatcagctgatggaggcgaacatcgtcaaaaccctcgccacggaatacacttacgccgccgcgcaaatgttgcaaaaacttttgggcgcgaagggttttgaacgcggacacaccgccggcaatatcgctatcgacatccgccccttcacgatttttgaaggcccgaacgatatgctttatgccgaaatttacgaccagttcgtccgcgccaccgccgaagaaaaagaagcaggcatgaagttggacaaaaaccaaaccctgctcgaccgcctgcaaaccgatgcccgctttgccgccgtcgcccgcgactacactttgcccgaagacatccgcagcttcctgcaggaacacaccctgaccgacgcctgcgccctgcaaaaagtcttcatcggcaaaatcatcgcccgactctttgtcttcgtacaggcggaacacgaagacaccgcagccttcctgctgaacgacatccgcaaagatatattggactgccgatattgcggatag

SEQ ID NO: 36752 - DNA, 621 bp, Neisseria meningitidis
atgacaaagttatacgcagaaatcgccaagagggaggcgcaggacgacggcacggtcaaggttttgggttatgcctcaagcgaggcggtcgattcggacggtgaagtcatcgcgacggcagctatgaaggcggcgattcccgattatatgaagtttgacgcggggcgcgagatgcacggctcaaacgctgcgggaacggcaattgaaatcaacgttgaagacgacggcataacctttttcggtgctcatatcatcgaccccgttgtcgtgtcgaaagtcaaaacaggcgtttacaaaggcttttccatcggcggcagcgttaccgcccgcgataatttgaacaagtcgcaaatcacgggcttgaagctgacggaaatcagccttgtcgagcgccctgccaatcccgatgcggtgtctacctgctttaaggcggacaaaggtgcggaagcggtaaacaacgatacagaacataatgctacatattttagccatttcccttccaaacaaaaaagcaccggcggcagccgatgccccttcctttacaggttcccctattttttcactgcgggcagcactggtttagctgggccttttggtgcgggcgcgccgaccgaagcctga

SEQ ID NO: 36753 - DNA, 372 bp, Neisseria meningitidis
atgaataaaaccttgtctattttgccggtggcaatcttactcggcggctgcgccgccgggggcggtaacacattcggcagcttagacggcggcacaggcatgggcggcagcatcgtcaaaatggcggtcgggagccaatgccgtgcggaattggacaaacgcagcgaatggcgtttgaccgcgctggcgatgagtgctgaaaaacaggcggaatgggaaaacaagatttgcgcttgcgtcgcccaagaagcacccgaaaggatgaccggcaacgatgtgatgcagatgctggattcgtccacgcgcaatcaggcacttgccgccctgaccgccaaaacggtttccgcctgcttcaaacacctgtaccgctaa

SEQ ID NO: 36754 - DNA, 723 bp, Neisseria meningitidis
gtggttacggacaaatacaagttgagtttggaagaaaatatttttctggcaaagaaagtattggttgcccaaattcacaacctcagccgttttgagaattgtcagacgaccttgttgcagaccgaacaaattatccatggcaaaaatgtagcctccgcgtcactggaagacatccaaaccatcttgaacctgaaacgtgcctatcaatatgtgatttcgcatatttcaaacggcgaaccggtcgatatttcactccttaaaaaaatcaacaacattgttgccaaggacgattctttggcacccggtgatttccgtaccggttcggtcggcgtaacgctattggacggttcccgtcatgccccaaatccggtgaaggaaattgaagtggctcgcgtgttacaaaatatcggactgcaaagcggttcgacgacggaggcagccgtccgttttatgctttattgtatgcggcagcaggttttttgggacggcaacaaacgaacggcaaccttatttgccaacggtctgatgatggcggggggctgcggcatcttggaaatctccgaaatgcagatgccgcaattcaatgaaaaactgtccgcattctatcgctccggcgacgataccgatatttccaagtttgtgtatcaaaattgtatatcgggcatagactatttcggcacggacgaagatatagatttccccgacccaccaaacatgggctaa

SEQ ID NO: 36755 - DNA, 390 bp, Neisseria meningitidis
atgtggaaaattagtaaagaaaattgtgaagatttaggatttgcaatagtctgtatgttctatgatgctattaatctttctgaatttaaattatggttggatatagttgtcagagatactcctattgatacaattccattgtatatttttgatttgattgattttgataagagtataggggaaatttatgatgtaattggagtcgttaattatggttacatttcaaatgatcaaaaaaatgcattaacgggcattgccttcttaagggggatagatgtctatgatccgcctatttcaaaagaaaaagcattaaaagccttagagaaatatcctgaaatttatcagaggtttcagcatttctttccttttgtagagcttccgcttctttaa

SEQ ID NO: 36756 - DNA, 2364 bp, Neisseria meningitidis
atgcaattctcctactcatggctgaaaacccaagccgataccgaactttcctccgataagctggaacatctgttaaccatgtccggcttggaagtggaagaagccgagactgccgcgcctgcgtttgcgggcgtggttgttgccgaagtgaaatccgttgaaaaacatccggatgcagaccgtttgaacgttacccaagtcgatgcgggtacgggtgggttggttcagatcgtgtgcggtgcgccgaatgtgaaagcgggcatcaaagtgccgtgttcgctgccgggtgccgttttgccgggtaatttcaaaatcaagccgaccaaaatgcgcggcgtggtgtcggacgggatgttgtgttccaccgacgaactcggtctgcccgacgacggtgtgaacggcctgcacattctgcctgaagatgcgcccgtcggtaccaatatccgcgaatacttggatttggacgatacgctgtttacgttgaaaattacgcctaaccgcgccgactgcttgagcatcaaaggcattgcgcgcgaagtgtccgcattgacggggtgcgcgttcaggcagcccgaaatccataccgcgccgatcacgggcagtcgaaaacagcccgtgcagattaacgcgcctgccgattgcggccgttttatcagccgcgttattgaaaatgtcaatgcgaaagcggctactcccgattggatgaaacaacgtttggagcgcagcggcatccgcagtatttccgcgctggtggacatcggcaattatgtgatgctggaaatcggtcagccgatgcacgtttttgatgccgacaaactttccggcagcctgcacatccgccgcgcgcgcgaaggggaaacgctggaatgcctgaacgagaaaaccgtttccctgtctgaaaacacgctggtcgtggcggacgaaaaaggcgtgttgagtttggcgggcttaatgggcggcgcggcgagcgcggtttcagacggcacgcaaaatatcgtgctggaagcggcttggtttgcgcccgaaatcatcgccggcaaatcgcgccaatacggtttcggttcggattcgtcgttccgcttcgagcgcggcgtggattaccgtttgcaggcggatgccattgagcgtgctaccgaattggtgttgcagatttgcggcggtgcggcaggcgaaatggtggaagcgcaaggcgaattgcccgaagcgaagcaggtcggattgcgtttgggccgtctgaaaaccgtgttgggcgtggacattcctgccgaacaggtggaaaccattttgcaacacttgggcctgcagcccgagaaaacggcggaaggcttccgcgttaccgcgccgagcttccgttttgacatcgaaattgaggctgatttgattgaagaaatcggacgcgtttacggctatgaaaacatccccgacgattacacgtcaggccgtctgaaaatgctggaactgcccgaaacacgccgcccgcgttttgccgtttacaacgaaatggcggctcgcggttaccgcgaagtggtcagctatgccttcgttgacgagcagtgggaacaagattttgccgccaacgccgaccccatccgcctgcaaaacccgctggcggcgcagtatgccgtgatgcgttccacgctcatcggcggcttggtggaaattctgcaaaacaatctgaaccgcaaacaaaaccgcgtgtgcgtgtttgaaatcgcccgcgtgttcagcaaaggttcagacggccagtttgtccaaaacgaacgcatcggcggattgtggtacggcgcggtcatgccggaacaatggggcgggaaaacgcgcaatgcggatttttacgacatcaaggcagatgtggaaaatctgttgaaaaacaaagcagtcgagttcgttaaaaccggacatcctgccctgcatcccggacgcgccgccaatatcgtttcagacggcaaagtcatcggctttgtcggcgaactgcatccgaaatggctgcaaaaatacgacctgccgcaagcgccgctggtatttgaaatcgatatggcggccgtgttggaatgcggggaaacgcgctatcgggccgtatcgaaattccagccggtgcgccgcgatttggcgtttgtgatgccggaagctatgagccatgatgatttgctgcttgtcttgaaaggcgcggcaaacaagttggtacaggaaatcagcgtgtttgacgtgtatcgcggcacgggactgcccgaagggatgaagagcgtggcggtcaaagtgattttgcaggatatggaaaacacgctgacggatgaggcagtcgagccgcttatcggaaaactgattggcgcggcaacggcggcaggggcgcggcttcgcagttaa

SEQ ID NO: 36757 - DNA, 864 bp, Neisseria meningitidis
atgctggtggcggcggcctgcttcaccattatgaacgtattgattaaagaggcatcggcaaaatttaccctcggcagcggcgaattggtcttttggcgcatgctgttttcaaccgttgcgctcggggctgccgccgtattgcgtcgggacaccttccgcacgccccattggaaaaaccacttaaaccgcagtatggtcgggacgggggcgatgctgctgctgttttacgcggtaacgcatctgcctttggccaccggcgttaccctgagttacacctcgtcgatttttttggcggtattttccttcctgattttgaaagaacggatttccgtttacacgcaggcggtgctgctccttggttttgccggcgtggtattgctgcttaatccctcgttccgcagcggtcaggaaacggcggcactcgccgggctggcgggcggcgcgatgtccggctgggcgtatttgaaagtgcgcgaactgtctttggcgggcgaacccggctggcgcgtcgtgttttacctttccgtgacaggtgtggcgatgtcgtcggtttgggcgacgctgaccggctggcacaccctgtcctttccatcggcagtttatctgtcgtgcatcggcgtgtccgcgctgattgcccaactgtcgatgacgcgcgcctacaaagtcggcgacaaattcacggttgcctcgctttcctatatgaccgtcgttttttccgccctgtctgccgcattttttctgggcgaagagcttttctggcaggaaatactcggtatgtgcatcatcatcctcagcggtattttgagcagcatccgccccactgccttcaaacagcggctgcaatccctgttccgccaaagataa

SEQ ID NO: 36758 - DNA, 951 bp, Neisseria meningitidis
atggaatcaaaaatgtccatccatactctgaaacacctgccctcatcgctgctgctcggtctctgcctttccctgccgtcagcccacctttttgccgacaacgacattttagggcaatttttagaacagaacatgcttacctcctccgatccgatagaaatattcgccgaaagcacgatacaccccaccaacacccaagccattacaggcggtctgattctctcctcacagtctgccctggtcgtcaacaacaaaaccggacagatactgtatcagaaaaacgccgacaggattatgcccatcgcctccatttccaaactgatgagcgcgatggtcgttttggatgcaaacttggacatgaacgaaaccgttaccattacgcccgacgaaatcgaccgcatcaaagggaccggcagccgtcttgccataggtacggcacttacacgcaaagaactgctgcacctgagcctgatgagcagcgaaaaccgcgccacccatgcattgggcagaacctaccccggcggcatgggcgcatttgtcgccgctatgaaccgcaaagcccaaagcctgggcatgtacagcagccgcttttacgaaccgaccggactcaacttccaaaacgtttccaccgccaaagacctgagccttatggtcaacgccgccgcccaatatccgcaaatccgcaccaactcgacttccaactacgcctcggtacagaccaaaaacgggcagcagaactacaaaaactccaatgcgctggtcagggaaggcatgtggaacatcgaattgcagaaaaccggctacatacgcgaagcaggcaggtctatggttgtcaaagccaacattcaaaatcaacccgttaccatcgtattgctgaactcgcccacatccgccacacgcgtcaacgacgcccgcaaaatcgaatcgtggatgctgcagcaacgctcctga

SEQ ID NO: 36759 - DNA, 510 bp, Neisseria meningitidis
atgacagacactcaaaaccgggtagccatgggctacatcaaaggcgtattcggcataaaaggctggttgaaaattgccgccaacaccgaatattccgacagccttttggactaccccgagtggcatttggtcaaggacggcaaaaccatcagcgttacccttgaagccggaaaagtcgtcaacagcgaactccaagtcaaattcgaaggcataaacgaccgcgacttggcattctcattgcacggttacaccatcgaaataccccgtgaagcattcgccccgacagaagaagacgaatactactgggcagacctggtcggcatgaccgtcgtcaacaaagaccataccgttttaggcaaggtaagcaacctgatggaaaccggcgcaaacgacgtattgatgattgacggagaacacgggcagattctgattccgttcgtttcccaatatatcgaaaccgtcgataccggcagcaagaccattactgccgactggggtttggactactga

SEQ ID NO: 36760 - DNA, 1458 bp, Neisseria meningitidis
atgcacaaaatcctgcccatcgcccacgtcctctcccgactgggtatgctgttttcctttatcctgctgatacccgccgccctctcctacgccttttcggacggcgcgtacaccgccttcgccaccaccgcgaccgttaccctttccggctcgtgcatcgtccggctcgccaccctccggttcaggcgcgaactgcgcccgcgcgacggcttcaccctcgtcctgatgttgtggctggcgtttgccgctatggctgcgatgccgatgtacctgtatttcccgaatatgggctttaccgacgcattttttgaatcgatgtcgggactgaccaccaccggcgcgaccgtcatcccccacgtcgacgggctcgccccctccgtcaacttttggcggcatatgctcaactggctgggcgggatgggcatcatcgtccttgccgtcgccatcctgcctatgctcggcgtaggcggcacgcagttattcaaagccgaaatccccggcattgacaaagaaagcaaaatgtcgccgcgcatttcccaagtggcgaaaaaactttggttcggctacaccctgatcaccatcctcgcggcagcctgcctgcattttgccgggatgggctggttcgatgccgtctgtcacgcgatggcgaccctctcgctgggcgggttttccacccacgatgccagcatagcttattacaactcccccctcatcgaagcagtcatcatcgttttcaccattgtcggcggcatcaattttgccagccatttcgccgccctcaacagccgcagcctcaaaacctattggaaagacgaagaatgccggacgatgatgctgctgctctccggcagcatccttgccgccgccctgtacctgtggcacaccggctattacgccggctttatcgaatccctgcgctacaccgccttcaacttcgtctccatcggattggcaaacgggctggccaacaccgacttcgcacaatggccgctcctgatttccctgtggatgtttttcctcgccaacatcctccccaactccggctcgaccggcggcggcatcaaaaccatacgcgccctcgtcctgttcaaattcagcctgcgcgaaatgatggtgctgctgcaccccaaagccgtccgcaccgtcaaaatcagcggcaaggccatacccgaccgcctcgcgctgaccgttatgtccttcatcttcatctactttatgaccgtcgtcctcttcagcttcctgctgatggcgagcggtatggaatttaccaccgccttcaccgccgtcatcgcctgcattaccaattccggccccggcctgggcgaagtcgggcccgccggcaattacgccggtttggacgtgatgcagaaatggatctgcgttgccgccatgctcttgggcaggctggaaatcttcaccgtcttcatcctcttcacccccgcctactggaagaaataa

SEQ ID NO: 36761 - DNA, 372 bp, Neisseria meningitidis
atgaacctgaccgaacacaacggccccaaagcccagattttcttgaacggcaaacccgatcagcccgtttggttctccaccatcaagcagatgttcggctataccaagctgcccgaagagcctaaaggcatccgcgtgatttacgttaccgatatgggcaatgttaccgattggacgaatcccaatgccgacacggagtggatggatgcgaaaaaagccttttacgtcatcgacagcggctttatcggcggtatgggtgcggaagacgcgctgccgttcggcaacaaagagcaggctgagaaatttgcaaaggataaaggcggtaaggttgtcggtttcgacgatatgcctgatacctatattttcaagtaa

SEQ ID NO: 36762 - DNA, 1554 bp, Neisseria meningitidis
atgaaccggacttatgccaatttctacgaaatgctgaccgccgcctgccgcaaaaacggcaacggtacggcagtgttcgacggcaaggaaaaaaccacttacgatgcgctcaaacaggaagtagaagccgttgcggcgtacctgcaaaatatcggcgtgaagttcggcgacacggtcgcgctggcggtttccaattccacagaatttattaccgcctatttcgccgtctccgccatcggcgcggttgccgtgccgatgaacacatttttgaaaaacagcgaatacgcatatattttgaacgactgcaaggcgcggtttatgttcgcctcggccggcctgtcaaaagaattggcaggcttgaaggcgcaaacgcccgtcgaaaaaatcatttggacaggcaaaagccgacagggtggcggagcggcggaaggcgatgccttttttgaagacgtgcgccgtttccccgaaaaacccgacttgggccaccaaccccggataaatgatttggcacacatcatctacacctccggcacgacggggcatcccaaaggcgcgctaatcagttacgccaatctgttcgccaacctgaacggcatcgaacgcatctttaaaatctccaagcgcgaccgctttatcgttttcctgccgatgttccacagcttcacgctgacggctatggtgctgctgccgatttatatggcgtgttcgattattttggtcaaatctgttttcccgttttccaacgttttgaaacaggcactgctcaaacgcgcgaccgtgtttttgggcgtgcccgcgatttacaccgcgatgagcaaggcgaaaatcccttggtatttcagatggttcaaccgcatccgcctgtttatcagcggcggtgcgcctttggcggaacaaaccatcctcgatttcaaagccaagttcccccgcgccaaattgctggaaggctacggactgagcgaagcctcgcccgtcgtcgccgtcaatacgcccgagaggcaaaaagcccgcagcgtcggcatccccctgcccggtttggaagtcaaagccgtcgatgaagaattggtcgaagtgccgcgcggcgaagtgggcgaactgattgtcaggggcggttcggtgatgcggggctacctcaatatgcctgccgccaccgatgaaaccatcgtcaacggctggttgaaaacgggcgatttcgttaccatagacgaggacggcttcatctttatcgtcgaccgcaaaaaagatttgattatttccaaaggtcaaaacgtctatccgcgcgagatcgaagaggaaatctacaaactcgatgccgtcgaagccgccgccgtcatcggcgtgaaagaccgttatgccgacgaggaaatcgtcgccttcgtccaattgaaggaaggtatggatttgggcgagaacgaaatccgccgccacctgcgtaccgtgctggcaaatttcaaaatccccaaacaaatccactttaaagacgggctgccgcgcaacgctacgggcaaggtattgaaacgggtgttgaaggagcagtttgacggaaacaaatga

SEQ ID NO: 36763 - DNA, 1410 bp, Neisseria meningitidis
atggatacacaaatcaaaactgaagccggtcagcagaataaccggcgttatctgaccgtttggcggtggcatttttatgccggtctgctggttatgccttttcttaccctgcttgccgttacgggtttgggtatgctgctgtttgccaatattaccggtaaggagggcgagcggattcatgttgtgccgcaggcaacggtacaacctctgtctgttcaggcggaagcggcacgcagtgccgttaatccggaaacttcgtccgtcgttcagtatattgcgccgcgcgccgaggacatggttgccgtgttccgtgtcaacaatgaaggtaaggcaaccatggttgcggtcgatccttatacggcaaaagtggtcaacaccatgccgcgcaatcagggttggtatcacactatggatgaaatccacggcgatatgatgctcggtgcggcaggcgattatcttttggaaacggcagcttcactgaccattattatggttgtcagcggcttgtacctttggtgggtgaaacggcgcggcatcaaggcgatgctgctgccgtcaaaaggcagggcgcgttcttggtggcggaatctgcacggcacgtttggaacttgggtgtcgttgattttgctgttgttctgcctgtcgggtattgcttgggcgggtatttggggcggcaagttcgtacaggcttggagtcagttccctgccggtaaatggggtgtcgaaccgaaccccgtttcagtcgtgccgacccacggcgaggtattgaatgacggcaaggttaaggaagtgccgtgggttttggagcttacgcctatgcctgtttcagggacgactgtgggcaaagacggcattaaccctgacgagccgatgacattggaaaccgtcgaccgctttgcgcgggaaatcggtttcaaagggcgttatcagttgaatttgcccaaaggcgaggacggcgtatggactttgtcgcaggattctatgagttacgacatgatcagcccgtttgccgaccgcacggtacatatcgaccagtacagcggcaaaatccttgccgacatccgttttgacgattacaacccgttcggcaaatttatggcggcaagcattgcgctgcatatggggactctgggctggtggagcgtgttggcgaacgtcttgttctgccttgccgtgatttttatcggtatcagcggctgcgtgatgtggtggaaacgccgtccgaccggagcggtgggcatcgttccgccggcgcagaaagtcaagctgccggtttggtgggcgatggcagtgccgctattggcaatcgcactgctcttcccgaccgcactgcttgccattgccgtgatttggctgttggataccttgctgctgtcgcggattcctgttttgaggagatggtttaaatga

SEQ ID NO: 36764 - DNA, 807 bp, Neisseria meningitidis
atgccgacagttttcatctttttgacggcggtttacgcaggattgggtgcatttgcatggcactgccaacagcaggggctcggccgggattacccgtggaagacggaattgccggttttgggcgcggcattgaccgtccatggcgcggcactgcttatgccggtcattcaagacaaaatcatcattatgggctttgggtattccggcagcctgattgtttggatgatgctgtttatttattttgccggcagcttcttttattcgctgcgcggagtgcagttgctgctgtatccttgcgccgcactgatgctgctgtcaggtttggtttttcctggaaaattctcgggatatgaaattaccgaccttccctttatgctgcatatcggaacttcgctgctcgcatacgggctgttcggcatcgcaacattattgtccgttttgaccctgctgctgaatcggagcctgcaccgcaggaacttctccaagctcgcaggattcctgccgtcgctgctcagtttggaaaaactcatgttccaagccatgtgggcaggtttcatcctgctgacctattccgtcgtcagcggaacattttttgccgaagccgtattcggcaaacccatgacctttacccataaaaccgtattcggcatattgtcatggctgatttacggcggactgctgctcaagcacagcatgaccgcatggcgcggcaaaaaagccgccgtgtggaccatcatcggatttgtcagccttatgattgcctatatgggcagcaagttcgtattggaaatcattctgaaaagataa

SEQ ID NO: 36765 - DNA, 201 bp, Neisseria meningitidis
atgcaattgatatgtgccgattggacaggtataggaaattttatgaaaaccttcgaaaaaacatggtctgcacaatatcgggatatggaaatttcagtacggaatttttggaatttggagcggacaggggcggaagtctatatcaacggaaggcgggtttatcataacgaagccgaaatggcgtctgcttctttgcgttag

SEQ ID NO: 36766 - DNA, 780 bp, Neisseria meningitidis
atgaacggcatcatcatcaaaacccccgaagaaatcgaaaaaatgcgcgagctgggcaaactcgtcgccgaagccctcgactacatcggacaattcgtcaaacccggcgtaaccaccgacgaaatcgacaaactcgtttacgactaccacgtcaacgtccaaggcggctatcccgcccccctgcactacggcaacccgccctaccccaaatcctgctgcacctccgtcaaccacgtcatctgccacggcattcccgacgacaagccgctcaaagaaggcgacattatcaacatcgacctcaccatcaaaaaagacggcttccacggcgactccagccgtatgtttaccgtcggcaaagtctcccccatcgcccaacgcctgatcgacgtaacccacgcctccatgatggcgggcatagaagccgtcaaacccggcgcgacactgggcgacgtaggttacgcctgccaacaggttgccgaaaacgccggctattccgtcgtacaggaattctgcggacacggcatcgggcgcggtttccacgaagccccgcaagtgttgcactacggaaaaaaaggacagggccccgttctaaaaccgggtatgatttttaccgtcgaaccgatgatcaaccaaggcaaacgccacctgcgtatcctcaacgacggctggacggtggttaccaaagaccgctccctctccgcccaatgggaacacgaagtcttggtgaccgaaaccggctacgaaatcctcaccgtcagccccgcctccggcaaaccctga

SEQ ID NO: 36767 - DNA, 288 bp, Neisseria meningitidis
atgcaattagagattatcggtagtaaaatttatacggaacaagattttcataatcaaatttcaaaaatattttctatacaagattattatgggaacaatcttgatgctttatgggatttattaagcacaaatgtagaacgaccgattactttggtatggaaagatgctatgttctcaaaaaatcaattagaaaatatatttattgaaatcgtaaatgttctagaaagagttaagaaacaagatgaggattatggattcgaagaaaaatttaattatattttagagtaa

SEQ ID NO: 36768 - DNA, 423 bp, Neisseria meningitidis
atgagcatcatggaagttgaggtggtaagtagcgagcagaaaatctattcaggcgaggcaacatttatcgttgttccgactgtacagggcgaactcggtatttatccgcgacacgagccgattatgagtttggtgcggccgggggctttgcgtttgaccgttccgggcgaggataaagaggttttggttgctgtttccggcggtgttttggaagtacagcctgataaagtaactgtcttggcggatgttgccgtccgcagtgcggagatggatcaggcacgtgcggaagaggcgaaaaaagccgcagaagcgggcatttcccaagctaaagacgataaggctttggcggaggcgcataaagcattggctgctgcgattgcacagctcaaaactttggactatatccgttcgcacaagaaataa

SEQ ID NO: 36769 - DNA, 624 bp, Neisseria meningitidis
atggaacgtaaagaacgcctgcgtgcaggcattgccgcgatggggctggatattttggaaacggcgcaggacaggcttttggcctatgtggatttgttgaaaaagtggaacaaaacctacaatctgaccgcactgcgcgacgaggaaaaaatgattgtccatcatcttttggacagcctgacgctgctgccctatatcgaaggcgcacagacgatgctggatgtcggttcgggcggcggccagcccggcattccggcggcggtgtgccgtccggatgtgcagataacccttttggatgcgaatacgaagaaaacggcttttttacagcaggcggttatcgagttgggattggacaatgtgcgcgtggtatccggacgcgtggaggcggtttcggacgtgcgtgccgacgtgattaccagccgtgcgtttgcagaactggcggattttgtgtcgtggacggggcatctgttgaaagacggcggctactgggcggcgatgaagggcgtgtatccgcagggggaaatcgaccgcctgccgcaggatgtgtgcgtcgaaaaagtccaaaggcttgacgtgccgggcttggatgcggaacgccatatcgccatactccgcaagcgttga

SEQ ID NO: 36770 - DNA, 378 bp, Neisseria meningitidis
atgacccaattcaggcctattctgaatcaggcgaatattaccgatcagcaatggcggattatccgtcttttggcggaaaacggcacgctggactttcaagatttggcgaatcaggcgtgtattctgcgccccagcctgaccggtatcctgacccgccttgaaaaagcgggtttggttgtccgcctgaaaccttccaacgaccaacgacgtgtttttctgaagctgactgccgagggcgagaagctgtatgaggaaatcggcgaagaagtggacgagcgttacgacgctatcgaggaagtgctgggccgcgagaaaatgctgctgcttaaagacctgttggcagaacttgccaaaatcgaggatgcgttgaactcgtaa

SEQ ID NO: 36771 - DNA, 1587 bp, Neisseria meningitidis
atggcacttttcctcagcatattccccatcgtcctgctgatttggctgatggtgaaaaaaaacagtatgccctcctacgtcgcgctgccgattaccgcagtgctgatttacgccatcaaacttttctacttcgacgatgcgggcatgctgctcaacgccaccgccgcttccggcctcgtcaaaacgctcacgccgattaccgtgattttcggcgcgattatgttcaaccgtatgatggaaaccacgggctgcatcgatgtcatccgcaaatggctggcgaccatcagccccaaccccgtagcgcaactgatgattatcggctgggcttttgcctttatgattgaaggcgcatccggcttcggcacgcctgccgcgattgccgcgccgattctgatgagcttgggcttcaacccgttgaaagtggcgattttcactttggtgatgaactccgtccccgtctctttcggcgcggtcggtacgccgacctggttcggtttcgcaccgctgaacctgagtgccgaagacatcctcgccatcggcaggcagaccggcgtaatgcacttcttcgcaggtttcgtcatccccgtcatcggcttgggcttcatcgtaccttggtctgaaatccgcaaaaacttgggcttcgtcgccattgccgtcttctcctgcaccattccttatgtcgcattggcgatggtcaacgaagaattcccgtcgctcgtcgccggcgcgatcggcctgatggtgtccgtattcgccgccaaccaaggctggggcttgagcaaggaccacgccaaagacccgaatgccgaaaaagtgccgttcgcccaagtcgccaaagcactcgcccctttgggtatgctgatcggcatgctggtggttacgcgcatcaaacagctcggtatcaaaggcattttgaccagcaaagaagaatggttcagcttccaactgccgtttgatttgtccaaaatcaccgtcagcgactccctgacgattaccttcggcaatattttcggacaagatgtcagcgcgtcttaccaaacgctgtacgtcccggcttggattccgtttgtgctgaccgtttggatttgcatcctgctgtataaaaccaaattcaaagatgcctggacgatttatgccgtaaccttcaatcaaaccaaaaaaccgctgcttgccctgatgggcgcgctgattatggttcagctgatgctggtcggcggcgacaattcgatggtgaaaatcatcggtaaggaatttgccgcaatggcgggcgaacactgggtttatttctcgccgtatctgggcgcgatcggtgcgttcttctccggctccaacaccgtgtccaacctgaccttcggaccgattcagcagcaaatcgccttggataccggcctgtccgttaccctgattctggcgttgcagtccgtcggcggcgcgatgggcaatatggtgtgcctcaacaacatcatcgccgtatgtaccgtattggatgtgaaaaattccgaaggtgcgattatcaagaaaaccgttatcccgatggcgatttacggcgtgattgccgtcgtcgcggcaatgattttcttcctctag

SEQ ID NO: 36772 - DNA, 543 bp, Neisseria meningitidis
gtgaatatggctgcaagcgtccgtattttgggcatcgacccgggcagccgcgtaacgggtttcggtgtcatcgatgtcagggggcgcgatcatttttacgtcgcctccggctgcatcaaaacgcctgccgatgcgcctctggcagacaggattgccgtgattgtgcggcacatcggcgaagtcgttgccgtttacaagccgcagcaggcggcggtggaacaggtgttcgtcaacgtcaatcctgcatcgacgctgatgctcggtcaggcgcggggcgcggcattggcggcattggtcagccataagctgcccgtttcggaatacacggccttgcaggtcaaacaggcggtagtcggcaaaggcaaggcggcaaaagaacaggtgcagcatatggtggtgcagatgctggggctttcgggaacgccgcaggcggatgcggcggacggtcttgccgtcgcgctgacccacgccttacgcaaccacgggcttgcgtcccggctcaacccgtcggggatgcaggtcaagcgcggaaggtttcaatag

SEQ ID NO: 36773 - DNA, 2775 bp, Neisseria meningitidis
ttgaaaaacgtcgatttggacattccgcgccacaagctcgtggtggtaacaggattgtcgggcagcggcaaatcgtcgctagcgtttgatactttatatgccgaaggccaacgccgttatgtcgagagcctgtccgcctatgcgcggcagtttttgcagatgatggacaaacccgatgtcgatttgatcgaaggcctgtcgcccgcgatttccatcgagcagaaatccaccagccacaatccgcgttccaccgtcggcacggttacggaaatccacgactatctgcgccttttgtacgcacgcgtcggcacaccctactgccccgaacacaagctgccgctatccagccaaaccgtatctcaaatggttgatgccgtcttaaaactgccggaagacacgcgcgtgatgattctggcgccggcggtacgagagcgtaagggcgagtttgtcgatttctttgccgacttgcaggcgcagggttttgcgcgcgtgcgcgtggacggcgaagtctatcagttggacgaagtgccgaagctggaaaaaaacatcaagcacaatatcgacgtggtcatcgaccgtgtaaaagtgaaggcggacatcaagcagcggctggcggaaagttttgaaaccgcgttacgccacggcaacgagcgcgcgctggcgatggagatggacagcggcgaagaacattggttttccgcgcgtttcgcctgccccgtatgttcgtacagcctgccagaattagagccgcgcctgttttccttcaacaacccgatgggttcctgcccgacttgcgacggcttgggcaacaccaatttcttcgaccccgaaaaagtggtcgcccaccccgaattgtcgctggcttcgggcgcgattgacggctgggacaaacgcaaccagttctatttccaaatgattcagtcgctggcacggcattacggttttgatgtgcaggctgcttgggaaaccctacctgcaaaaatcaaaaaagtcgtgttgcacggttcgggcaaggaagtcattgatttcacctacctatccgaacgcggcaccaccttcaaccgcagccacgccttcgaaggcatcattcccaatctcgaacgccgctaccgcgaaaccgacagcgaaaccgtgcgcgaaaaattgcgcgaataccaaaaccaccgcgcctgcccgagctgcggcggtgcacgtttgcgcaaagaagcgcgctacgtttacgtcagcggcgaaccgttgcacgaagtctccgcctggccgctgaccaaaacccaccaattctttgaaacgctggatttggacggcaacaaaaaacaaatcgccgaaaaaatcctcaaagaaatcaccgagcggcttggctttttgattaacgtcgggctggattacctgaatttaagccgctccgccgaaaccctctccggcggcgaagcccagcgtatccgcctcgccagccaaatcggcagcggcctgaccggcgtgatgtacgttttggacgaaccctccatcggcctgcaccagcgcgacaacgaccgcctgctcgccaccctcaaacgcctgcgcgatttaggcaacagcgtgattgtagtcgaacacgacgaagacgccatccgcgaagccgatttcgtcgtcgatatgggcccgggcgcaggcgaacacggcggcaacgtattgattgccgacacgcccgaaaacgtcgccaaatgtgaaaactccgttaccggacaatacctcagcggcaaaaaatccattgccgtgccgtctgaacgcacacccgtcaatcccgaccgaatgctcgtcctcaaaggcgcgcgcggcaacaacctcaaaaacgttaccctcgaactgccgctcggtttgattacctgcatcaccggcgtatccggcagcggcaagtccaccctgattaacgacaccctcgccaaaatcaccgcccgcgaactcaaccgcgcccaagaagaacccgccccatacgacgacatccgcggcctcgaacacctcgacaaagtcatcaacgtcgaccaatcccccatcggccgcaccccacgctccaatcccgccacctacaccggcctgttcacccccatccgcgaactcttcgccggcgtacccctctcgcgcgaacgcggctacaatgtcggcagattctccttcaacgtcaaaggcggccgctgcgaagcctgccaaggcgacggcgtcatcaaagtcgaaatgcacttcctgcccgacgtgtatgttccctgcgaagtctgccacggcaaacgctacaaccgcgaaacgctcgaaatccaatacaaaggcaaaaacatcagccaagtcctcgacatgaccgttgaagaagcccgcgaatttttcgacgccgtccccaccgtatcgcgcaaactgcaaaccctgatggacgtaggcctcggctacatccgcctcggccaatccgccaccaccctctccggcggcgaagcccagcgcgtcaaactcgccttggaactctccaaacgcgacaccggcagaacgctctatatcctcgacgaacccaccaccggcctgcacttcgccgacatcgccctgctgctggaagtcataggtcgtctgaaaggcaaaggcaactcgatagtgattatcgagcataatctggatgtgattaaaaccgccgattggattgtggacttagggccagaaggcggcgacggcggagggaggattattgcttcaggtagcccggaggaagtggcgaaggttaaggggagttatactgggaagtatttgaagaatatactttaa

SEQ ID NO: 36774 - DNA, 1272 bp, Neisseria meningitidis
ttgttccatttcatgctgcccgtgcgctttacaagagtttcagacggcatcaaacgtttaactcccgccagcaatcaaacagctttttatcacccattcgaacatccgttttgccggtactcgtctttttattggagtattgccattatgaccgcaaccactgcgtcttcaaccaagccttatctgcaaatccaaggtttggtgaaaaagtttggtgacaattacgctgtcgataacatcgacttggacatttatcaacacgaaatcttcgcccttttgggcagttccggcagcggaaaatctacactgctgcgtatgctggcgggtatggaaagtcccaatcagggaaaaattatccttgatggtcaggatattaccaaacttgcaccctatgatcgccccatcaatatgatgttccaaagttacgcgctttttccgcatatgaccgtagaacaaaacattgccttcggtctgaaacaggacaaaatgcctaaaggcgaaatcgccgcgcgcgtcgaagaaatgctccgcctggttcagatgaccaaatttgctaaacgcaaaccgcaccaattgtccggcggtcagcagcagcgcattgctttggcacgcagtctggcaaaacgtccgaaaattctactgctggatgagcccctcggtgcattggacaaaaaactgcgccaacaaacccagcttgagttggtcaatacgctggaacaagtcggcgtaacctgtattatggttacgcacgaccaagaagaggcgatgacgatggcgacccgcatcgccattatgtctgacggtcagttgcagcaagtcggcacacccagcgacgtgtacgactatcccaacagccgcttcactgccgagtttatcggcgaaaccaacatctttgacggtgtggtgattgaagatcatgccgactatgccgttatcgaatgcgaaggtttggaaaaccacgtccgcatcgatcacggtttgggtggtccgagcgagcaggacctttgggttagtattcgaccagaggatattgatttatataaagaaaaacccgaatatttgggcgactacaactgggcgaaaggcacggtaaaagaaatcgcctatttgggcagcttcgccatttaccatatcaagctcggcaacgggcgcgtcgtcaaaagccaagtccccgccccttactggtatgtgcgcaacattacaccgccgacttgggacgaaaccgtctatatcagctggccggaaaaccaaccgactccgttgttccgttga

SEQ ID NO: 36775 - DNA, 609 bp, Neisseria meningitidis
atgaaacccaaaccgcacaccgtccgcaccctgattgccgccattttcagccttgcccttagcggctgcgtcagcgcagtaatcggaagcgccgccgtcggcgcgaaatccgccgtcgaccgccgcaccaccggcgcgcaaaccgacgacaacgtaatggcgttgcgtattgaaaccaccgcccgctcctacctacgccaaaacaaccaaaccaagggctacacgccccaaatctccgtcgtcggctacaaccgccacctgctgctgctcggacaagtcgccaccgaaggcgaaaaacagttcgtcggtcagattgcacgttccgaacaggccgccgaaggcgtgtacaactacattaccgtcgcctccctgccgcgcactgccggcgacatcgccggcgacacttggaacacatccaaagtccgcgccacgctgttgggcatcagccccgccacacaggcgcgcgtcaaaatcgttacctacggcaacgtaacctacgttatgggcatcctcacccccgaagaacaggcgcagattacccaaaaagtcagcaccaccgtcggcgtacaaaaagtcatcaccctctaccaaaactacgtccaacgctga

SEQ ID NO: 36776 - DNA, 684 bp, Neisseria meningitidis
atgccgtctgaaaaatgttcagacggcatttcttataaccttttgtttgcagcacataaccaatcagtctttcctattccgttccgaaatgcataccatgcgcccgtacccaatatttgcgaacaaggaaagaaaatggcacgtttaaccgtacacaccctcgaaaccgcccccgaagccgccaaagcgcgcgtcgaggcggtacttcaaaacaacggctttatccccaaccttatcggcgtattatcaaacgcccccgaagccttggcgttttaccaagaagtcggcaagctcaacgccgccaacagcctgaccgccggcgaagtcgaagtcatccagatcatcgccgcccgtaccaaccaatgcggtttttgcgtggcagggcacaccaaactcgcaaccctgaaaaaactcctgtccgaacaatccgtcaaagccgcgcgcgctttggcagcaggcgaatttgacgatgccaaactcggcgcgctcgccgccttcacccaagccgtaatggcgaaaaaaggcgcggtatccgacgaggaactcaaagcatttttcgatgcgggctacaaccagcagcaggcagtcgaagtcgtgatgggcgtagccttggcaaccctgtgcaactacgtcaacaacctcggacaaaccgaaatcaaccccgaattgcaggcttacgcctga

SEQ ID NO: 36777 - DNA, 1101 bp, Neisseria meningitidis
atgattactctgaaaaccaccccatttcatcaagcccatcaagatgcaggcgcgaagccggtagattttgccggctgggagctgcccatccattatggttcgcaaatcgccgaacacgaagccgtgcgcaccgacgccggtatgtttgacgtatcccatatgcttgttaccgacgtagcaggcgcaaatgccaaagcctttttccgcaaattgattgccaacgatgtcgccaagctcgcttttgtcggcaaagccctttattccgctttgctcaacgacaacggcggcgtgattgacgacttaatcgtttaccgcaccaacgaagccgaaacccaataccgcatcgtgtccaacggcgcgactcgcgaaaaagatacggcacaattccacaaagtcggacaagagttcggtgtttccttcaatccgcgctacgacctcggcatgctcgccgtacaaggtcctaaagccattgaaaaactcctgaccgtcaaacccgaatgggcagatgtcgtccataacctcaaaccgttccaaggcgcggatttgggcaacgactggtttgtcgcccgcactggctataccggcgaagacggcgtggaagtcatcctgcccggtaccgaagccgttgcattcttcaaagccctgcaagcagcaggcgtacatccttgcggcctcggcgcacgcgacaccctgcgcatggaagccggtatgaacctctacggcaacgatatggacgacaataccagtccgctcgaagcaggcatgggttggacggttgatttgaaagacgaaagccgcgattttgtcggtaaaaccgctttgctggcattgaaagaaaaaggcgttgccgtcaaacaggtcggtctgttgctcgacaaaggcggcatcctgcgcgcgcatatggaagtgttgaccgacaaaggcaaaggcgaaaccaccagcggcgtattctctccaagcctgaaacaatccatcgccatcgcccgcgtgccgaaagactttgacggcgataccgccaaagttctgattcgcggcaaagaagtggacgtacgcgtactgaagctgccgtttgtgcgcaacggacagaaacagtttgattga

SEQ ID NO: 36778 - DNA, 279 bp, Neisseria meningitidis
atgtactaccaagtcggaaataaatgtcttgagaagcaccaggctgaaaacctttatttcagcttggtagtaccaagaatcaaagaaaacggacagattgtcaggccggaatataacggcagcctgtggaagatgtcggacggtcagccgctaaggcttttattggcggaatgcagtccgaaagacaacctgcaaagcggtcttgaaacaggctggatagtattcggcatcctcgcgtccgtttactttgtttccctgctgaaaaaggttttgaaatga

SEQ ID NO: 36779 - DNA, 519 bp, Neisseria meningitidis
atggcaaaacatgaaattgaagaacgcggtgacggtctgattgaaaagatggtcgcagttaaccgtgtaaccaaagtagttaaaggtggtcgcattatggctttctctgcgctaactgttgttggtgatggagatggtcgtattggtatgggtaaaggtaagtcaaaagaagtgcctgttgcagtccaaaaggcgatggatcaagcacgacgctctatgattaaggtaccattaaaaaatggtacgattcatcatgaggttattggtcgacatggtgctactaaagtatttatgcagcctgctaaagagggtagtggcgtaaaagccggtggacctatgcgtttggtttttgatgctatgggcattcataatatctccgccaaagtgcacggatctactaacccatataatatcgtacgtgcaacattagatggtttgtctaagttgcatactcctgctgatatcgcagccaaacgtggcttgacagtggaagacattttgggagttaaccatggctga

SEQ ID NO: 36780 - DNA, 117 bp, Neisseria meningitidis
atggattcggcaatgccgtctgaacgtgtttcagacggcattttcttttccggcaaatcaaaaaaaagtataatggcgcgtctcaaaatcacactggaacaccgcgatgaacgttaa

SEQ ID NO: 36781 - DNA, 1500 bp, Neisseria meningitidis
gtgttcaaaaaataccaatacctcgctttggcagcactgtgtgccgcctcgctggcaggctgcgacaaagccggcagctttttcggtgcggacaaaaaagaagcatccttcgtagaacgcatcgaacacaccaaagacgacggcagcgtcagtatgctgctgcccgactttgtccaactggttcaaagcgaaggtccggcagtcgtcaatattcaggcagcccccgccccgcgcacccaaaacggcagcggcaatgccgaaaccgattccgacccgcttgccgacagcgacccgttctacgaatttttcaaacgcctcgtcccgaacatgcccgaaatcccccaagaagaagcagatgacggcggattgaacttcggttcgggcttcatcatcagcaaagacggctatattctgaccaatacgcacgtcgttaccggcatgggcagtatcaaagtcctgctcaacgacaagcgcgaatataccgccaaactcatcggttcggatgtccaatccgatgtcgcccttctgaaaatcgacgcaacggaagagctgcccgtcgtcaaaatcggcaatcccaaagatttgaaaccgggcgaatgggtcgccgccatcggcgcgcccttcggcttcgacaacagcgtgaccgccggcatcgtgtccgccaaaggcagaagcctgcccaacgaaagctacacacccttcatccaaaccgacgttgccatcaatccgggcaactccggcggcccgctgttcaacttaaaaggacaggtcgtcggcatcaactcgcaaatatacagccgcagcggcggattcatgggcatttccttcgccatcccgattgacgttgccatgaatgtcgccgaacagctgaaaaacaccggcaaagtccaacgcggacaactgggcgtgattattcaagaagtatcctacggtttggcacaatcgttcggtttggacaaagccggcggcgcactgattgccaaaatcctgcccggcagccccgcagaacgtgccggcctgcaggcgggcgacatcgtcctcagcctcgacggcggagaaatacgttcttccggcgaccttcccgttatggtcggcgccattacgccgggaaaagaagtcagcctcggcgtatggcgcaaaggcgaagaaatcacaatcaaagtcaagctgggcaacgccgccgagcatatcggcgcatcatccaaaacagatgaagccccctacaccgaacagcaatccggtacgttctcggtcgaatccgcaggcattacccttcagacacataccgacagcagcggcggacacctcgtcgtcgtacgggtttccgacgcggcagaacgcgcaggcttgaggcgcggcgacgaaattcttgccgtcgggcaagtccccgtcaatgacgaagccggtttccgcaaagctatggacaaggcaggcaaaaacgtccccctgctggtcatgcgccgtggcaacacgctgtttatcgcattaaacctgcaataa

SEQ ID NO: 36782 - DNA, 819 bp, Neisseria meningitidis
gtggttgccacgcccatcggcaatttggcggacattaccctgcgcgctttggcggtattgcaaaaggcggacatcatctgtgccgaagatacgcgcgttaccgcgcagcttttgagcgcgtacggcattcagggcaaacttgtcagcgtgcgcgaacacaacgaacggcagatggcggacaagattgtcggctatctttcagacggcatggttgtggcacaggtttccgatgcgggtacgccggccgtatgcgacccgggtgccaaactcgccggccgcgtgcgtgaggccgggtttaaagtcgttcccgtcgtgggcgcaagcgcggtgatggcggctttgagcgtggccggtgtggaaggatccgatttttatttcaacggttttgtaccgccgaaatcgggagaacgcaggaaactgtttgccaaatgggtgcgggcggcatttcctatcgtcatgtttgaaacgccacaccgaatcggggcaacgcttgccgatatggtggaattgttctccgaacgccgattaatgctggcgcgcgaaattacgaaaacgtttgaaacgttcttaagcggcacggttggggaaattcagacggcattgtctgccgacggcaaccaatcgcgcggtgagatggtgttggtgctttatccggcgcaggatgaaaaacacgaaggcttgtccgagtccgcgcaaaacatcatgaaaatcctcacagccgagctgccgaccaaacaggcggcggagcttgccgccaaaatcacgggcgagggaaaaaaagctttgtacaatctggcactgtcttggaaaaacaaatag

SEQ ID NO: 36783 - DNA, 387 bp, Neisseria meningitidis
atgaacgaacaagaactgcaagacctgcaaaaaatggtcggggtcgccgtcaacgccctcgaagacatcaaagccaaagacatttccgttctcgaaacgcaagacaaaacttcgctgtttgccagaatgattatcgccagcggcgacagtacgcgccaagtcaaagcactggccaacaacgttgccgtcgatttgaaagaagccggttttgaaatcctcagcaccgaaggcgacagcggcgaatggacgttggttgatgcaggagacctcgtcgtccacgtcatgctccctgccgtgcgcgatttctacgacatcgacaccctttggggcggcgagaaaccgagtttccacgccggaatgcagaagccgtggcacgctgcagactga

SEQ ID NO: 36784 - DNA, 864 bp, Neisseria meningitidis
atgaaaaccttcttcaaaaccctttccgccgccgcactcgcgctcatcctcgccgcctgcggcggtcaaaaagacagcgcgcccgccgcatccgcttctgccgccgccgacaacggcgcggcgaaaaaagaaatcgtcttcggcacgaccgtcggcgacttcggcgatatggtcaaagaacaaatccaacccgagctggagaaaaaaggctacaccgtcaaactggtcgagtttaccgactatgtgcgcccgaatctggcattggctgagggcgagttggacatcaacgtcttccaacacaaaccctatcttgacgacttcaaaaaagaacacaatctggacatcaccgaagtcttccaagtgccgaccgcgcctttgggactgtacccgggcaagctgaaatcgctggaagaagtcaaagacggcagcaccgtatccgcgcccaacgacccgtccaacttcgcccgcgtcttggtgatgctcgacgaactgggttggatcaaactcaaagacggcatcaatccgctgaccgcatccaaagcggacatcgccgagaacctgaaaaacatcaaaatcgtcgagcttgaagccgcgcaactgccgcgcagccgtgccgacgtggattttgccgtcgtcaacggcaactacgccataagcagcggcatgaagctgaccgaagccctgttccaagaaccgagctttgcctatgtcaactggtctgccgtcaaaaccgccgacaaagacagccaatggcttaaagacgtaaccgaggcctataactccgacgcgttcaaagcctacgcgcacaaacgcttcgagggctacaaatcccctgccgcatggaatgaaggcgcagccaaataa

SEQ ID NO: 36785 - DNA, 1002 bp, Neisseria meningitidis
ttgatgaagattgcgatttacggtacgaaaagctatgaccgcgaacattttacccgcgccaaccggcatttcggcttcgagctggagttttttgattttatgctggatgcgaaaacggcgaaaatggcggaaggcgcggaagcggtttgtatttttgtaaacgacgacggcagccggcccgtgttggaaaaattggcgcaaattggcgtgaaaactgtggcgttgcgttgtgccggcttcaataatgtggatttgaaagcggctgaagagttgggcttgaaagtcgtgcgcgtgcctgcctattcgcccgaatcggttgcggaacatacggtcggtctgatgctgacgttgaaccgccgtatccacaaagcctatcagcgtacccgcgatgcgaatttttcgctggaaggtctgaccggtttcaatatgtacggcaaaacggcgggcgttatcggcacggggaaaatcggtatcgcaacgatgcggattttaaagggtttcggtatgaacctgctggcttacgatccgttttgcaaccccgaagtggaaaaactcggcggaaaatatgtggatttggacgagctgtatgcccagtcggacatcatcacgctgcattgcccctccacgccggaaaaccactatatgctgaacgaagcggcgttcgacaaaatgaaagacggcgtgatgattatcaacaccagccggggcgggctgattgacagtgccgccgcgattgaggcgttgaaacgccggaaaatcggcgcattgggcatggatgtgtacgagaacgagcgcgagctgttttttgaagacaaatccaacgatgtgattaccgacgacgtgttccgccgcctgtcgtcttgtcataatgtgctgtttaccggccatcaggcatttttgacggaagaggcgttgggtaatatttcggaagttacgctgtccaatatccgcgaggtcggacagaccggcgattgcggcaatgcggttcgtgccgacggctga

SEQ ID NO: 36786 - DNA, 636 bp, Neisseria meningitidis
ttgaacatcaaatattcgggcatcgaaaacaggtttgaaaccgccatcctgaagaaaaacggcgtaagatccggcttcgtctccttcgcccccaaccttgccgccgtcaaactgaacgattatgccaaagttagaaaacggattaccaaaaccaaacagaaagccgacatcgtcattgtgatgttccacggcggcgcggaagggaaacaggcggaacacctgccgttcgataccgaaatcttctatggggaaaacaggggcaacgtcgtcgagtttgcacggcttgccgtcgattccggcgcggatgtcgtattcgggcaggggccgcacgttacacgcgccgtcgaactttaccgcgaccgcttcatctcttacagcggcggcaactttgccacctacggcgcaatcaacacctccggcatcagcggcatcgcccccattttcaaaatcatcaccgacaaacagggtaaatttatttccggaaccatcatccctattacccaagccgacgataaaatccccaaaatcgaccccgagaaaaccgttatcgggcggattatttatctgaaccgcagcgatttccccaacgggaacgggctggatgtctcgcccgacggcaacatcacgcgccggtaa

SEQ ID NO: 36787 - DNA, 477 bp, Neisseria meningitidis
atgccgatagaaatcgaacgccgttttttgattggaaacgacaactggcggcaatacgccgacgaaccgctgctgttgaggcagggttatctgtctgttgaaaaagaacgcaccgtccgtgtccgcattgccggacaacgggcgtggctgacgctgaaaggctatatttcggaaatcagccgcagtgagtttgaatacgaaatcccgcttgccgatgcggaaaagatgatggaaacgatgtgcccgtttaaaatggaaaaatggcgttatccggtcagatggggcggcagcctgtttgaaatcgatgtttttcttggcgataatgcgcctttggtcgtcgcggaaatcgagttgcccgacgagaatgccgattttgaccgtccggactggctgggacgggaaatcactgccgacggtatgtttaccaatgcttatttgagcaggcatccgttctcaagctggaaaaatgccgtctga

SEQ ID NO: 36788 - DNA, 276 bp, Neisseria meningitidis
atgaaaccgaatattcatcctgacaattaccggaccgtcctttttttcgacagcagcgccaatgaaggctggatgattcgttcttgcgccgaaacacacggaaaaacgatggtttggacagacggcaaagaatatccgctattttccctggatacttcttccgcatcccatcccgtctataccggcaagcagcgcaacgtcaataccgaaggccgtgccagcaaattcaaccaacgtttccaatccgtaatgtcatcgtttagaaaggacaaataa

SEQ ID NO: 36789 - DNA, 1035 bp, Neisseria meningitidis
ttggaagacgaagattttattcgcgccgcgtccatgctcgccgaagaagttttcggtttcggtatctacaaagagtccaaaggttcgggcgggcgtttttatgagcgctgttggttgatgggttcggaagacgtcctatacggtcgcgtccattttggcggacaaaacaataccattcttttcgaactgaccggcaccggttgcggcgtcgcaaaagaaggctgggaatcacgacttttcgcattcctgactaatgcaatccgcccaaaaataacacgcgttgatatcgcaaaagactttttcaacggcgaatacagcccgaaccaagcccgtgaagaccgaaataaaggtatgtttacctgtcatcacgtcaaaccaaaaggcgaatgtttggggtcagattgggaagaagacgatgaagccaaaatgaccaaaggcaagacctatggtatcggctcccgtgaatcgtccaaatatgtccgcgtctatgaaaaaggcaagcagttgggcgataaaacaagcacatggacgcgatttgaaattgaattcaaagcaaaagatatcgttatccctttcgaagttttgcagaatccgggcgaatatttcggcggcgcatatccgatttgcgaacgattcgtccaaaaggcaacgcgcatacacgcggttaaggaagataaggtcatttcagccgaccgctaccttgaatgggtaaaaaaacagtttggacgtgcggcaaacggtctgaaattcatttttcccgaattggacaaagccaaactgtttgaactgattgagccgagtcatcacaagctgcccaagtctttggctcccgaagcctacgactgcgcctttttgaaagctcaagccattcatgaacagcccgcattcaaaccgtacaaagacccttactatatgtacgaatattacgagaatcttgaaaaacagcttgaacagcaaaaacacgtcaacaatgaagaaagctataacaacttcatttacgacaaattcgcaagactaccgatttcatgggcttaa

SEQ ID NO: 36790 - DNA, 741 bp, Neisseria meningitidis
atgaatcctttaatctccgacttccaaactccgcaacaacgcacccccgtcatcgtcgcccttgattttgccaacgaaaaagacacgctcggattcgtccgcaaccttgacccgacattgtgtcaaatcaaaatcggcaaagagctgtttaccgcgacgggacgcagtttggcagaaagcttaatcaatcaaggtttcaaacttttcctcgatttgaaataccacgatattccccacaccgtcgcgcaagcctgcaaagtcgctgccgacatgggcgtttggatggtcgatatgcacgcgtcgggcggccgccgtatgatggaagccgcagcagaagccgttgccggatacggcacaaagccgctcttaatcggcgtaaccgtgttgaccagcatggaacaaagcgatttggcggaaatcggtttgaacatcgctcccgaagaacaagtcatccgtttggcgaaactggcgcaaagttcgggcttggacggcgtggtctgctccgcccaagaagccgcaccgctgcgccgcgagttgggacaagattttgtcttggtcacgcccggtatccgcttggacgttgccggcaacaacgacgaccaacgccgcatcatgacgcccgccgaagccttggcggcaggttcgacttatctcgtgatgggccgccccgttacccaagccgccaatccgctagccgtattgcgcgaagtgaaccgcgtggcaaaccttgaagcaaactga

SEQ ID NO: 36791 - DNA, 363 bp, Neisseria meningitidis
atggcttcaagcggcgtaaacaacgaaatcaaaggcaaaaaactctccctgtgggccaagcgtcaagacggttcggtaaaatggttctgcggacagccggttacgcgcaaagcccccaccggcgccaacaacgacgaagtcaccaagaccgccgacaacgaaatcaacaccaagcacctgccgtcaacctgccgcgacgcatcatctgccagccgtacaaaaacacccggtttcgctttcaaatacttccaaaaaatcagccgttaccgagtattgcccgaatcacggcaaatgaccaaaaaacttcgtcattcccgcgcaggcgggaatctaggtttgtcggcgcagaaacttatcgggtaa

SEQ ID NO: 36792 - DNA, 1032 bp, Neisseria meningitidis
atgctgcaaaccgacaacctgaccgccgcgcaaccgcaacgcatcgttgccgcccaaaccgcctccgcacaggaagaactgctcgaacgcgccctccgccccaaaacgctggacgactacatcgggcaagacaaagccaaagaacagcttgccattttcatccaagccgccaaaaaacgcggcgaagcactcgaccacgttttgctcttcggcccgcccggactgggcaaaaccacactggcgcacatcatcgccaaagaattgggcgtaaatttgcgccaaaccagcggccccgtcctcgaacgcgcaggcgacctcgccgcccttttgaccaaccttgatccgcacgatgtattgttcatcgacgaaatccaccgcctcagccctgttgtcgaagaaatcctctatcccgcgctcgaagactaccggctcgacattatgataggcgaaggacccgccgcccgttccgtcaaaatcgacctgccgcccttcacgctcatcggcgcgaccacccgcgccggtatgctgaccaatccgttgcgcgaccgcttcggcatcgtctcccgccttgagttttacgaaaaccgagaccttaccaccatcgtcagccgttcggcacaactgttgcagctcgatatgtccgaagaaggcgcggaagaaatcgccaaacgcagccgcggtacgccgcgcatcgccaaccgcctgttgcgacgcgtgcgcgatttcgccgacgtgaaaaacaacggcacaatcgacggcggcatcgccgatgccgctttaagtatgctggacgtggacgcgcaggggctggacgtgatggacaggaaatttctcgaagccgttttgcacaaattcggcggcggcccggtcggtttggacaatgttgccgccgccatcggcgaatctacagacaccatcgaagacgttatcgaaccctaccttatccaacaaggcttcctgcaacgcaccccgcgcggcaggatggcgaccgaacgcgcctacctgcatttcgggctgcccgtcgaaaaataa

SEQ ID NO: 36793 - DNA, 537 bp, Neisseria meningitidis
gtggatttgagggaagtaaaattaggcggcgaaaccatttacgagggcggtttcgtcagcatcagcagggataaggtcaggttgcccaacggcaatgaagggcagcgtatcgtcatccgccatccgggtgcggcatgcgtgttggcggttacggacgaggggaaagtggttttggtgcggcagtggcgttatgcggcaaatcaggcgacattggaacttcctgcgggcaagctggatgtggcgagcgaggatatggcagcatgcgctttacgagaactggctgaagaaacgccttataccgccgacagcgtacgcctgctttacagtttttatacggcggtcggtttttgcaacgaaaaaatgtatctgttcgaggcggaaggcgtgcgtttgggcagtacgcttgccaatgacgaagacgagattacggaaaccgtattgatgtcgaaagaagaagtccgtcaggcattggcaaacgatgaaattaaagacggcaagacattaatcggtttgcaatactggctgatgaaggattga

SEQ ID NO: 36794 - DNA, 372 bp, Neisseria meningitidis
atgataaaacaaaatagttttgttccgtatcctgaagcaatgcttcctaaaggatttaaatatccgcaaagttatttaaaattagctcaatccactcatgccattaactacgatgaacaatattcttttccttggtggtttgaaaatgcagaaagcaatatatcagaagtaattgacatttattttgaaataactggcattccaaacctattaccttttgctagaaaccaagagtgggctgcctgttttgatatttcagataaatcaggtaatcctaaaattatagtagttaatttagataatacaaaatattacgagacttttgaaaattttgatacttggctaaaagaagctgaaaatgatggttggtag

SEQ ID NO: 36795 - DNA, 1128 bp, Neisseria meningitidis
atgtacactttccgcccgtttcccaaactgcacacagaaacacacattatgaacatacaaaacatccgcaccctcctcgacaccgtcgccgttccgaatacggcacgcacgcttggcggcgaaaaggccgtccgttcggtcgaacagcgttcagacggcatccatatcgccctgcatttcggcttccccgtcgcgcacattgcctcagaaacagccgaccgcatacaagaaatcctgatgcccgaaacaggcgacacacacatccatctgtccatagacactgaaatcggcacacacaaagtccagcccggcgttaccaccatcaaaggcgtgaaaaacatcatcgccgtcgcatcgggaaaaggcggcgtgggcaaatcgacgacgacagccaaccttgccgccgcaatggcgcggatgggcgcgcgcgtcggcgtactcgatgccgacctttacggcccgagccaacccacgatgctgggtgtggacgaccgcaaacccgatcagaaaaaccaaaaactcattcccgtcgaatcttcagacggcatacaggtcatgtccatcggttttctggttgacaccgaccaagccgtcgtctggcgcgggccgatggtcagtcaggcattgcagcagctgatgttccaaagcgagtgggacgaagtggactatcttttcatcgacctgcccccgggtacgggcgacatccagctcacgctgtcccagcgcatccccgtcaccggttccgtcatcgtaaccacgccgcaggatatcgccctgatagacgcgcgcaaggcagtggatatgttccgcaaagtcaacattcccattttaggcgtattggaaaatatgtccgtccacatctgcaccaactgcggacacagcgaagccctgttcggcacggacggcggcaaagatttagccgcacgcctcaacgtccccctgctcggacagcttcccctaagcctgcccgtgcgcgaagccatggacggcggcacaccggcgcaactgttcgacgaacaccccgccatcgcccgaatctacaccgatgccgcattccaaatcgccctgggcattgccgacaaaggcaaagacttcagcagccggttccctaaaatcgtcgtcgaataa

SEQ ID NO: 36796 - DNA, 636 bp, Neisseria meningitidis
ttgtactgtctgcggcttcgtcgccttgtcctgatttttgttaatccactataccgtctgaaacaccttcagacggatatccgaacccgcaaaggaaaaaccatgtttccccccgacaaaacccttttcctctgtctcagcgcactgctcctcgcctcatgcggcacgacctccggcaaacaccgccaaccgaaacccaaacagacagtccggcaaatccaagccgtccgcatcagccacatcgaccgcacacaaggctcgcaggaactcatgctccacagcctcggactcatcggcacgccctacaaatggggcggcagcagcaccgcaaccggcttcgattgcagcggcatgattcaattcgtttacaaaaacgccctcaacgtcaagctgccgcgcaccgcccgcgacatggcggcggcaagccgcaaaatccccgacagccgccttaaggccggcgacctcgtattcttcaacaccggcggcacacaccgctactcacacgtcggactctatatcggcaacggcgaattcatccatgcccccagcagcggcaaaaccatcaaaaccgaaaaactctccacaccgttttacgccaaaaactacctcggcgcacatactttctttacagaatga

SEQ ID NO: 36797 - DNA, 1245 bp, Neisseria meningitidis
atgtccaacgaaaaccgtacctgttccttttgcggaaaatccaaatcacacgtcaaacatttaattgagggcgaaaacgcctttatctgtgacgaatgcgtctcaaactgtattgaaatattgcatgaagacggaaatgacggcacaccttcggaaagtgccggaggggagccggaagaatccggcaagctgcccacgcccgccgaaatcgtcgccaacctcaacgaccacgttatcggtcaggaacaagccaagaaagccttggcggtgtcggtgtacaaccattacaaacgcctgcgccacccgaaagccggagctaatgtcgaattgtcgaaatccaacatcctgcttatcggcccgaccggatcgggtaaaaccctgctggcgcaatctttggcgcgtaaactggatgtgccgttcgtgatggcggatgcaaccacgctgactgaagcaggttatgtcggcgaagatgtcgagcaaatcatcaccaaactgttgggcaaatgtgatttcgatgttgaaaaagcccagcgcggcatcgtctatatcgacgaaatcgataaaatttcacgcaaaggcgacaatccgtccatcacgcgcgacgtgtccggcgaaggtgtgcaacaagccttgctgaaactgattgaaggtacggtggcaagtgttccgccccaaggcggccgcaagcatccgaatcaggaatttatcaacgtcgataccaccaacatcctgtttatctgcggcggtgcgtttgcaggcttggaaaaagtcatccgccagcgcaccgagaaaggcggtatcggtttcggtgcgtccgttcacagcaaggacgaaaatgccgacattaccaagctgttcggcatcgtcgaaccggaagatttaatcaaattcggtctgattccggaattaatcggacgtttgcccgtgattgcaacactagaagaactggatgaggacgcgctgattaatattttgaccgagccgaaaaatgctttggtcaagcagtatcaagccttgttcggtatggaaaatgtcgagttggaatttgaagaaggcgcattgcgttccatcgcgcgtcaggcaatggagcgcaaaaccggcgcgcgcggcctgaggtccatcgtcgaacgctgcctgctcgatacgatgtaccgcctgcctgatttgcaaggcttgaaaaaagtggtggtcggtaaggcagtcatcgaagagggcagggaaccggaattggtgttcgagtcctga

SEQ ID NO: 36798 - DNA, 1002 bp, Neisseria meningitidis
atgaaacggaaaatttggctgctgccgctgctggcggtttcggcatacctgcaggcgcagacggaagtcaggctggcggtgcataagtcgttcagcctgcccaaagggttgattgcgcgcttcgagcgggcaaacgatgcgaaggtgtcgattattcaggcgggcggcgcgaacgaaatgctcaacaaactgattttgagccgcgccaacccgattgccgacgcggtgtatggtttggacaacgccaatatcggcaaggcgcgggaaatgggcattttggcggcggcgcaacccgaatccgcccccgtcgcggtcgggctgccttcggctttggcggtcgattacggctatgtgtccatcaattacgacaaaaaatggtttgaaggcaaaaagctgcccctgccgcaaaccctgcaggatttgacccgccccgaatataaaaacctattggtcgtgccgtcccccgccacgtcgtccccggggctgggcttcctgatggcgaacatcagcggtctgggcgaagaaggcgcgttcaaatggtgggcacagatgcggcagaacggcgtgaaggtcgccaaaggctggagcgaggcgtattacaccgacttttcgcacaacggcggcgcgtatccgctggtggtcggttatgccgccagtccggcggcggaagtgtatttttccaaaggcaaatacagcgagccgccgacgggcaacctgtttttaaaaggcggcgtattccgccaggtcgaaggcgcggcagtcttgaagggcgcgaaacagccgaagctggcggcaaaactggtgcaatggctgcaaagtcgggaagtgcagcaggcggttccgtccgaaatgtgggtttaccccgccgtcaaaaacacgcgcctgcccgacgtgttccgcttcgcccaagccccgacgcacaccaccgcccccgcgcagcgcgatattgatgcgaaccagcgcggatgggtttcccgttggattagaacggttttgaaataa

SEQ ID NO: 36799 - DNA, 2025 bp, Neisseria meningitidis
atgaacgacatgactttatatctcatcattgccctcgtgcctttggcaggctcgctgattgcgggtttgttcggcaacaaaattggtcgtgccggtgcgcatacggttacgatactcggcgtggctgtgtccgccgtgctgtcggcttatgtgctgtggggctttatcgacggcagccgcgccaagtttgacgagaatgtctatacctggctgacgatgggcggtttggatttctccgtcggcttcttggtcgatacgatgacggcgatgatgatggtcgtggtcaccggcgtatcgctgatggtgcatatctataccatcggttatatgcacgatgagaaagtcggctaccaacgcttcttcagctacatttctttgtttactttcagtatgttgatgctgattatgagcaacaacttcatccagctcttcttcggctgggaagctgtgggcttggtgtcgtatctcttgatcggtttctatttcaaacgtccgagcgcaacatttgccaacctgaaagcctttttgatcaaccgtgtcggcgacttcggctttttgctcggtatcggcttggtgcttgcttattttggcggcagcctgcgctatcaggacgtattcgcttatctgcccaacgtccaaaatgccaccatccagctcttccccggtgtggaatggtctttgattaccgtaacctgtttgctcttgtttgtgggtgcgatgggtaaatcggcacaattcccgctgcacgtctggctgcctgattcgatggaaggcccgaccccgatttccgcattgattcacgctgcgacgatggttacggcgggtctgtttatggtatcgcgtatgtcgccgatttacgaaatgagcagcactgcgctgtccgttatcatggtgatcggtgcgattaccgccctgtttatgggcttcttgggcgtgattcaaaacgacatcaaacgtgtggttgcgtattccaccctgtcgcaactgggctatatgaccgtggctttgggcgcgtctgcctattccgtggcgatgttccatgtgatgacccacgccttctttaaagccctgttgttcttggcggcaggcagcgcgattatcggtatgcaccacgaccaagacatgcgccatatgggcaatctgaaaaaatatatgccggttacttggctgaccatgctgatcggtaacttgtcgctgattggtacgccgttcttctccggcttctactccaaagattcgattatcgaagcggcgaaatacagcacactgccgggcagcggctttgcctattttgccgtcctcgccagcgtgtttgttaccgcgttttacgcgttccgccaatactttatggtgttccacggcgaagagaaatggcgcagcctgcccgaacaccattcagacggccacggcgaagaacatcacggtttgggtaaaaacgacaatccgcacgaaagcccgttggtggttaccctgcctttgattttgcttgccgttccgtccgtcatcatcggctacatcgccatcgaacccatgctttacggcgatttcttcaaagacgtgatttttgttaatgccgatgcgcatccgaccatgcacattatgaaagaagagttccacggcgcattggcgatggtgtcgcacagcctgcattcgcccgttctctatctcgctatcgcaggcgtattgagcgcatggcttttgtacgtcaaactgccgcacctgcctgcgaaaatcgcgcaggcgttccgtccggtttacgttttgtttgaaaacaaatactaccttgatgccctgtatttcaacgttttcgccaaaggcacacgcgcattgggtaccttcttctggaaagtcggcgataccgccattatcgacaacggtattgtcaacggctctgccagactggtcggcgcggttgccgcgcaagtgcgtaaagtccaaacaggctttatctacacctacgctgccgctatggtgttcggcgtattggtcttgctcggtatgaccttctggggattgttcagataa

SEQ ID NO: 36800 - DNA, 510 bp, Neisseria meningitidis
atgacaatgattttaagcattttaagcctgttttttatcatcagactgttatttttagccgtctctattaaacatgaaaaagccttgattgccaaaggggcgaaacaatacggaaaaaccaattccacagtgcttgcggcagttcatacgctttattatttggcgtgttttgtttgggtatggctttctgacactgcttttaatggcatatccttgattggtacgctgacggtgatggcttcatttgtgatattgtcattgattattaagcagttgggggagatttggacggttaaaatctatattttaccaaatcatcaaattaatcgttcgtggttgtttaaaacattccgccaccccaattattttttaaacatcatacccgaactgattggcatcgccttattatgtcaagcgtggtatgttttattgattggcctgcccatttatttgctggtcttatttaagcgtatccgacaagaagaacaggcgatggcaacacttttttaa

SEQ ID NO: 36801 - DNA, 504 bp, Neisseria meningitidis
atgcacgcgcttcatttttcggcttcggacaaggccgcgctttatcgggaggtgttgccgcagattgagtctgtggtggcggacgagacggattgggtggcgaatttggcgaacacggcggcggttttgaaggaggcgttcggttggttttgggtgggtttttatttggtcgatacgcgttcggacgaattggttttggcaccgtttcaggggcctttggcgtgtacgcggattccgttcggtcgcggggtgtgcggtcaggcttgggcgaagggcgggacggtggtcgtcggggatgtggacgcgcatcccgaccatattgcctgttcgtctttgtcgcgttcggagattgtcgtgccgctgttttcagacggccgctgtatcggcgtgttggacgcggacagcgaacatttggcgcagtttgatgagacagatgctttgtatttgggcgaactggcgaagattttggagaagcggtttgaggcttcgcgccaggcggcttga

SEQ ID NO: 36802 - DNA, 729 bp, Neisseria meningitidis
atgaccaaacagctgaaattaagcgcattattcgttgcattgctcgcttccggcactgctgttgcgggcgaggcgtccgttcagggttacaccgtaagcggccagtcgaacgaaatcgtacgcaacaactatggcgaatgctggaaaaacgcctactttgataaagcaagccaaggtcgcgtagaatgcggcgatgcggttgctgcccccgaacccgagccagaacccgaacccgcacccgcgcctgtcgtcgttgtggagcaggctccgcaatatgttgatgaaaccatttccctgtctgccaaaaccctgttcggtttcgataaggattcattgcgcgccgaagctcaagacaacctgaaagtattggcgcaacgcctgggtcaaaccaatatccaatctgtccgcgtcgaaggccataccgactttatgggttctgacaaatacaatcaggccctgtccgaacgccgcgcatacgtagtggcaaacaacctggtcagcaacggcgtacctgtttctagaatttctgctgttggcttgggcgaatctcaagcgcaaatgactcaagtttgtgaagccgaagttgccaaactgggtgcgaaagtctctaaagccaaaaaacgtgaggctctgattgcatgtatcgaacctgaccgccgtgtggatgtgaaaatccgcagcatcgtaacccgtcaggttgtgccggcacacaatcatcaccaacactaa

SEQ ID NO: 36803 - DNA, 198 bp, Neisseria meningitidis; identical to SEQ ID NO: 36305

SEQ ID NO: 36804 - DNA, 1686 bp, Neisseria meningitidis
atgtctatggaaaattttgctcagctgttggaagaaagctttaccctgcaagaaatgaacccgggtgaggtgattaccgctgaagtagtggcaatcgaccaaaacttcgttaccgtaaacgcaggtctgaaatcagaatccctgattgatgtagctgaattcaaaaacgctcaaggcgaaattgaagttaaagtcggcgacttcgttaccgttaccatcgaatccgtcgaaaacggcttcggcgaaaccaaactgtcccgcgaaaaagccaaacgcgctgccgattggattgccctggaagaagccatggaaaacggcaacatcctgtccggcatcatcaacggcaaagtcaaaggcggcctgaccgttatgattagcagcatccgcgcattcctgccgggttctttggtcgacgtacgtcctgtaaaagacacttctcacttcgaaggcaaagagatcgaattcaaagtgattaaactggacaaaaaacgcaacaacgttgttgtgtcccgccgcgccgtcctggaagctaccttgggtgaagaacgcaaagccctgctggaaaacctgcaagaaggctccgtcatcaaaggcatcgttaaaaacattaccgattacggtgcattcgttgacttgggcggcatcgatggtctgctgcacatcaccgacttggcatggcgccgtgtgaaacacccgagcgaagtcttggaagtcggtcaggaagttgaagccaaagtattgaaattcgaccaagaaaaacaacgcgtttccttgggtatgaaacaactgggcgaagatccttggagcggtctgacccgccgttatccgcaaggcacccgcctgttcggcaaagtatccaacctgaccgactacggcgcattcgtcgaaatcgaacaaggcatcgaaggtttggtacacgtctccgaaatggactggaccaacaaaaacgtacacccgagcaaagtcgtacaactgggcgacgaagtcgaagtcatgattttggaaatcgacgaaggccgccgccgtatctctttgggtatgaaacaatgccaagccaatccttgggaagaatttgccgccaaccacaacaaaggcgacaaaatctccggtgcggttaaatccattaccgatttcggcgtattcgtcggcctgcccggcggcatcgacggtctggttcacctgtccgacctgtcctggaccgaatccggcgaagaagccgtacgcaaatacaaaaaaggcgaagaagtcgaagccgtcgtattggcaatcgacgtggaaaaagaacgcatctccttgggtatcaaacaactggaaggcgatccgttcggcaacttcatcagcgtgaacgacaaaggttctttggttaaaggttccgtgaaatctgttgacgccaaaggtgctgttatcgccctgtctgacgaagtagaaggctacctgcctgcttccgaatttgcagccgaccgcgttgaagatttgaccaccaaactgaaagaaggcgacgaagttgaagccgtcatcgttaccgttgaccgcaaaaaccgcagcatcaaactttccgttaaagccaaagatgccaaagaaagccgcgaagcactgaactccgtcaatgccgccgccaatgcgaatgccggcaccaccagcttgggcgacctgctgaaagccaaactctccggcgaacaagaataa

SEQ ID NO: 36805 - DNA, 855 bp, Neisseria meningitidis
ttgggacaaaccatgtgtcaactgctgggcatgaactgcaatacgccgaccgatattatgttttcctttgaaggcttccgccgcaggggcggcattaccgaccaccatgccgacggtttcggcatcggctttttcgaaggcaaaggcgtgcgcctgttccatgacgacaaacccagtgccaattcgcccgtcgccgacctcgtgcgcgcctaccagattaaatcggaaaacgtcgtcgcccatatccgcaaagcatcacaaggacaaacctcgctggcgaacacccatccctttatgcgcgaaatgtggggcggctactggctgtttgcccacaacggacatttgattgattttttccccgaacagggcgaatttttccaccccgtcggcacaaccgattccgaacgcgcgttctgccacatcctcaaccgcctgcgcacccgctttgccgcccgtcccgacgacgacacgctgtttgacgcgattgcggggctgacgcacgaaatccgcaagttcgggctgtttaactttatgctttcagacggcattgccctgtttgcccacgccagcacactgctgcactacatcgtccgccaagccccgttcggcaaggcgcgcctgctcgacgacgacgtgatggtcgattttgccgaagtaaccacgccctccgaccgcgtcgccgttatcgccaccctgccgctgacccgcgatgaaacgtgggcgcaacttgccgtgaacgaactggtcatgttccgcgaaggcaacatcgtccgacacgaccgtcccgaaaaccccgtctatatgagtgccgaagaaggtctggaaatcgcccgcgccgccggcgtatcggtttga

SEQ ID NO: 36806 - DNA, 450 bp, Neisseria meningitidis
atgactgataatcgggggtttacgctggttgaattaatatcagtggtcttgatattgtctgtacttgctttaattgtttatccgagctatcgcaattatgttgagaaagcaaagataaatgcagtgcgggcagccttgttagaaaatgcacattttatggaaaagttttatctgcagaatgggaggtttaaacaaacatctaccaagtggccaagtttgccgattaaagaggcagaaggcttttgtatccgtttgaatggaatcgcgcgcggggctttagacagtaaattcatgttgaaggcggtagccatagataaagataaaaatccttttattattaagatgaatgaaaatctagtaacctttatttgcaagaagtccgccagttcgtgtagtgacgggctggattattttaaaggaaatgataaggactgcaagttacttaagtag

SEQ ID NO: 36807 - DNA, 1260 bp, Neisseria meningitidis
atgagtatgtccctcgcccaaaaactggccgccgacagcgttgccgcggttgccgaagggcgcaatcttcaggatgttttggcggaaatccgcgcggcgcatccgcagctgacggcgcaggaaaacggcgcgttgcaggacatcgcctacggctgccagcgttatttgggcagtttgaaacatatgctcgcgcagatgctgaaaaagccgattgacaacccgcagctcgaaagcctgcttttggcggcgttgtaccaactgcattacacgcgcaacgcgccgcacgccgtggtcaatgaggcggtggaaagcatcgcgaaaatcgggcgcgggcagtaccgttcgtttgccaacgcggttttgcgccgctttttgcgcgaacgcgacaagctcgcggcttcctgcaaaaaagatgatgtggcgaaacacaacctgccgctgtggtgggtggcttacttgaaaaaccattatccgaaacactggcacaacatcaccgccgcgctgcaatcgcatccgccgatgacgttgcgcgtcaaccgccggcacggcaatgccgaaagctatttggaaaaactggctgcggaaggtatcgccgcaaaggcgttggacgaatatgcggttacgttggaagaagccgtgccggtgaaccgcctgcccggtttttcagacggcattgtttcggtacaggacttcggcgcgcagcaggcggcgtatttgttaaacccgaaagacggcgaacggattttggacgcgtgcgccgcgccgggcggcaagacggggcatatcttggaactggcggattgccgcgttaccgccttggacattgatgcaggccgtctgaagcgtgtggaggacaatatcgcccgtttgggctttcagacggcatcggcggcgtgtgccgatgcgcgggatttggcggcgtggtatgatggaaagcctttcgacgcaatccttgccgacgtgccatgcaccgcttccggcgtggcgcggcgcaatcccgacgtgaaatggctgcgccgtccgaccgacgcgctcaaaaccgcccgccagcaggaagccctgctggacgcactttggcagacgctgaaacagggcggcagaatgctgcttgccacctgttccgtgttcgtcgaagaaaacgacgggcaattgcaaaaattcctcaaccgccatgccgatgccgaaccgatcgaatcgcgggtgcttttaccgaacaaacaccaagatggtttttattacgcgcttattcaaaagcattaa

SEQ ID NO: 36808 - DNA, 1296 bp, Neisseria meningitidis
atgttagatatccaattgctccgcagcaacaccgccgctgtggcggaacgcttggcggcgcgcggttacgagtttgatgccgcgcgtttcaatgcgctggaagaacaacgcaaagccgtccaagtgaaaaccgaagaactacaagcctcgcgtaacagcatttccaagcaaatcggcgcactgaaaggtcagggcaaacacgaagaggcgcaggcggccatggatcaagtcgcccaaatcaaaaccgatttggaacaggctgccgccgatttggatgccgttcaaaaagaattggacgcatggttgttgagcatacctaacctgccgcacgaaagcgtacctgccggtaaagacgaaaccgaaaacgtcgaagtccgcaaagtcggcaccccgcgcgaatttgactttgaaatcaaagaccatgtcgatttgggcgaacctttgggtttggattttgaaggcggtgcaaaactctccggcgcacgatttaccgtgatgcgcggacaaatcgcccgtctgcaccgcgccttggcacagttcatgctggatacgcacacgctgcaacacggctacaccgagcattacacgccttatatcgttgacgatacgacgctgcaaggtacgggccaactaccaaaatttgcggaagatctgttccacgttacccgtggcggcgacgaaaccaaaaccacccaatacctgattccgacagccgaagttaccctgaccaataccgttgccgacagcattatcccgtccgaacaactgccgctgaagctgaccgcgcattcgccctgtttccgcagcgaggcgggttcgtacggcaaagacacgcgcggtctgattcgccagcaccagttcgacaaagtggaaatggttcaaatcgttcatcccgaaaaatcatacgaaacgctggaagaaatggtcggccatgccgaaaacatcctgaaggctttggaactgccctaccgcgtgattaccctgtgtaccggcgacatgggcttcggcgcggcaaaaacgtatgacttggaagtttgggtgccggcgcaaaatacctaccgcgaaatctcaagctgctccaactgcgaagatttccaagcccgtcgcatgaaggcgcgtttcaaagacgaaaacggcaaaaaccgcttggtacatactttgaacggctccggtttggcagtcggcagaaccttggtcgccgtgttggaaaaccatcaaaacgccgacggcagcatcaacatccctgccgcactgcaaccgtatatgggcggcgttgccaagttggaagtgaaataa

SEQ ID NO: 36809 - DNA, 195 bp, Neisseria meningitidis
gtgaagcataagctcgcgtcttggtggaaaaccatcaagctgacggcaaacttgatggcaggtgtgcccgattatgaaaactacgttgcgcaacaacgcaaacataatcccaacgcccctgtgatgaccaagctgcagtttcaagactattgccgcaaacgccgctgcggcgcaaacggcggacgctgctgttaa

SEQ ID NO: 36810 - DNA, 1839 bp, Neisseria meningitidis
atgtgcggtatcgtcggcgccatccgcgcccatcacaacgtcgtcgattttctgaccgacggtctcaaacgcctcgaataccggggttatgactcatcaggcattgccgtcaacaccgacggcaaaatcaaacgcgtgcgccgtgtcggacgcgtgcagcttatggaggacgcggcacgtgaaaaaggcatcagcggcggcatcggcatcggacatacgcgttgggcgacacacggcggcgttactgagccgaacgcccacccgcacatcagcggcggtatgattgcggtcgtacacaacggcatcatcgaaaactttgaaagcgaacgcaaacgtttggaaggtttgggataccgttttgaatcgcaaacggataccgaagtcatcgcacacagcatcaatcacgaatacgcgcaaaacggcggcaggctgtttgaagcggtacaagaagcggtcaaacgtttccacggcgcatacgccatcgcggttattgcccaagacaagcctgatgaattagttgtggcgcgtatgggctgcccgcttttggtcgctttgggcgacgatgaaacctttatcgcttcggacgtatccgccgtcatcgcctttacgcgccgcgtggcgtacctcgaagacggcgacatcgcgctgctggcttcagacggcatcaaaaggctgaccgataaaaacggcctgcctgccgaacgcaaagtcaaggtatccgaactctcgctcgcctctttggaactgggaccgtacagccactttatgcaaaaggaaatccatgagcagccgcgcgcgattgcagacacggcggaggttttcctcgacggcggcttcatccccgaaaacttcggcaaaaacgcccaaagcgtgtttgaaagcatccgcagcgtcaaaatccttgcctgcggcacgtcctattacgccgcgctgaccgccaaatattggttggaatccatcgccaaaatcccggccgatgtcgaaatcgccagcgaataccgataccgcagcgtgattgccgatccggaccaactggtcattaccatttcccaatccggcgaaacgctggacacgatggaggcgttgaaatacgcaaaatccttgggacaccgccacagcctctccatctgcaacgtgatggaatccgccctgccgcgcgaaagcagcctcgtgctttatacccgtgccggtgcggaaatcggcgtcgcctcaaccaaagcatttaccacgcagctggttgcgctgttcggtttggcggtaacgctggcgaaggtacgcggtttggtttccggcgaagatgaagcacgttacaccgaagaactccgccagcttcccggcagcgtgcagcacgctttgaacctcgaaccgcaaattgccgcatgggcgcaacagtttgccaagaaaagcagcgcgctgtttttagggcgcggcatccattatccgattgccctcgaaggtgcgttgaagctgaaggaaatcacctacatccacgccgaagcctatcctgccggcgaactgaagcacgggccgcttgccttagtggacgaaaatatgcccgtcgtcgtcatcgcgcccaacgacagcctattggacaaagtcaaagccaatatgcaggaagtcggcgcgcgcggcggcgaacttttcgtctttgccgacctcgacagcaattttaatgccaccgaaggcgtgcacgttatccgtgcgccgcgccatgtcggcgaactgtcccccgtcgtgcataccatccccgtgcagctcctcgcctaccacaccgccctcgcgcgcggcacggatgtagacaagccgcgcaacctggcgaaatccgtaaccgtcgaataa

SEQ ID NO: 36811 - DNA, 1179 bp, Neisseria meningitidis
atggcaaaaatgatgaaatgggcggctgttgcggcggtcgcggcggcagcggtttggggcggatggtcttatctgaagcccgagccgcaggctgcttatattacggaaacggtcaggcgcggcgacatcagccggacggtttctgcaacaggggagatttcgccgtccaacctggtatcggtcggcgcgcaggcatcggggcagattaagaaactttatgtcaaactcgggcaacaggttaaaaagggcgatttgattgcggaaatcaattcgacctcgcagaccaatacgctcaatacggaaaaatccaaattggaaacgtatcaggcgaagctggtgtcggcacagattgcattgggcagcgcggagaagaaatataagcgtcaggcggcgttatggaaggaaaacgcgacttccaaagaggatttggaaagcgcgcaggatgcgtttgccgccgccaaagccaatgttgccgagctgaaggctttaatcagacagagcaaaatttccatcaataccgccgagtcggaattgggctacacgcgcattaccgcaacgatggacggcacggtggtggcgattctcgtggaagaggggcagactgtgaacgcggcgcagtctacgccgacgattgtccaattggcgaatctggatatgatgttgaacaaaatgcagattgccgagggcgatattaccaaggtgaaggcggggcaggatatttcgtttacgattttgtccgaaccggatacgccgattaaggcgaagctcgacagcgtcgaccccgggctgaccacgatgtcgtcgggcggttacaacagcagtacggatacggcttccaatgcggtctactattatgcccgttcgtttgtgccgaatccggacggcaaactcgccacggggatgacgacgcagaatacggttgaaatcgacggcgtgaaaaatgtgctgattattccgtcgctgaccgtgaaaaatcgcggcggcaaggcgtttgtgcgcgtgttgggtgcggacggcaaggcggcggaacgcgaaatccggaccggtatgagagacagtatgaataccgaagtaaaaagcgggttgaaagagggggacaaagtggtcatctccgaaataaccgccgccgagcaacaggaaagcggcgaacgcgccctaggcggcccgccgcgccgataa

SEQ ID NO: 36812 - DNA, 1968 bp, Neisseria meningitidis
gtggggaacacctttaaatcaatccttgtctgggtcgccttgggtatcggcctgatggctgcattcaacgctttagacggtaaaaaagaagacaacgggcaaatcgaatattctcagttcatccaacaggtcaacaacggcgaagtatccggcgtcaacatcgaaggatccgtcgtcagcggctacctgattaagggcgagcgcaccgacaaaagcaccttctttaccaacgcgcctttggacgacaacctgattaaaacactgctcgacaaaaacgtccgcgtaaaagtaacgccggaagaaaaaccgagcgcgctggctgccctgttttacagcctgctgcccgtcctgctgctgattggcgcgtggttctactttatgcgtatgcagacgggcggcggcggaaaaggcggcgcattctcattcggcaaaagccgcgcccgcctactggacaaagatgccaacaaagtgacctttgccgatgtcgccggctgcgacgaagccaaagaagaagtgcaggaaatcgtcgattacctcaaagcgccgaaccgctatcaaagcctgggcgggcgcgtgccgcgcggcatcctgctggcgggcagcccgggtacgggtaagacgcttttggcgaaagcgattgcaggcgaagccggcgtgccgttcttcagcatttcaggttccgactttgtcgaaatgttcgtcggtgtcggtgcgagccgcgtccgcgatatgttcgagcaggcgaagaaaaacgccccctgcatcatctttatcgacgagattgacgcagtcggccgccaacgcggcgcaggtttgggcggcggcaatgatgagcgcgagcaaacattaaaccaattgttggttgaaatggacggttttgagagcaatcagactgtaattgtgattgcggcaaccaaccgtcccgacgtactcgatcctgcgctgcaacgccccggccgtttcgaccgccaagtggttgtccccctgccggacatccgagggcgcgaacagattttgaacgtccattctaaaaaagtgcctttggacgaatctgtggatttattgtccctcgcgcgcggcacgccgggtttttccggcgcggatttggcgaacttggtcaacgaagccgccctgtttgccggccgccgcaataaagtcaaagtcgatcagagcgattttgaagacgccaaagacaaaatctatatgggtccggaacgccgcagtatggtgatgcacgaagacgaaaaacgtgcgacggcgtatcacgaatccggacacgcgattgttgccgaaagcctgccctttaccgaccccgtccacaaagtaaccattatgccgcgcggacgtgcgctgggtctgacttggcagcttccggagcgcgaccgcatcagtatgtataaagatcagatgttgagccagctctccatcctgttcggcggacggattgccgaagacatcttcgtcggacgcatctccaccggcgcatcaaacgactttgaacgcgcaacccaaatggcgcgcgaaatggtaacgcgctacggcatgagcgacaaaatgggcgtgatggtttatgcggaaaacgaaggcgaagtcttcttgggacgcagcgtaacccgttcgcaaaacatttccgagaaaacccagcaggacatcgacgcggaaatccgccggattttggacgagcaatatcaggttgcctacaaaatcctcgatgaaaaccgcgacaagatggaaacgatgtgcaaagccctgatggaatgggaaaccatcgaccgcgatcaggtactggaaatcatggcgggcaaacaacccagcccgcccaaagattacagccacaacctgcgcgagaatgcggacgcggcggaagataacgcgccgcacgctccgactcgggaagaaaccgaagcacctgccccggcagacaccgcttcgtcagagtccgagcagcggtctgaaaacaaggcttaa

SEQ ID NO: 36813 - DNA, 432 bp, Neisseria meningitidis
atggatatccaaaccatcctcgaaaaaaccctgcccggcctgggctacgaactggtcgattttgaactgaccgcgcaaggaacattgcgcgtgttcatcgacaaagaaggcggcattaccgtcgaagactgcgcaaccgtcagcaaccacttgagccgcgtcttcatggttgaagacatcgactacaaaaacctggaaatttccagccccggactcgatcgccccttgaaaaaagccgccgacttcgtgcgctttgccggtcagaatgccaaaatcaaaacccgcctgccgatagatggtcagaaaaactttatcggtaaaatcgaaggctgcgaaaacgataccgttaccatatccttcgacggcaaaaccgtgcaaatcgggttggacaacatcgacaaagcccgcctgcgccccgaattcaaattctaa

SEQ ID NO: 36814 - DNA, 372 bp, Neisseria meningitidis
atgttgtttgaagaaaatccgatagacggacagtttgcggaatatgaatgcggtgcgggcggaatccggctggcggggcaaagtttccataaacccgtgcttgtacataaggattcggtctgcctgtcgcaatgccgaaccttgtccgatctgactccggaaaacctgttgtccgacgtcaaacctgttgactatccggaaatattgattatcgggacgggcgcggctcaggagtttatccatcccaaaatcatggcggatttttcccgaatcggaatcagcgtggaatgcatgaataccgattcggcattcaggacattggttttcctgcactcggaagggcgcagggcttgggcttggcttcagccgtaa

SEQ ID NO: 36815 - DNA, 504 bp, Neisseria meningitidis
atgtcagaccctaatttgattgacccagaagttttcgccgccgaagggcagaacctgcaaggcagttttctgctggaagaattggatgaacgcgtcagttcgcacgattatcccgccgacaggcagaccaaaatatcgtttacactgaccggcggtcgcgaccggctgcaacgcctgttcctcgacctgaacgtcaaagccgatatgcccctgatttgccagagatgtatcaaacccatgccgttcatgcttgatgaaagcagccgtatcgtcctgttttccaacgaagagtccttggacgaatccatgcttgccgacgaagaactcgaaggcatactgattgaaaaagaactcgacgtgcgcacattggtagaagaccaaatcctgatgtcgctccccttctctccccggcacgaagactgcggcagcaacgggacaccggaaaaagccgatcgggacaaaccaaaccccttcgccgttttggcaggtttgaaaagcaattga

SEQ ID NO: 36816 - DNA, 444 bp, Neisseria meningitidis
atgtatttgacacaacatacggactacgggctgcgcgtccttatctacactgccatcaacgacgatgcgctggtcaacatcagtaccatcgccggaacttacggcatttccaaaagccatctgatgaaagtcgttaccgcgctggtcaaaggcggcttcctccacagcgtgcgcggaaaaggcggcggtctgcggcttgccgcaccgcccgaccgcatcaacatcggctcggtcgtccgccacctcgaaccgatgcagctggtcgagtgcatgggcgagaacaacgaatgcctgatcacaccgtcctgccgtctgacaggcatactcggcggcgcgatgaagtcgtttttcacgtatttggacggtttcacgctccaagacctgctcaacaagccgacctacgacctgctctacgaaccgagaattccgattgcggtgcagtaa

SEQ ID NO: 36817 - DNA, 747 bp, Neisseria meningitidis
atggaaaccccgaccaacaccccgcaacgctccctgcgtcaaaacagtatctacctgctgcccaactcctttactatcgccgcgctgttttccgcgttttacgcaatcacccaatccatgcacggacgttatgaaaccgccgctattgccgtattcatttccatgcttttggacggtatggacgggcgcgtggcgcggctgaccaacagccaaagcgcgttcggggaacagctcgacagccttgccgacatggtcagcttcggcgttgcccccgcgcttattgcctacaaatggcaactttggcagttcggcaaaatcggttattccgtcgccttcatctactgcgcctgcgccgccctgcgccttgcgctgttcaatacgctcatcggcaaggtggacaaacgctggtttatcggcgtgcccagtccgactgctgccgcgctgattgtcgggctgatttgggtcaaccacagcgtcgaaaaattccccgccgtccactggtgggcattgggcatcacactgtttgccggtctgtcgatgattgtccaaatccctttttggagttttaaagaaatcaacatccgcagacaagtcccctttgtcggaatgctgcttgccgtcttactgctgcttctggtcacttgggaaccgtcgctcgtcctcttcctgttctttctcggatacagcctgtccggctacattatggcggcacgccgattctggaaaaaatacagaaaggcggattaa

SEQ ID NO: 36818 - DNA, 582 bp, Neisseria meningitidis
atgaaaataagatggcggtacggaattgcgttcccattgatattggcggttgccttgggcggtctgtcggcatggttgggacgcatcagcgaagtcgagattgaagaagtcaggctcaatcccgacgaaccgcaatacacaatggacggcttggatggcaggcggtttgacgaacagggatacttaaaagaacatttgagcgcgaaaggcgcgaaacagtttcccgaaagcagcgacattcatttcgattcaccgcatctcgtgttcttccaagaaggcaggttgttgtacgaagtcggcagcgatgaagccgtttaccataccgaaaacaaacaggttctttttaaaaacaacgttgtgctgaccaaaaccgccgacggcaaacggcaggcgggtaaagttgaagccgaaaagctgcacgtcgataccgaatctcaatatgcccaaaccgatacgcctgtcagtttccaatatggtgcatcgcacggtcaggcgggcggcatgacttacgaccacaaaacaggcatgttgaacttctcatctaaagtgaaagccacgatttatgatacaaaagatatgtaa

SEQ ID NO: 36819 - DNA, 825 bp, Neisseria meningitidis
atgaccaccaccgaagtggacaactggcctgccgatgccgacggcgtgcaagggccggaattgatggcgcggtttctcgcccacgccgaacgtttcggaacggaaatcatttttgaccaaatcaacgccgtcgatctgcaaaaacgcccgtttacactcaaaggcgatatgggcgagtacacttgcgatgccctgattgtcgcaacaggcgcgtccgccaaatacctcggtttgccgagtgaggaagcgtttgccggaaaaggcgtttccgcttgtgccacctgcgacggtttcttctacaaaaaccaagatgttgccgtagtcggcggcggcaatacggcagttgaagaggcactctaccttgccaatatcgccaaaaccgttaccctgatccaccgccgcagcgagttccgtgccgaaaaaatcatgatcgacaaactgatgaaacgcgtggaagagggcaaaatcatcctcaagctggaaagcaacctgcaagaagtactgggcgacgatcggggcgtaaacggcgcattattaaaaaacaacgacggttctgagcaacaaattgccgtcagcggcatttttatcgccatcgggcacaagccgaataccgatattttcaaaggtcagttggaaatggacgaagccggttacctgaaaaccaaaggcggcacggcggacaatgtcggcgcaaccaatatcgaaggcgtatgggcggcgggcgacgtaaaagaccatacctaccgtcaggcgattaccagcgcggcttccggctgtcaggcggctttggacgcggaacgctggctgggcagccaaaacatttga

SEQ ID NO: 36820 - DNA, 180 bp, Neisseria meningitidis
atggccgttcaacaaaacaaaaaatccccttccaaacgcggtatgcaccgttcgcacgacgcgctgaccgcgcccgcactgtctgtcgacagcacaaccggcgaagtacaccgcccgcaccacatttcccccaacggtatgtaccgcggccgcaaagtggtcaaagccaaaggcgaataa

SEQ ID NO: 36821 - DNA, 474 bp, Neisseria meningitidis
atgaaaggcgaccgtttagttatccgcgagctgaacaaaaacttaggcttactgctgataaccatcaaccaatatttccttcacgcccgtattttgaaaaactggggctttaaagaactgggcgaacatttcttcaaacagtccatcgttgaaatgaaagctgcagacgatttgatcgagcgcattctgttcctcgaaggcctgccgaacctgcaagaactgggcaaactgttgattggtgaatctaccgaagaaatcattgcctgcgatttgaccaaagaacaggaaaaacacgaagccctgcttgctgccatcgctacagcagaagcgcaacaggattacgtcagccgtgatttgttggaaaaacaaaaagacaccaacgaagaacacatcgactggcttgaaacccagcaggaactgatcggcaaaattggtttgccgaactacctgcaaacagcggcgcaagaggactaa

SEQ ID NO: 36822 - DNA, 2073 bp, Neisseria meningitidis
gtgcgacactcgactgcctcgaaaacggcgcagactgatttcagacagcatcaaaacatgatgaaactcaatccccaacagctcgaagccgtccgctacctcggcggcccactgctcgtccttgccggtgcaggcagcggcaaaaccggcgtgattactcaaaaaatcaagtatttgattgtcaatgtcggctatctgccgcataccgttgccgcgattacctttaccaataaagccgccgcggaaatgcaggagcgcgtcgccaaaatgctgcacaaatcgcaaacgcgcgggctgacgatttgcacgttccactctttgggcatgaagattctgcgcgaagaggcgaaccatatcggttacaaaaaaaacttctccattctcgattctaccgacagcgcgaaaatcatcggcgaactcttaggcggtacgggcaaagaagccgtattcaaggcgcagcaccagatttccttgtggaaaaacgatttaaaaacgcctgaagatgtcgttcagacggcctctaatgcgtgggaacaacaaaccgcacgcgtgtatgcgagctatcaggaaaccttacaaagctatcaggcagtggacttcgacgacttgatccgcctgcctgccgtgctgttgcagcaaaacagcgaagtgcgcaacaaatggcagcggcggctgcgttatctgctggttgacgaatgccaagatacgaatacctgccaatttacgttgatgaaacttctgaccggcgcggaaggtatgtttaccgccgtcggcgacgacgaccagtccatctacgcatggcgcggcgcgaacatggaaaacctgcgcaaaatgcaggaaaactatccgcagatgaaggtcatcaaactggagcaaaactaccgctccaccgcgcggattctcaaaatcgccaacaaagtcatcgagaacaaccccaagctgttcaccaaaaaactttggtcgaaattgggcgaaggcgagcccgtcaaagtcgttgcctgccaaaacgagcagcacgaagccgactgggtcgtcagccaaatcgtcaaacaaaaactcatcggcggcgacaaaacccaatatgccgatttcgccgtgttgtaccgcggaaagcatcaggcgaggattttcgaggaagcattgcgcggcgcgcgcatcccctaccgtctctccggcggacaaagctttttcgacaaagccgaaatcaaagacgtgttgtcttatgtgcggctgcttgccaaccccaatgacgatcccgcctttctgcgtgccgttaccacgcccaaacgcggcatcggcgatgtcacgctgggcaagctcaacacttacgcgcacgaacacgaatgcagcctgtatgaagccgcacaaaacgaagaagcccttgccacgctgaacaataccaaccgccaacacctgcaagcctttatggatatgttcggcagctaccgcgccaaagcggaaaccggcgaagcaggcgagttcatcaacagcctgctcgaagaaatcgactatgaaaaccatttgatgcaaaacgaagaaggcaaggccggcgaaatcaaatggcgcaatgtcagcgatttggtatcatggtttgcgcgaaaaggcggggaagacggcaaaaacatcatcgaactcgcccaaaccgtcgccttgatgacgcttttggaaggaaaagacgaagaagaaaccgatgccgtctcgctatccacgctacacgccgccaaaggtttggagtatccgtatgttttccttgtcggttgcgaagaaggcgttttgccgcacaacgacagtatcgaagagggcaacgtcgaagaagaacgccgcctgatgtacgtcggcatcacccgcgccaaacgccaactcacgctgacccactgcgtcaaacgcaaaaaacaaggcacatggcagttccccgaacccagccgattcatagacgaaatgccgcaggaagatttgaaaatcctggggcgcaaaggcggcgagccgattgtcagcaaggaagaaggcagacgcaaccttgccgatataatcggaaggctcgacaacctaaaaaaaagcggcgcggcggattaa

SEQ ID NO: 36823 - DNA, 138 bp, Neisseria meningitidis
atgaagattagcgcactcgaccatctggtactgaccgttgccgacattgaccgaaccattgcgttttacacgcaagttttgggtatggaagaagtttcatttggcaacaaccgtaaggcttgtattttagaagactaa

SEQ ID NO: 36824 - DNA, 1515 bp, Neisseria meningitidis
atgactacctccaaatgccccgtaacccatctgaccatgaacaacggcgcgcctgttgccgacaatcaaaacagcctgaccgccggtccgcgcggccccctgctggcgcaggatttgtggctgaatgaaaaactcgccgacttcgtgcgcgaagtcattcccgaacgccgtatgcacgccaaaggttcgggcgcgttcggtacgtttaccgtaacacacgacatcaccaaatacacccgcgccaaaatcttcagcgaagtcggcaaaaaaactgaaatgttcgcccgtttcaccaccgtggcaggcgaacgcggcgcagccgatgcagaacgcgacatccgcggttttgcattgaaattttataccgaagaaggcaactgggatgtggtcggcaacaacacgcccgtgttcttcctgcgcgacccgcgtaagttccccgacctgaataaagccgtcaaacgcgatccgcgcaccaatatgcgctctgccacaaacaactgggacttctggacgctgctgcccgaagccctgcaccaagttaccatcgtgatgagcgaccgcggcatcccagccggctaccgccatatgcacggcttcggttcgcatacctacagcttctggaacgaagcaggcgagcgtttttgggtgaaattccatttccgcacccaacaaggcattaaaaacctgaccaacgaagaagccgccaaaatcatcgccgacgaccgcgaaagccatcagcgcgacctgtacgaagccatcgaacgcggcgagtttccgaaatggacgatgtacatccaagtcatgcctgaagcagacgcggaaaaagtaccttatcatccgtttgacttgaccaaagtttggccgaaaaaagactatccgctgattgaagtgggcgaattcgagttgaaccgcaatcccgaaaacttcttcgccgatgtggaacaatccgccttcgcaccgagcaacctcgttcccggtgtcggcgccagcccagataaaatgttgcaggcgcgtttgttcaattacgccgacgcgcaacgctaccgcttgggcgtgaacttccgccaaatccctgtcaaccgtccgcgttgccctgttcacagcaaccagcgcgacggacaaggcagagccgacggcaactacggcagcctgccgcactacgaacccaacagcttcggacaatggcagcagcagcccgacttcgccgaaccgcctttgaaaatcaacggcgacgcggcacactgggactaccgccaagatgatgacgactacttcagccaaccgcgcgccctgttcaacctgatgaacgacgcgcagaaacaggcattgttcggcaacaccgccgccgcaatgggcgacgcgcccgacttcatcaaataccgccatatccgcaactgctaccgttgcgatccggcatacggtgaaggcgtggcaaaagccctcggactgactgtcgaagacgcacaagccgcccgcgcgaccgaccccgcactcggccagcccggtttgctgtaa

SEQ ID NO: 36825 - DNA, 1371 bp, Neisseria meningitidis
atgccgcaaaacactttaaacatcgttatcctcgccgccggcaaaggcacgcgcatgtattccaaaatgcccaaagtgctgcaccgcatcggcggcaagcccatgctcgggcgcgttatcgacaccgccgccgcgctgaatccgcaaaacatctgcgtcgtcgtcggccacggcaaagagcaagttttagacaccgtcaaacgcgatgtcgtttgggtcgaacaaaccgaacagctcggcaccggccacgccgtcaaaaccgccctgccccaccttgccgccgaaggccgcacgctggtgctgtacggcgacgttcctttaattgacgttgaaaccctcaaaaccctgctcgaagccgcaggcgacaaagtcgggctgttgactgatgttcccaccgacccgacaggcttggggcgcatcatccgcgacggcaacggcagcgtaaccgccattgtcgaagaaaaagacgcaagtaccgcccaaaaagccgtgaaagaaaccaacacaggcattctcgtcctgcccaacgccaaactggaaaactggctgaacagcctttccagcaacaatgcccaaggcgaatactatctgaccgacctcatcgccaaagccgtttcagacggcatcaaagtccgccccgtccgagtgcgcgcctctcacctcgccgccggcgtgaacaacaaactccagctcgccgaactcgaacgcatcttccaaaccggacaggcgcaagaattgctcaaagcaggcgttaccctgcacgacccggcacgtttcgatttgcggggccgtctgaaacacgggcaagatgtcgtgattgatgcaaactgtatctttgaaggcgaaatcgagctcggcgacaacgtcgaaatcggcgcaagctgcgtcatcaaaaacgccaaaatcggtgccaacaccaaaatcgcccccttctcccacctcgaagactgcgaagtcggcgaaaacaaccgaatcggcccgtacgcccgcctgcgtccgcaagcccgccttgcagacgacgtacacgtcggcaacttcgtcgaaatcaaaaacgccgccatcggcaaaggcaccaaagccaaccacctcacctacattggtgatgccgaagtcggcagcaaaaccaacttcggcgcaggtacgattattgccaactacgacggcgtgcacaaacacaaaaccgtcatcggcaacgaagtgcgcatcggttcaaactgcgtactggttgcccccgttaccctcggcaacaaagtaaccacaggcgcaggcagcgcgattacccgcaacgtcgaagacggcaaactcgccctcgcccgcgcccgccaaaccgtcatcgaaggctgggtgaggccggaaaaagacaaacaataa

SEQ ID NO: 36826 - DNA, 882 bp, Neisseria meningitidis
atgccgtctgaaaacaccctctttcccctgcccgacaccctattgcgccccatggtggaacaagccttgagcgaagatttgggcaggcgcggcgatattacgtccgccgccgtcatcgcgcccgataaaaccgccaaactcttcctcgtcagccgcgaagacggcgttatcgccggcatggacttggcgcgcctcgcctttcagacgatggatccgtccgtccgcttccaagccgaaatccgagacgggcaaatcgtccgcgcaggtcagacgctggccgccgtcgaaggcaacgcccgcgcgctgctcgccgccgaacgcaccgcgctcaactacctcacgcacttaagcggcatcgccaccgccaccgcgcgtgccgttgccgaagttgccgaatacggtacagacatcgtgtgcagccgcaaaaccctccccctgctgcgtgtcctgcaaaaatacgccgtcagggcgggcggcggcgtgaaccaccgcatgggtttggacgatgccgtactcatcaaagacaaccacctcgcctattgcggcagcatcgcccaagccgttcggcaggcaaaacaggcggtcggagcattgacctgcgtggaaatcgaagtggacacgttggcacaactggacgaagccatcgcagcgggcgcggaacggattttgctggacaacatggacgacgaaaccctgaaagaagcggcaaaccgctgccacacgcaaaccgcccacccccacaccgtctattgcgaagcatcgggcggcatcggcttcgaccgcctgaagcgcgtggcgcaaaccggcgtggacggcatcgccctcggctatctgacccacagcagccgctcgttggacataggtttggatttcttggcatga

SEQ ID NO: 36827 - DNA, 1572 bp, Neisseria meningitidis
atgctgatgttggaacgcacaaaatcccccgaagtcgccgaacgcgccttggaaatggccgtgtcgctgaacgcgtttgaacaggcggaaatgatttatcagaaatggcggcagattgagcctataccgggtgaggcgcaaaaacgggcggggtggctgcggaacgtgctgagggaaagaggaaatcagcatctggacggactggaagaagtgctggctcaggcggacgaaggacagaaccgcagggtgtttttattgttggcacaagccgccgtgcaacaggacgggttggcgcaaaaagcatcgaaagcggttcgccgcgcggcgttgaaatatgaacatctgcccgaagcggcggttgccgatgtggtgttcagcgtacagggacgcgaaaaggaaaaggcaatcggagctttgcagcgtttggcgaagctcgatacggaaatattgccccccactttaatgacgttgcgtctgactgcacgcaaatatcccgaaatactcgacggctttttcgagcagacagacacccaaaacctttcggccgtctggcaggaaatggaaattatgaatctggtttccctgcacaggttggatgatgcctatgcgcgtttgaacgtgctgttggaacgcaatccgaatgcagacctgtatattcaggcagcgatattggcggcaaaccgaaaagaaggtgcttccgttatcgacggctacgccgaaaaggcatacggcagggggacgggggaacagcggggcagggcggcaatgacggcggcgatgatatatgccgacagaagggattacaccaaagtcaggcagtggctgaaaaaagtgtccgcgccggaatacctgttcgacaaaggtgtgctggcggctgcggcggctgtcgagttggacggcggcagggcggctttgcggcagatcggcagggtgcggaaacttcccgaacagcaggggcggtattttacggcagacaatttgtccaaaatacagatgctcgccctgtcgaagctgcccgacaaacgggaggctttgagggggttggacaagattatcgaaaaaccgcctgtcggcagcaatacagagttacaggcagaggcattggtacagcggtcagttgtttacgaccggcttggcaagcggaaaaaaatgatttcagatcttgaaagggcgttcaggcttgcacccgataacgctcagattatgaataatctgggctacagcctgctttccgattccaaacgtttggacgaaggcttcgccctgcttcagacggcataccaaatcaacccggacgataccgctgtcaacgacagcataggctgggcgtattacctgaaaggcgacgcggaaagcgcgctgccgtatctgcggtattcgtttgaaaacgaccccgagcccgaagttgccgcccatttgggcgaagtgttgtgggcattgggcgaacgctatcaggcggttgacgtatggacgcaggcggcacaccttacgggagacaagaaaatatggcgggaaacgctcaaacgtcacggcatcgcattgctccaaccttcccgcaaaccccggaaataa

SEQ ID NO: 36828 - DNA, 2151 bp, Neisseria meningitidis
ttgggtagcgattgggtttcagacggcatacattcaggatttcaccgccttatgccgtctgaaagacgtttccgacccatccctactacacgctttgtccgcaaacgcatcacaggcaagattatggaagtcattcgataccccgattcccccttcaaactccaccaacccttccagcccgcaggcgaccagcctaccgctattgccgacttgctcgaagggctttcagacggccttgcctaccaaaccctgctcggcgtaaccggttcgggcaaaacctacaccatggcgaacgtcatcgcccaaagcggccgacccgccatcatcatggcgcacaacaaaacccttgccgcccagctttatgccgaaatgcgcgagtttttccctgaaaacgcggtggaatatttcgtctcctactacgactattaccaacccgaagcctatgtgccaagccgcgatttgttcatcgaaaaagacagtgcgatcaacgaacacatcgagcagatgcgcctttccgccaccaaaaacctaatgacgcgcaacgacgtgattatcgtcgccaccgtgtccgccatttacggtatcggcgacccgaccgagtatcaacaaatggtgttgtccgtcaaagaaggcgataccatcgagcagcgcgacatcatcgccacgctcgtttccatgcaatacgaacgcggcgatttggacttcaaacgcggcagcttccgcgtgcgcggcgacgtgattgacgtgtaccccgccgaaagctccgaaaacgccttacgcatcagcctgtttgatgacgaaatcgaccgcctcgatatgttcgacccgctttcaggcagccttatccagcgcgtcggccgctacaccgtcttcccgtccagccactacgttaccccgcgcgacaccgtcttgcgcgcctgcgagtccatcaaagaagaattacgcgaacgcatcgaatttttcgcccgcgaacaacgccccgtcgaacaacaacgcatcgaacagcgcacccgtttcgacctcgaaatgctctacgaaatgggcttctgcaaaggaatcgaaaactactcccgccacttttccggcaaaaaagaaggcgaaccgccgcctacgctgatggactacctgcccgacaacgccatcatgttcatcgacgaaagccacgttaccgtaacccaaatcggcggcatgtacaaaggcgacgcatcgcgcaagcaaaacctcgtcgactacggcttccgcctgccttcagcccgcgacaaccgcccgctcaaattccacgaatttgaaaaagtcatgccgcaaaccatcttcgtttccgctacccccgccaaatacgaagaagaacacgccggacaagtggtcgaacaagtcgtccgtcccacagggctggtcgacccccaaatcatcatccgccccgtcgccacccaagttgatgacttaatgagcgaaatcaacgaccgcatccaaaaaggcgaacgcatcctcgttaccaccctcaccaaacgtatggcggagcaactcaccgactattacagtgaactcggcatcaaagtgcgctacctgcacagcgacatcgataccgtcgagcgcgttgaaatcattagagatttgcggctcggcctgtttgacgtactcgtcggcatcaacctcttgcgcgaaggcctcgacatccccgaagtctcccttgttgccatcctcgacgccgacaaagaaggcttcctgcgctcccaccgcagcctgattcaaaccataggccgcgccgcgcgcaacgtgaacggcgtcgcgattctgtacgccgacaaaatcaccgactctatgaaagccgccatcgacgaaaccgaacgccgccgtgaaaaacaaattaaattcaacgaagaacacggcatcgtgccgcaacagattaaaaaacaggtcaaagacatcattgacggcgtgtaccacgaagaagacagcggcaaaggccgtagacaaggcaaaaacaaagttaaagtcggcgaaattcacaacgaagaagacgcgattaaagaaatcgccaaattggaaaaagccatgcaacaggcagctagggatttgcagtttgaagaagcgtcggtgttaagggataggattcgggggattagggaagggttgttatttgggagtgagtaa

SEQ ID NO: 36829 - DNA, 1623 bp, Neisseria meningitidis
atggaaacaataccggcagcgcaaaacaaagccgtaagcccgtctttttcagacggcatctccggtcagactgtcaacaattccgataaaatgctatactcgcgcccgttgccgcgccgtccgaaaccgccctttgggaaagcagaaatgatcagcaaacaagaataccaagcccaagccgcccaaggctacaaccgcatcccgctcgtgcaagaactccttgccgatttggatacgccgctttccctctatctcaaactcgccaaccgcccctatacctacctgctcgaatccgttgtcggtggcgaacgtttcggccgctattcttttatcggcctgccttgcagccactatctcaaagccagcggcaaacacgtcgatgtttatcaaaacggcgaaattgtcgagcaacacgacggcaaccccctgccctttatcgaagccttccacaaccgcttcaaaacacccgaaatcccaagcctgccgcgctttaccggcggactggtcggctacttcggttacgaaaccatctacaattttgaacacttcgcccaccgcctgaaaaacaccaccaaagccgacccgctcggcacgcccgacatcttgctgatgctgtcgcaagaattggcggtgatcgacaatttgagcggcaaaatccatctcgtcgtttacgccgatccgtcgcagcccgacggctacgaacgcgcccgcgaacgcctcgaagacatccgcacccagttgcgccaaagctgcgccatcccgctctcgctcggcagcaaacacaccgaagccgtcagcgaatttggcgaagagccgttcaaagcctgcgtcgataaaatcaaagactacatctttgcaggcgactgcatgcaggttgtccccagccagcgcatgagcatggaattcaccgacagcccgctcgccctctaccgcgccttgcgcacgctcaatccttcgccttacctcttttactacgatttcggcgatttccacatcgtcggctcctcgcctgaaatcctcgtccgccgcgaacgcgacgatgtcatcgtccgccccatcgccggcacgcgcctgcgcggcaaaacccccgccgaagaccttgccaatgaacaagacttattaagcgacgccaaagaaatcgcagaacacgtcatgcttatcgatttaggacgcaacgatgtcggccgcatcagcaaaacgggcgaagtcaaagtaaccgacaaaatggtgattgaaaaatactcccatgtgatgcacatcgtttccaacgtcgaaggccgtctgaaagacggcatcactaacatgaacatcctcgccgccaccttccccgccggcacactttcaggtgcacccaaaatccgcgctatggaaatcatcgaagaagtcgaaccgagcaaacgcggcatctacggcggcgccgtcggcgtatggggcttcaacaacgacatggatttggcaatcgccatccgcaccgccgtagtaaaaaacaacacgctatacgtccaaagcggcgcgggcgtggttgccgactccgatccggcctccgaatggcaggaaacacaaaacaaagcccgagccgttatacgcgccgcgcagatggtgcaggaagggttggataaatga

SEQ ID NO: 36830 - DNA, 435 bp, Neisseria meningitidis
atggcatttggttcgatgaattccggcgacgattctccgatgtccgacatcaacgttacgccgttggtggacgtgatgctggtgttgctgattgtgtttatgattactatgccggtgctgacgcattccatccctttggaactgccgaccgcgtccgagcagacaaacaagcaggacaaacagcctaaagaccccctgcgcctgacgattgatgcgaacggcggctattatgtcggcggggattctgcaagcaaagtggaaatcgaggaagtggaaagccgtctgaaagccgccaaggagcagaatgaaaacgtgattgtggcgattgcggcagacaaggcggtggaatacgattatgtaaacaaagctttagaagccgcccgtcaggcaggaatcaccaaaatcggttttgtaaccgaaaccaaggcgcaataa

SEQ ID NO: 36831 - DNA, 588 bp, Neisseria meningitidis
atgcgggctgtcgggcattgttggaaaagatttccaaataaagcaattgaatacaaatataaaaccgcctcctgccgtatcggttgttcagacggcataaacagagaatttatgaaaacaaatttcaaacagaaaattatcgaacaggcacgcagcgaaggcttgcaggtaaccgctttgcgcgagcaggtattagatattgtcttgcagcaaagcggcgtgattaaagcctacaacgtcttgtcgcagatgcagcagcaaagcgagggcgtgcttgcaccgcctaccgcctaccgcgcccttgatttttgggcggagcagggcgttttgcacaaagtggcggcggtcaacggctatattttgtgcagccacgcgcagcacgagtgcgacgaccattgccacgaccacgaagaagccgaagcgcaccacagcgcgtttattttggtctgcaccgaatgcggcacggcggacgagcaaaccctcagccacgagtgggcggcactgcgcgcaggcgttgccgaaagcggctttgcgctgaaagaagaacacgttgttttaactgggatttgtaaaaaatgtcagaaatga

SEQ ID NO: 36832 - DNA, 1548 bp, Neisseria meningitidis
atgcagcttaatcctgctgaaattagcgatttgattaaagccaagatcgaaaatctgtctgtaaatgccgaagtgcgtactcgtggtacggtgatttcggtaactgacggtatcgttcgcatccatggtttgtcagatgcaatgcaaggtgagatgctcgaattcccgggtaacactttcggcttggcgatgaacctggagcgcgactccgtcggcgccgtagtgttgggcgagtacgaacatattaaagaaggcgacacggttacctgtaccggtcgtatcttggaagtgccggtcggacgcgaactggtcggacgcgtcgttgatgcattgggtcggcctatcgacggcaaaggcccgattaatacaactttgaccgcccctatcgaaaaaatcgcaccgggcgtgattgcgcgcaaatcggttgaccagccgatgcaaaccggtctgaaggcgattgactctatggttcctgtcggtcgcggtcagcgtgagttgattattggcgaccgtcaaaccggtaaaacggccgtagcattggatgccatcgtcaaccaaaaaggtacgggtgttatctgtatctatgtcgctatcggtcaaaaagcatcttctattgccaacgtggtccgcaaattggaagagcatggcgcgatggagcataccatcgtggttgctgcaactgcatctgaagcggcggcattgcaatatatcgcaccttactccggttgtacgatgggtgaattcttccgcgatcgtggcgaagatgccttgattgtttatgacgatttgtccaaacaggctgtggcttaccgtcaaatttccctgcttttgcgccgtccgcccggccgcgaagcctatcccggcgatgtgttctacctgcactcccgtctgttggaacgtgcagcacgtgtcaatgaacacgaagtggagaaattgaccaacggcgaagtaaaaggcaaaaccggttctctgaccgcgttgccgattatcgaaacccaagcgggcgacgtatctgctttcgttccgactaacgtcatttcgattaccgacggtcagattttcttggaaaccgacctcttcaacgccggtatccgtcctgcaatcaatgccggtatttccgtatcccgcgtaggcggtgctgcacaaaccaaagtgattaaaaagctgggtggcggtatccgtttggcgttggcgcaatatcgtgaattggcggcgttctcgcaatttgcatccgatttggatgaagctacgcgcaaacaattggagcatggcgaagtcgtaaccgaactgatgaaacagaaacagttcagtacgttgaatacggctgaaatggctttgaccctttgggcaatcaacaacggttcgtattctgatgttccggttgccaaagctctggcttttgaatctgaatttttgagctttgtccgtacccaacatccggaagttttggaagccgtcaatgcttcaggtgcaatgtccgacgagagcgagaaaacgcttgaagcagccatgaaatccttcaaatcttcttacgcctatcaggcataa

SEQ ID NO: 36833 - DNA, 2262 bp, Neisseria meningitidis
atgttacaaatcgaaatcgacggcaaacaggtatctgtggagcagggtgcgacggtgattgaagccgcgcacaagctcggtacttatatcccgcatttctgttaccacaaaaaactttccatcgccgccaactgccgtatgtgtttggtggacgtggaaaaagctcccaaacctctgcccgcctgtgccacgccggtaacggacggcatgattgtgcgtacgcattcggcaaaagcccgagaggcgcaagaaggtgtgatggagttcctgctcatcaaccatccgcttgattgtccgacctgcgaccaaggcggcgaatgccagttgcaggatttggcggtgggctacggtaaaaccaccagccgctacaccgaagaaaaacgttccgtcgtcggcaaagacatggggcctttggtttccgccgaggaaatgagccgctgcatccactgtacccgttgcgtccgtttcactgaagaaatcgccggcttgcaggaaattgcgatggtgaatcgcggcgagcattctgagattatgccctttatcggcaaagcggtggaaaccgaattgtcgggcaacgtcatcgatttgtgtcccgtcggcgcgctgaccagcaaaccgttccgcttcaacgcgcgtacttgggaattgaatcgccgcaaatccgtttccgctcatgacgctttgggcagtaacctgattgtacaaaccaaagaccataccgtccgccgcgtgttgccgctggaaaacgaagcgattaacgaatgctggctgtccgaccgcgaccgttttgcctacgaaggcctgtatcacgaaagccgtctgaaaaacccgaaaatcaaacagggcggcgagtggatggacgtggattggaaaaccgcattggaatatgtccgcagcgcgattgaatgtatcgccaaagacggcaaccaaaaccaagtcggcatttgggcgaacccgatgaatacggttgaagagctgtatctggccaaaaaacttgccgacggcttgggtgttaaaaactttgcaacccgtttgcgtcaacaagacaaacgtctttcagacggcattaagggtgcgcaatggttgggacaaagcattgaatctttggctgacaacgatgccgtattggtagtcggcgcgaacttgcgcaaagaacagccgctcctgaccgcccgcctgcgccgcgccgccaaagaccgtatggcattgagcgtattggccggcagcaaggaagaattgtttatgccgcttctctctcaggaagccgcacatcccgacgagtgggcaggccgtctgaaaaacttgtctgccaatgcggaacacgccgttaccgccagcctgaaaaacgctgaaaaagcagcggtgattttgggcgcggaagtgcaaaaccatcctgattacgccgcgatttatgccgccgttcaagagctggcagatgcgaccggcgcagtgctgggtattttgccgcaagccgccaacagcgttggtgcggatgtcttgggcgtgaactcgggcgagagcgttgccgaaatggcaaacgcgccgaaacaggcagtcttgctgctcaacgtcgagcctgaaatcgatacggttgacggtgcaaaagccgtggctgcgttgaaacaagcgaaaagcgtgatggcgtttacgccgtttgtcagcgaaacgctgctggacgtgtgcgacgtattgttgccgattgcgccgtttaccgaaacctcgggcagcttcatcaatatggaaggccgtctgcaatctttccacggcgtggtacaaggcttcggcgattcgcgtccgatgtggaaagtgttgcgcgtattgggcaacctgtttgacctgaaaggttttgaataccacgataccgtcgcgattctgaaagacgcgctggatgcggaaagcctgccgtccaaactgaacaaccgcgccgcttcgactcaaaaagattttcagacggcatcaagccgcctcgtgcgcgtgggcggagtgggcatctatcacaccgatgctatcgtgcgccgttccgcaccgttgcaagaaaccagccatgccgccgtgcctgctgcgcgtgtaaatccaaatacattggcacgcttgggcctgcaagacggacaaaccgctgtcgccaaacaaaacggcgcaagcgtatcggttgccgtcaaagccgatgccggtttgcctgaaaacgtggtgcatttgccgctgcataccgaaaatgccgcgctgggtgcgttgatggacactattgaactggcgggagcttga

SEQ ID NO: 36834 - DNA, 693 bp, Neisseria meningitidis
ttgattggttttttcagtgttggaatcattatgaatttgaaattagtgtttgaatcgggcgatcccgtcctgatcggtgtgtttgtgttgatgctgttgatgagtatcgtaacgtggtgtttggttgtcttgcgctgcatcaagctgtatcgggcgcgcaaagggaatgccgccgtcaaacggcatatgcgcgatactttgtcgctgaacgacgcggtcgaaaaagtgcgcgccgtcgatgcgcctttgtccaaactggcgcaagaggcattgcagtcttaccgcaactaccgccgaaacgaagcgtccgaactggcgcaggctttgccgttgaacgagtatttggtcattcaaatccgcaacagtatggcgcagattatgcgccggtttgattacgggatgaccgcgcttgcctccatcggcgcgaccgcgccgtttatcgggttgttcggcacggtttgggggatttaccacgccctgatcaatatcgggcaaagcgggcagatgagtattgcggcggttgccggcccgattggcgaggcactggtggcgacggcggcgggtttgttcgtggcgattccggcggtgttggcatacaacttcctcaatcgcggcacaaaaatactgacccaggatttggatgcgatggcgcacgatttgcacgtccgcctgcttaatcaaaaggatagctga

SEQ ID NO: 36835 - DNA, 870 bp, Neisseria meningitidis
atgaaacccatacggaaagccgttttccccgtcgcagggatgggaacccgcttcctgcccgccaccaaggccagcccgaaagaaatgctgcccatcgtcgacaagccgctgatccaatacgccgtagaagaagccgtggaagccggctgcacggaaatggtgtttgttaccggacgcaacaaacgcagcatcgaagaccatttcgacaaggcatacgaactcgaaaccgagttggaaatgcgccataaagacaaattgttggaacacgtccgcaacatcctgccgccgaacattacctgcctctacatccgtcaggcggaagcactgggcttgggacacgccgtcttgtgcgcccgcgccgccatcggagacgaaccctttgccgttatccttgccgacgacctgattgatgcccccaaaggcgcgctcaaacaaatggtcgaagtgtacgggcgcagcggcaacagcattttgggcgtagaaaccgttgaagcatcgcaaaccggctcatacggcatcgtcgaaaccgaacagctcaaacagttccaacgcattaccggcattgtcgaaaaacccaagcccgaagacgcgccctccaaccttgccgttgttggacgctacatcctcaccccgcgcattttcgacctcttaaccaatcttccgcgcggcgcgggcaacgaaatccagcttacagacggcatcgccaagctgctcgatcacgaatttgtcctggcgcacccctttgaaggtacgcgctacgactgcggcagcaaactgggctacctcgaagccaccgtcgcctacggtctgaaacatcccgaaaccggcgaacccttccgccggcttttggaaaaataccgcaccgaataa

SEQ ID NO: 36836 - DNA, 456 bp, Neisseria meningitidis
atgaaaaaaccgaaaatcctttttgtctgcctcggcaacatctgccgttcgccgatggcggaatacattttgcgccgccgcgccgccgaagcgggcattccccttgaagcggacagcgcggggacatcgggctggcacgacggggaagatatgcaccgcgagacggcaaagatattgaaaaaacacggtatcgatgcttcaggctttaccagccgcaaaatccgccaaagcgatgcggcggcgtttgactgcatcatcgcgatggacggcaagaatttgtccgaattggaaagaaccttcggcaggcggccggaaaaaatattcaagctgaccgacctgatacccgaaagcggttacgaccatgtccccgatccgtggtacacgggcgattttgaagaaaccttcaggcttgcggatgcgggctgtcgggcattgttggaaaagatttccaaataa

SEQ ID NO: 36837 - DNA, 1047 bp, Neisseria meningitidis
atgccgtctgaagccttcagacggcatcgtgcctatcgggagaataaattgcagcctttagtcagcgtattgatttgcgcctacaacgtagaaaaatatttcgcccaatcattagccgccgtcgtgaatcagacttggcgcaacttggagattttgattgtcgatgacggctcgacagacggtacgcttgccattgccaaggattttcaaaagcgggacagccgtatcaaaatccttgcacaagctcaaaattccggcctgattccctctttaaacatcgggctggacgaattggcaaagtcaggaatgggggaatatattgcacgcaccgatgccgacgatattgccgcccccgactggattgagaaaatcgtgggcgagatggaaaaagaccgcagcatcatcgcgatgggcgcgtggctggaagttttgtcggaagaaaaggacggcaaccggctggcgcggcatcacaggcacggcaaaatttggaaaaagccgacccgacccgaagatattgccgactttttccctttcggcaaccccatacacaacaacacgatgattatgaggcgcagcgtcattgacggcggtttgcgttacaacaccgagcgggattgggcggaagattaccaattttggtacgatgtcagcaaattgggcaggctggcttattatcccgaagccttggtcaaataccgccttcacgccaatcaggtttcatccaaatacagcatccgccaacacgaaatcgcgcaaggcatccaaaaaaccgccagaaacgattttttgcagtctatgggttttaaaacccggttcgacagccttgaataccgccaaataaaagcagtagcgtatgaattgctggagaaacatttgccggaagaagattttgaacgcgcccgccggtttttgtaccaatgcttcaaacggacggacacgctgcccgccggcgcgtggctggattttgcggcagacggcaggatgcggcggctgtttaccttgaggcaatacttcggcattttgcaccgattgctgaaaaaccgttga

SEQ ID NO: 36838 - DNA, 441 bp, Neisseria meningitidis
atggatgtgaaatatgaatttaccctgccttcgagcagcggtgcggattttcattcggcagaacatctgcctttggtcgtgtatttttatccgaaagacagtacgcctggctgtacgacggaaggcttggatttcaatgcgcgtttggaacagtttgaggcattgggttataccgtggtcggtatttcccgcgacggcgtaaaggcgcatcagaatttttgcgccaagcagggtttccggttcgagctgttgagcgacaaggatgaaacagtgtgccgcctgtttgatgtcatcaaattgaagaaactgtacgggaaagagtcgttaggtatcgagcgcagtacgttcgtcttgaataaggatggagaaatcgcccatgaatggcggaaagtcaaagtggcgggtcatgcacaggaagtgttggaaacgctttcccgataa

SEQ ID NO: 36839 - DNA, 765 bp, Neisseria meningitidis
ttgttcaaatggcttatattttggattgttagaatgaatactaaaacagagttacaaaaacttttagaagaggatatatcaactttaacagaaacactaatttgtgcagatgctcttcctccaagatatgtacgtagcattgcaactcctattgtccgtcgatggttaattgacaaacaattaaatattctcgcaaaagaaataggtttaactatagaattgcccatccttgatacaagtttggtatttgaaaaattgtcaaccttagagaataaagttaatttttatatggctggtggagtttatttaggcggagaatttattagctctatatatcattcatcacaagaattttctggtgaaccaataatctatgctgaaccaaatataattttatgtcctgctgaaaaatttttaactttaaaacgagttttccataatggaaatatttttaatatgaatcagataattacttttttatccaataaacaaggaggagtacattttgataaaaattacgataaatataaaacttggcaagttgctatagaaaaagcagcaaattttttaaaactcggtaatccatataatgaagataaattatctcttagtgaagaacatgatactattttagtagttttaccattagaaaaaggatatgaatggaattgtcttgagatagaagtactatccgctgctcaatctctagcaaatatctattgcaacaaagttcgcctcatagatggtcatgtttggaaggaataa

SEQ ID NO: 36840 - DNA, 423 bp, Neisseria meningitidis
atgagcgagcagacggcattggccgtgtgtgccgacggtgtggaaacggcattggcggaagcggcatcactgttggaagagggatgcgggtcggttttggttttggcggcggacgatccgctgccggaaggatatgccgtatcggcaacgcgcgcgccgtttgcttatgctttggcgatggttctgaccaaagggacgcgttacagcctgactttatctgcttcggacgatatgccgtctgaagccggtatgctgcccgaggcatattggagcggtttggaatgggtgcgctttctgctgaacggcagtcgggaatgccgccgggtatatcgcaatcgtgaatggctgtggcagcccgcaagctgcaggctgaagatttccgcaatgtccgcaccgtcaacgacgtggtacaggcggtattga

SEQ ID NO: 36841 - DNA, 420 bp, Neisseria meningitidis
atgaaatcgaaacttactgtcgtctattacgatttggaaagcaatattgcagaagaaatactgtcaggaaacataatgcctgatggaaattttcttattcaagagattcctcttttcgcaccgaatttggctttaaacgacattgttgccatagaacgtgaggataagatgctgtttttcgaccacttgataaaagcttcaggaaataccacgataaacatcgttgttttggatcatttcccaaaggatttattggcagccatagaagaacacagtggtaaaatcagaaaaaatggagagaattatttatcggttaattttccgcccaaaaaatataattctgatttaaaaggaattttaaatagatatgaggaagcaaatatcctcagctacagggaagcttgtttgggcttctcttaa

SEQ ID NO: 36842 - DNA, 792 bp, Neisseria meningitidis
atgatgaatcccaaaatcgtgtttttcgatattgacgatacgctgtaccgcaaatatacggataccttgcgtccttccgtgaaaacggcggtggcggctttgcgcggcaaaggcatattgacggcgttggcaacggggcggtctttggcgacgattcccgaaaaggtcagggacatgatggcggaaacgggtatggatgccgtggtaacgataaacgggcagtttgcgctgctgcacggaaaaactgtgcgcgaagtaccgatggatgccggtttgatgggcagggtttgcgcgcatttggatggcttgggcatggattatgcgtttgtcggcggagaggggatcgccgtgtccgcgctgtcggaatgtgtgtgccgcgccttgaagcatatcgccagcgatttttttgccgataaggattatttctcaagcaaaccggtgtatcagatgctggtgtttgcggaggaaaacgaaatgccgctctggtcggatattgtggaacaggaaggcttgaaaacggtgcgctggcatgaggaagctgtcgatctgctgcctgcgggcgcgtcgaaaacagacggcatcagaagcgtggttgaagcattgggatgggaaatggcagacgtgatggcgttcggcgatggtttgaacgatgtggaaatgctgtctgaagtcgggttcggcgtggcaatgggcaacggggaacaggcggcgaaagaagcggcgaaatatgtttgccccagcgttgatgaagacggcgtgttgaggggcttgcaagatttgggcgtgatttga

SEQ ID NO: 36843 - DNA, 690 bp, Neisseria meningitidis
atgctgtttgaaggcttgccgtgtttggcggtttggtgcaaaaaccggctgtctgccgttttgcctgttggaggattgaacgtgtctgaaaatctgcttgaaatcgaaacccatcccttcgattccgtgttgccgccgaaggctgcggtcatgatgatggggacgtttccgcccaaggaagacaaacgcgcgatgcagtttcattatccgaatttccaaaacgatatgtggcgcgtttacgggctggtgttttttaatgatgcggcgcatttccaaaggttgtctgaaaaagcgtttgatgccgagaaaatcaaggcgtttttgcgcgaacggggaattgcgtcctgtccgaccgtgttgaaggcggcaagggaacacggcaatgcgtccgacaagtttttaaaggtagttgaaaccgtcgatttggcggcggtgttggcaaaaatacccgagtgccgccatatttgtacgacaggcggcaaggcgacggaaatcctgctcgatattcagggtggcggcatcaaaatgccgaaaacgggcgaaaccgtgccgtttccgtttgccggacgggatttgacgctgacgcgcctgccttcgacttcgcgcgcctatcctttgagtttggcgaaaaaggcggcggtgtatcgggcgtttttcgaaatggcgggcttgtgtgaaaagcagttataa

SEQ ID NO: 36844 - DNA, 585 bp, Neisseria meningitidis
atgatcagcagactgaccggcaaactggttgaaaaaaaccctccgcaaatcgtcatcgatgtcaacggtgtcggctatgaggccgacgtatcgatgcagaccttctacaacctgccgcccgtgggtgaaagcgtacaactgtttacccagcttatcattcgggaagacgcacatcttttatttggttttgccactgcggaagaacgcaaaacattccgccaactgatcaaggtcggcggcatcggcgcgaaaacggctttgggcattttgtcggcgatgacggcagacgagctggcgcaggcggttgcagaagaagacgtgaaacgcctgtcttccgcgccgggaatcggcaaaaaaaccgccgaacgtatggtcttggaactgcgcggcaagctggtcgcgcatacggtaacggacgggctgtttgccgccgcacccgccgccgacgaaacggaagacatcgtcagcacgctgcttgcgctgggttacagcgaacgcgaagcaaaagcggcggtcaaaggcgttccggaggggacggacgtgggcgaaggcgtgcgccttgctttgaaaaacctgctgaaataa

SEQ ID NO: 36845 - DNA, 975 bp, Neisseria meningitidis
atgacagaatatcccggcatcgggtcgccgttgttttacggcgttttttttgcggcagtgctggtcatgattgccttggatatgttttcgctgaagaaaaacagcagccataaagtcggcgtcaaagaagccttggcatggagcggcttgtgggttgccgtatcctgcctgttcgcaggctggctgtatttcaaactcgccggcaatcccggctacggcgcggcagtcgcaaaagaaaaagtattggaattctttaccggctacattttggaaaaatcgttggcagtcgacaatattttcgtgttcctgatgatattcggctacttcaaagtcgcaccgcagtttcagcaccgcgtgctgctgtacggcgtattgggcgcattggtattgcgcactgtcatgattttcgtcggcgcggcactggttcagcagttcgagtggattctttatctgttcggcgcgttcctgctctataccggcatacacatgatgaagcccgaaggcgatgaggaaggggatttggcaaacagcaggctgctgaatgccgtcaagaaagtcgttccggtcggcacggaatttcacggcgagaaattttttaccgtcgaaaacggtaaaaaaatcgccacgccgctgtttttggtgctggtcatgattgaattgagcgatgtcgtttttgccgtggacagcatccccgccgtctttgccgttaccaccgatccgtttatcgtgctgacctccaatattttcgccattttgggtttgcgggcgatgtatttcctgctggcggatgtggcggaacgctttatcttcctgaaatacggcttggcattcgtgttgggttttatcggtgtgaaaatgctggtaatgcattgggtgcatatcccgatttccgtttcactgtcggtcgtgttcggcgcgttgggtgcatcgatactgacctcgttaatttatacgaaaaaacagcctgataaataa

SEQ ID NO: 36846 - DNA, 846 bp, Neisseria meningitidis
atgcgccgcccgtacacggcatcccttgccgccctgccttatttttatgtgaacctgccgcattgcggaatcgaaatgaacttcaccgacacccactgccaccttgccgatgccgccctgcgcgaaaacctgccgcacatcctgaccgccgcgcggaaagttggggtgaagcggtttatcgttcccgccacctgtccgcaggattggcaaagcgtggcggaactgtcggaaatgccgtccgaacacggtcaaatccgtattgcgctcggcatccatccttggttttcagacggcattgccgagcgtgattgcgtccgcctggaagcgatgttggcacgttatccgcaggcatgggtcggcgaaatcggcttggatttttacgacaaaacccaaacgccgcagcagcgcgaacggcaaatccaagtcttcagccgccagcttgccatcgcgcaaaccctgcgccgccgcgtgattatccataatctcaaagccaccgccgacatcgccgccgccgtcaaacagacaggctttgcccaaggcggcatcgttcacgccttctcaggcagcgcggaagaagcgcgcgtgttgacgaaactgggtttcaaaatcggcatcggttcgttgttgctcaatccgaacgcgcgtaaagtgcgcgatacgcttaaagccttgaacgacggggatttcgtattggaaaccgacagcccgtttatgctgaaaaaagagattaatacgcctgccaatattctttggattgccgaaattgccgcgcagatacgcggtgtcggcgtggcggacatcgccgcgataacggaacgcaatgccgacagcctgctccgtccctag

SEQ ID NO: 36847 - DNA, 870 bp, Neisseria meningitidis
gtgcactgttgggcaaggcaaacatcaaacctgcaaaataattctgaaaacgggatatggcggcaagacgttcagacaggcgttttgccgccgcgcaggacagggaataccatgaaacagaaaaaaaccgctgccgcagttattgctgcaatgttggcaggttttgcggcagctaaagcacccgaaatcgacccggctttggtggatacgctggtggcgcagatcatgcggcaggcagaccggcatgcggagcagtcccaaaaaccggacgggcaggcaatccgaaacgatgccgtccgccggctgcaaactttggaagttttgaaaaacagggcattgaaggaaggtttggataaggataaggatgtccaaaaccgctttaaaatcgccgaagcgtctttttatgccgaggagtacgtccgttttctggaacgttcggaaacggtttccgaaagcgcactgcgtcagttttatgagcggcaaatccgcatgatcaaattgcagcaggtcagcttcgcaaccgaagaggaggcgcgtcaggcgcagcagctcctgctcaaagggctgtcttttgaagggctgatgaagcgttatccgaacgacgagcaggcgtttgacggtttcattatggcgcagcagcttcccgagccgctggcttcgcagtttgcagcgatgaatcggggcgacgttacccgcgatccggtcaaattgggcgaacgctattatctgttcaaactcagcgaggtcgggaaaaaccccgacgcgcagcctttcgagttggtcagaaaccagttggaacaaggtttgagacaggaaaaagcccgcttgaaaatcgatgccattttggaagaaaacggtgtcaaaccgtaa

SEQ ID NO: 36848 - DNA, 1065 bp, Neisseria meningitidis
atgattaaatcatttgagcttgaaaaattcggaccgattagcttattgaaggctgataatttagggaaaataaatttaattattgcagaaaatagcaaagggaaaacttttattttaaaggcattatatagtgttttaaaaagtcatgaggaagctcataaaggaaagaatattcgtgatttttctgaggaattgcgagataagctatattggacgttccaagtagaggaaattggtgatttagttacaagaggaaaagaaaatccaaacgaacggcctcttaagttaagtatgactttagaagatagttcttcagttttgttttcttttggtagaactaccaaaaagctaattaaaccggagctatacgaactttctcctagaataaacgctaactctatttttttaccacccaaagaagttctatcactatttgatgtaattaaaaaatcagaggaagaaaagagatttggttttgatgctacttacattgatttggtaaaagcattggatattaaaccaacaaaagggaggaattaccctgaggcagcggaagctagaaaggatctagaagcattgtttggcggttatgttagctacaatgataaaaagaaggcatgggtatatgaaaaagatagacaaactttctctatcaattctacagcagagggggtaaaaaagattgggatattagacactctattaggaaatcggtttttgagtcctggatcaatcttatttattgatgagccagaagctaatctacatccgaaagcaattaatcaatttctagaaattctgttttccttatctaaatccaaattgggaatacagatttttatgagtacgcattcatattttgttatcaagaagctgtgtttattagctagaaagcatagtgaaagtattcctgtttttatgcctggcaaagaaaaggaacaggctacttgggtgcaggaaaatttacaaaatagcatgccggataatgaaattattggtgagtctattcgattgttcagagaagaaataggtgttttatctccggaaacagcatggattggttag

SEQ ID NO: 36849 - DNA, 417 bp, Neisseria meningitidis
atgcttaaacatctcgcattcctactgcccgccatgatgttcgccctccccacttcggccgccgttctgacttcctatcaagaacccggctgcacctacgacggcggagtcggaaaagacgggcttccttcaggcaaaggcatatggcgttgccgggacgggcgcggttataccggttcgtttaaaaatggcaaattcgacggacaaggcgtttataccgtttccgccaaccgcgaaatatttatcgaaccgttcaattccgacagtaccaaattccgcaacatggtactctcgggcacgttcaaaaaaggcttggcacacggcaggtttaccgtctcgcaaaacggcgaaaccctcttcattatgaaatgtgaaaacggcatgattcaagaagtgaaactgcccaaaaacaaataa

SEQ ID NO: 36850 - DNA, 1557 bp, Neisseria meningitidis
atggatttcagttggttggcagaaccgcatacctggataggttttgccacgcttttggtgttggaagtcgtattggggatagacaatcttgtctttgtggcgattttggcaaacaaggtccagcccgcacggcgcgaccgcgcacggattatcgggctggggctggcagtcgtcatccgcatcattatgcttgcttttatggcgcacatcatcacgctgaccgagccgctgttccaaatcggcggcctcgccgtttccggcaaggacatgattatgctcgcgggcggtattttcctgctttacaaagccaccaccgaactgcatgaacgcctcgaagggcacaaccgttttactgttgccgacaaccaaaaaaaacacgcgccgttttggggcgtggtcgcgcaaatcctgatactggatgccgtgttttccatcgattcggtcattactgcggtggcgatggtcgatcatatcgtcgtggcgatgggtgcggtcgtcgtcgcaatggctgtaatgatttctgccagcaaactcttgaccgaatttgtcgacagacaccctaccgtcgtgatgctctgccttggttttttgttgatgatcggtttcagcctgattgccgaagccttccatttccacattcccaaaggctacctctacgccgccatcggcttctcgattttaatcgaactgtttaaccagatttcccagcgcaacagccgcaaaaacgactacatcggcagctcgtggcgcaaacggactgctgaaaatgtcttgggtatgatgggcatacgcgaaagcgtgcttgccgacgcgggcggcgaatccggggacgacgcgcattttgaagaaaacgaaaaatcgatgatacgcagcgtgctgacgcttgccgaacgcccgattatgggggtgatgatcccacgccgcgacatcgaacggctggacatttcccaaagccgcgaagaacagtatgcccaactgcaaaacacgccttacagccgcctgctcgttgtcggaaaggcgggcgtggacgaacctttgggctacatcaacaaaaaagacctgctgtcccaactgctggaaacaggcggtctcgacattcagacggcattgcgccagccgctcgtcctacccgacggcacgaccgccttgggcgcgctcgaactcttccgccaaagcagcgcggattacgccctcgtcgtggacgagttcggcgcggtgttgggtatggtaaccatgaaagacctgttggaagccattgccggcgactttcccgaagaattcgaacgcgaagaagaaccagccgttcaggggaatcccgatgaaagcctgacggtggaaggcgcgttggaatatgtggagctggcatcccaactcaatctgccgcagcaggaggaagatgccgatttccatacggttgccgggctgattatggaagaattgcaaaccatccccgatgtcggtgattttgccgatttccacggctggcggtttgaagtggtcgaaaaagaagggcagcgcatcgagcgggtcaaaatcaccaaattgcccgaagaataa

SEQ ID NO: 36851 - DNA, 507 bp, Neisseria meningitidis
atggttgacgcttggtctgtccctgattttgaatcgaaaatctgtccgcccgaggcgttggcggcgcgtttggcgttgttgccgcgcccgctggtgtttaccaacggctgtttcgacatcctccacagggggcacgttacttatctggcgcaggcgcgttcgatggggggcgcgttggtgctggcgttgaataccgatgcttcggtgcggcgtttgggcaagggcggcgaccgcccgattaatcctttggagaaccgtgccgccgttgccgccgctttggaaagtgtggatttggtaacgtggtttgacggggatacgccggcggcgttgattgaggcggtcaaacctgagattttggtcaagggcggcgattgggctgcggataagattgtcggtgcggcagaaacgttggcgcgcggcggtcaggtgttttcaattccgtttctgcaccagacttcgacaacgaagactttggcaaaaatccgtgcggcagagggcggaaaatga

SEQ ID NO: 36852 - DNA, 504 bp, Neisseria meningitidis
atgtcagacgaattcaaccgatttatcgaacgcgtcctctcccacgagggcggttacgccaaccatcccaaagaccctggcggcgaaaccaattggggcatcactaagcgcaccgcacaggcaaacggctacaacggctccatgcgtgccatgacgcgtgaacaggctatcggcatttaccgaaaggcgttttgggagcgttaccgcgccgaccaaatgccggaagcggtcgcgttccaattttttgatgcctgcgtcaaccacggttacggcaatgccgtccgtatgctgcaacgcgccgcaggcgtggcggacgatggaatcatcggcgaaatcagcctcaaagccatcaattccctccccgaaaacgaccttttattgcggttcaacgccgagcgtctggtcttttataccaagctcagtacgttcacctctttcggcaagggctgggtacgccgtgtggcgcaaaacctgattcacgcgtctgcagataacactgattaa

SEQ ID NO: 36853 - DNA, 693 bp, Neisseria meningitidis
atgggacaaaagattaaccctacaggctttcgcctggcggtaactaaagactgggcttcaaaatggtttgctaaaagcaccgacttttctactgttttgaagcaggatatcgatgttcgcaattatttgcgtcaaaaattggccaatgcttcggttggtcgagtggttattgaacgccctgcaaaatctgcacgcattaccattcactccgctcgtccgggtgtggttatcggtaaaaaaggtgaggatatcgaggttttgaaacgtgacttgcaagtcttgatgggtgtacctgttcatgtaaatattgaagagatccgccgtcctgagttggatgctcaaattattgctgacggtattgcccagcagttggaaaagcgcgttcaattccgtcgtgctatgaaacgagcaatgcaaaatgcaatgcgttctggtgctaaaggcattaagattatgacttcaggccgtctgaatggtgcggatattgcccgtagcgaatggtatcgtgaaggtcgcgtgccactgcatactttacgtgcaaatgtagattatgcaaccagcgaagcgcacaccacatatggtgtattgggtctgaaagtttgggtttatacggaaggcaatattaaatcttccaaacctgaacatgagagtaaacaaagaaaggcaggtagacgtaatgctgcagccaactag

SEQ ID NO: 36854 - DNA, 594 bp, Neisseria meningitidis
atggcaagcattcaaaacttatacgagaccgttgtcggcgtgcttggcgatcaggcaagcaaagtcatttctgctttgggcgagattaccgttgagtgtctgcccgaacactatatttcagtcatgaccgcattgcgcgaccatgaagagttgcatttcgagcttctggtcgacttgtgcggtgtcgattacagcacttacaaaaacgaagtatggcagggcaaacgctttgccgtcgtcagtcagttgctttccgttaaaaacaatcaacgcatccgcgtacgcgtctgggtttcagacgacgacttccccgtagtcgaatccgtagttcccgtttacaacagcgcggattggtacgagcgcgaagccttcgatttgtacggcatcatgttcaacaaccatcccgacttgcgccgcatcctgaccgattacggctttgtcggacatccgttccgcaaagacttcccgatttccggctatgtggaaatgcgttacgacgaagagcaaaaacgcgtgatttaccaacctgttaccattgagccgcgcgagatcacgccgcgtatcgtccgtgaggagaactacggtggccaataa

SEQ ID NO: 36855 - DNA, 1356 bp, Neisseria meningitidis
atgagcggtatcgccgaagtcttgcacaatttgggttttaaagtttccggttcggatcaggcgcgaaatgccgctaccgagcatttgggcagcctgggtattcaagtttatcccggccataccgcagaacacgttaacggtgcggatgtcgtcgttacctctaccgccgtcaaaaaagaaaatcccgaagttgtcgctgcgttggagcagcaaattcccgttattccgcgcgccctgatgttggcggagttgatgcgcttccgtgacggcatcgccattgccggcacgcacggcaaaaccacgaccaccagcctgaccgcctccatcctcggcgcggcaggacttgacccgactttcgttatcggcggcaaactcaacgccgcaggcaccaacgcccgcttgggcaaaggcgaatacatcgttgccgaagccgacgagtcggatgcatcctttctgcacctgacaccgattatgtccgtcgttaccaatatcgacgaagaccatatggatacctacgggcacagcgtcgaaaaactgcatcaggcgtttatcgatttcatccaccgtatgcccttctacggcaaagcctttttgtgtattgacagcgaacacgtccgcgcgattttgcccaaagtgagcaaaccttatgctacttacggtttggacgataccgccgacatctacgccaccgacatcgaaaacgtcggcgcgcaaatgaaattcaccgtccatgttcaaatgaaaggacatgagcaggggtcgtttgaagtcgtgctgaatatgcccggcagacacaacgtgctgaacgcattggcagccatcggcgtggcgctggaagtcggcgcatcggttgaagcgatccaaaaaggcttgctcggctttgaaggtgtcggccgccgcttccaaaaatacggcgacatcaagttgccaaacggcgggaccgcgctcttggtggacgactacggacaccaccccgtcgaaatggcggcgacccttgccgccgcacgcggcgcgtatccggaaaaacgtttggtactcgccttccagccgcaccgctatacccgcacgcgcgatttgtttgaagactttaccaaagtcctcaataccgttgacgcgctggtgctgaccgaagtttatgccgccggtgaagagccgattgccgccgccgattcccgcgctcttgcccgcgccatccgcgtgttgggcaaactcgagccgatttactgcgaaaacgttgccgatctgcccgaaatgctgttgaacgttttgcaggacggcgacatcgtgttgaatatgggtgcgggaagcatcaaccgcgtccccgccgcgctgctggaattgtcgaaacagatttga

SEQ ID NO: 36856 - DNA, 324 bp, Neisseria meningitidis
gtgccggaggcgtatgatgacggcggacgagggcatatgccgcccgttcaaaaccaagtcggcacggacgattttcgggcgttttcctgcgagaacggtttgtctgtgcgcgtccgccatttggacagcggcaaagtcgcgttgcggctagacggcaggcgtgccgtcctctcttccgacgttgccgcatccggagaacgctataccgccgaacacggtttgttcggaaacgcaaccgagtggcaccagaaaggcggcgaagcctttttcggctttaccgatgcctacggcaattcggtcgaaacttcctgccgcgcccgttaa

SEQ ID NO: 36857 - DNA, 1260 bp, Neisseria meningitidis
atgatgaacgccgcacaactcgaccataccgccaaagttttggctgaaatgctgactttcaaacagcctgccgatgccgtcctctccgcctatttccgcgaacacaaaaaactcggccgccaagaccgccacgaaatcgccgaaactgcctttgccgcgctgcgccactatcaaaaaatcagtaccgccctgcgtcgtcctcacgcgcagccgcgcaaagccgcactcgccgcactggttctcggcagaagcaccaacatcagccaaatcaaagacctgcttgatgaagaagaaacagagttcctcggcaatttgaaagcccgcaaaaccgagttttcagacggtctgaataccgccgcagaattgccgcaatggctggtcgaacaactgcaacagcattggaacgaagaagaaatcctcgccttcggacgcagcatcaaccaagccgcgccgctcgacatccgcgtcaataccttgaaaggcaaacgcgataaagtgctgccattgttgcaagccgaaagtgccgatgcggaggcaacgccttattcgccttggggcatccgcctgaaaaacaaaatcgcgcttaacaaacacgagctgtttttggacggcacactggaagtccaagacgaaggcagccagctgcttgctttattggtgggcgcaaaacgcggcgaaatcattgtcgatttctgtgccggcgcaggcggcaaaaccctcgccatcggcgcgcaaatggcgaacaaaggcagaatctacgccttcgacatcgccgaaaaacgccttgccaacctcaaaccgcgcatgacccgtgccggactgaccaacatccaccctgaacgcatcagcagtgaacacgatacccgtattgcccgactggcaggcaaagccgaccgcgttttagtggatgcgccctgctccggcttaggcacgctgcgccgcaatcccgacctcaaataccgccaatccgccgagaccgtggccaaccttttggaacagcaacacagcatcctcgatgccgcatccaaactggtgaaaccgcaaggccgcttggtgtacgccacctgcagcgtgttgccggaagaaaacgagctgcaagtcgaacgtttcctgtccgaacatcccgaatttgaacccgtcaactgcgccgaactgctgcaaagcctgaaggttgatttggataccggaaaatacctgcgcctcgattccgcccgacaccaaaccgacggcttcttcgccgccgtattgcaacgcaaataa

SEQ ID NO: 36858 - DNA, 357 bp, Neisseria meningitidis
atggataaaatctttttgcacggtatgaaggcggatacgcttatcggcgtgtacggctgggagcgcgaacggttgcagaccctgattgtcgatttggacatcggtgttcccgagaaagcgggttcggacgacgatattgccaatacggtgcattatgccgaggtatgcgaaacgctgcgccgacatctgaaagaacaggatttcctgcttttggaagcgttggcggaatatattgccgatttggttttgggatatttcggcgcggtgtgggtgcgcgtgaaaatcgtcaagccgggtattttggaaggcgtgcgcgaggttggcgtggaaatcgagcgcggcaagcgtgaagattga

SEQ ID NO: 36859 - DNA, 471 bp, Neisseria meningitidis
gtgaatatcaatgcaacattattcgctcaaatcatcgtctttttcggtttggtatggtttaccatgaaattcgtgtggccgccgattgcaaaagctttggatgagcgtgccgcaaaagtcgccgaaggcttggcagctgccgagcgtggtaaaagcgatttcgagcaggctgaaaaaaaggttgcagaactcttggcagaagggcgtaatcaggtttccgaaatggttgccaacgccgaaaaacgtgccgccaaaattgtcgaagaagccaaagaacaggcttcttccgaggcggcgcgcattgcagctcaggcaaaggccgatgtggagcaggaattgttccgcgcacgcgaatccctgcgcgagcaggttgccgtgttggctgtcaaaggtgccgaatctattttgcgcagcgaagtcgatgcttccaaacacgcaaaactgctcgataccctgaaacaggagctgtaa

SEQ ID NO: 36860 - DNA, 1251 bp, Neisseria meningitidis
atgccgtctgaaagcccttcagacggcatcgcccggctgcgcggcacaaaggcggaaaaaccgtttgccccgtattttcaaacgcgttacacttgccgccgctgttttcagccatttgattacccgcaaccgccgtcattgcgccggcggtttgcctgtcagcgtcattgcgccgctgtaaatacgaaagaacacattatgaccgtatcccccgtcgccttgcgccgtaagaccgagtgcaagcctcatcccaccgcgcgctattggaaaaaatgcgatgtcgaggcacttttcggactgccgtttttagaacttgtccatcaggcggcagaagtccaccgccaaaatttcaacccgcgcgaaatccagctttccacgcttttgtccatcaaaaccggcggttgtcccgaagattgcgcctactgtccgcaatcggcgcaccacaataccaatctgggcaaagagcagatgatggatgtggatgaaatcgtcgaaaaagccaaaatcgccaaatcgcgcggcgcaagccggttttgtatgggcgcggcatggcgcggccccaaacccaaagacgtggagacggtttccgcaatcatcaaagccgtcaagggcttgggtatggaaacctgcggcacgttcggtatgctcgaagaaggtatggcggaagacttgaaagaggcgggcttggattattacaaccacaacctcgacaccgaccccgaccgctacaacgacatcatccatacacgccggcatgaagaccgtatggacaccttgggcaaagtccgcaacgccggtttgaaagtctgctgcggcggcatcgtcgggatgaacgaaactcgtgccgaacgcgccgggctgattgccagcctcgccaacctcgacccgcagcccgaaagcgtgccgattaaccggttggtcaaagtggaaggcacgccgcttgacgatgccgaagatttggactggacggaatttgtccgcaccatcgccgtggcgcggattacgatgccgcaaagttatgtccggctgtcggcagggcgcagcaatatgccggaagcgatgcaggcgatgtgctttatggcgggcgcgaattcgattttttacggcgacaagctgttgacgacaggcaatcctgatgaggacggcgacagaatcctgatggaaaagcttaacctgtatcccttacagtttgagctggaaggcgaggtcgccgaagtggaaaaagcctctgggattaaagtggattattga

SEQ ID NO: 36861 - DNA, 567 bp, Neisseria meningitidis
atgcctttacgggcggactcaacgcgggaaagccccgaaacagcattattaacaaaagttaactgccataataccatctttcacacggcaatcaagtatattgtccgaaatatctggattaaaggaaaagccgtgccactgcctgctccctgccgttttgccaaacctgccgcctcttttttaagtatggctttgctttcctgtcagctttcccacgccgccacggcttatatccccccgaacgattttcaaccgaactgcgacatacgccgactcgggctgacccaaagtcagcacaatgagctgcgtaaaatccgcaccgccttcaaaatggcgggcgacagggcgcgtttgaaggttatgcattccgaacacagccgccgccggtctgtcgtcgaaatcatttcctcggatgtttttaatcggaacgaggcgcgcgattatgtcgaaagccgctatttgtccggtatggattttgcggtggacgaattggaaatccaacaccggttcttccatatcctcacaccgcaacagcagcaaatgtggctttcttcctgcctcaaataa

SEQ ID NO: 36862 - DNA, 492 bp, Neisseria meningitidis
atgcgacatatcttatctgttctgattgaaaacgaatcaggtgcgatgagccgcgtggtcggtttgttctctgcacgcgattacaatatcgattctttggcggttgcgccgaccgaagacaaaaccctgtcccgtatgaccatcgttacccacggcgacgagcaggtcatcgaacaaatcaccaagcaactcaataaattgattgaagtgattaaagtggtcgatttgaacgaaagccgttttgtcgaacgcgaactgatgttggtaaaagtccgtgccgccggcaaagaccgcgacgaatttttacgcttgaccgaaatctaccggggcagcatcatcgacgtaaccgaccgcagctatacgattgaaattaccggctcgacagacaagctggattcctttttggaaacggtcggacgcgcccaaattttggaaaccgtacgcacaggcgcggccggcatcggtcgcggtgagcgtattttgaaaatttaa

SEQ ID NO: 36863 - DNA, 1071 bp, Neisseria meningitidis
atgtatcggaggaaagggcggggcatcaagccgtggatgggtgccggtgcggcgtttgccgccttggtttggctggttttcgcgctcggcgatactttgactccgtttgcggttgcggcggtgctggcgtatgtattggaccctttggtcgaatggttgcagaaaaagggtttgaaccgtgcatccgcttcgatgtctgtgatggtgttttccttgattttgttgttggcattattgttgattatcgtccctatgctggtcgggcagttcaacaatttggcatcgcgcctgccccaattaatcggttttatgcagaacacgctgctgccgtggttgaaaaatacaatcggcggatatatggaaatcgatcaggcatctattattgcgtggcttcaggcgcatacgggcgagttgagcaacgcgcttaaggcgtggtttcccgttttgatgaggcagggcggcaatattgtcagcagtatcggcaacctactgctgctgcccttgctgctttattatttcctgctggattggcagcggtggtcgtgcggcatcgccaaactggttccgaggcgttttgccggtgcttatacgcgcattacgggtaatttgaacgaggtattgggcgaatttttgcgcgggcagcttctggtgatgctgattatgggtttggtttacggcttggggttggtgctggtcgggctggattcggggtttgcaatcggtatggttgccggtattttggtttttgttccctatttgggcgcgtttacaggactgctgctggcaaccgtcgccgccttgctccagttcggttcgtggaacggcatcctatcggtttgggcggtttttgccgtaggacagtttctcgaaagttttttcattacgccgaaaatcgtgggagaccgtatcgggctgtcgccgttttgggttatcttttccctgatggcgttcggacagctgatgggtttcgtcggaatgttggcaggattgcctttggccgccgtaaccttggtcttgcttcgcgagggcgtgcagaaatattttgccggcagtttttaccggggcaggtag

SEQ ID NO: 36864 - DNA, 534 bp, Neisseria meningitidis
atgggaggcgaggacaaggggcttgctcttttggggggtaaggcactgatagatcatgtcatcgacagggtcaggccgcaggtcagccatatcgccatcagcaccaaccggaatttggaagaatatgctcgaagaagtccgcatatttttccggacgcacggcagtggcagcatttcggcccgctttcggcattgtgtaccgcagccaacgatttgcagttggcgactgccgactggcttttggttgtgccgtgcgatatgccgtatctgccgggcgatttggtggcgaggtttgaaaccgtgtcgaaacgcacaccgttgtgcaatgcgtattatgtggaaacgccgataacgatgcactacaacattatgtatatccgcccgcagattctgcaaagcgcgattccctatctgttttcgggtatgaaaacattaagaagctggttgcagcagcaaagggcgcggccggtcagattcgagtttgacgggcattttgccgacttgaacacgcaaatcgatttgcaggagggataa

SEQ ID NO: 36865 - DNA, 1404 bp, Neisseria meningitidis
atgacattgctcaatctaatgataatgcaagattacggtatttccgtttgcctgacactgacgccctatttgcaacatgaactattttcggctatgaaatcctatttttccaaatatatcctacccgtttcactttttaccttgccactatccctttccccatccgtttcggcttttacgctgcctgaagcatggcgggcggcgcagcaacattcggctgattttcaagcgtcccattaccagcgtgatgcagtgcgcgcacggcaacaacaagccaaggccgcattccttccccatgtatccgccaatgccagctaccagcgccagccgccatcgatttcttccacccgcgaaacacagggatggagcgtgcaggtgggacaaaccttatttgacgctgccaaatttgcacaataccgccaaagcaggttcgatacgcaggctgcagaacagcgtttcgatgcggcacgcgaagaattgctgttgaaagttgccgaaagttatttcaacgttttactcagccgagacaccgttgccgcccatgcggcggaaaaagaggcttatgcccagcaggtaaggcaggcgcaggctttattcaataaaggtgctgccaccgcgctggatattcacgaagccaaagccggttacgacaatgccctggcccaagaaatcgccgtattggctgagaaacaaacctatgaaaaccagttgaacgactacaccggcctggacagcaaacaaatcgaggccatagataccgccaacctgttggcacgctatctgcccaagctggaacgttacagtctggatgaatggcagcgcattgccttatccaacaatcatgaataccggatgcagcagcttgccctgcaaagcagcggacaggcgcttcgggcagcacagaacagccgctatcccaccgtttctgcccatgtcggctatcagaataacctctacacttcatctgcgcagaataatgactaccactatcggggcaaagggatgagcgtcggcgtacagttgaatttgccgctttataccggcggagaattgtcgggcaaaatccatgaagccgaagcgcaatacggggccgccgaagcacagctgaccgcaaccgagcggcacatcaaactcgccgtacgccaggcttataccgaaagcggtgcggcgcgttaccaaatcatggcgcaagaacgggttttggaaagcagccgtttgaaactgaaatcgaccgaaaccggccaacaatacggcatccgcaaccggctggaagtaatacgggcgcggcaggaagtcgcccaagcagaacagaaactggctcaagcacggtataaattcatgctggcttatttgcgcttggtgaaagagagcgggttagggttggaaacggtatttgcggaataa

SEQ ID NO: 36866 - DNA, 291 bp, Neisseria meningitidis
atggcagaaagtaaaagggtacaacggctattgagggtctttatcgcgcttgacgagcatccgattatcggtctgagcaataaggatttatcggtcggactggggctgacgccatcgcaagtcagcagggatattgatgatttggttgcctcgggattggtcatcaaacttgaaaacggcaactacgcctacggcatcaaaaccctgcaaatcgcagagcggttcaggcagcagcatgaacggctgcaaagcaagattgccgaaatcggcaagcgggtcgatgtggattaa

SEQ ID NO: 36867 - DNA, 1593 bp, Neisseria meningitidis
atgagtatcgtagaaatcaaagtccccgatatcggcggtcacgaaaacgtcgacatcatcgccgtagaagttaaagcgggcgacaccatcgccgttgacgacaccctgattacactggaaaccgacaaagccacgatggatgtgcctgccgatgcggccggtgtcgtgaaagaagtaaaagtcaaagtcggcgacaaaatctccgaaggcggcgtaattttgaccgttgaaaccggtgccgccgctgccgaagccgctcctgctgctgccgaagcacaacctgcacctgctgccgcacccgttgccgcaggcggtgcaaccgttcaagtagccgttcccgatatcggcggccataccgatgtggatgtaatcgccgttgaaatcaaagtgggcgacaccgttgccgaagacgacacgctgattactttggaaaccgataaagcgacaatggacgtaccttgtaccgctgccggtgtcgttaaagccgtattcttaaaagtcggcgacaaagtatccgaaggctctgccattatcgaagtagaaaccgtcggctctgccgcagcagcccctgctcaagccgctcaagctgccgcaccggctgccgctccgcctccgactgctgccgccgcacccgccgccgcgcctgccgctgccaaaatcgacgaggccgctttcgccaaagcacacgccggcccttccgcacgcaaactggcgcgcgaattgggcgtggatttgggccaagtcaaaggtaccggcttgaaaggccgcatcgtgggcgacgacatcaaagcctttgtgaaatccgtaatgcagggtggcgcggcaaaacctgccgcagccggcgcatctttgggcagcggtctggacttgctgccgtggcctaaagtggacttctccaaattcggcaatgtcgaagttaaagaattgtcccgcattaagaaaatctccggtcaaaacctgtctcgcaactgggttgtgattccgcacgttaccgtacacgaagaagcggatatgaccgagctggaagaattccgcaaacaactgaacaaagaatgggaacgcgaaggcgtgaaactgtctcctctggcgttcatcatcaaagcctccgtttccgcgctgaaagccttccccgaattcaacgcttctttggacggcgacaacctggtgctgaaaaactacttcaacatcggtttcgcagccgatacgccgaacggcttggttgttcccgtcatcaaagacgtggatcaaaaaggcttgaaacaaatcagccaagagctgaccgaattgtctaaaaaagcccgcgaaggcaagctcaaaccgcaagaaatgcaaggcgcgtgctttaccatttccagcttgggcggtatcggcggcacaggcttcacgccgattgtgaacgctcccgaagtcgccatcttgggcgtgtgcaaatcccaaatcaaaccggtttggaacggcaaagagtttgccccgcgcctgatgtgcccgttgagcctgtccttcgaccaccgcgtcatcgacggtgcggccggtatgcgcttcaccgtattcttggcgaagctattgaaagacttccgccgcattaccctgtaa

SEQ ID NO: 36868 - DNA, 888 bp, Neisseria meningitidis
atgtacacaggacgtttcgcccccagcccgaccgggctgctccacatcggctcgctgctgaccgccgccgcttcctatgccgatgcacgctcaaacggcggcaaatggctggtccgcatggaagacctcgatccgccgcgcgaaatgccgggggcggcaagccatatcctgcacacgcttgaggcattcggattcgagtgggacggagaagtcgcctatcagagccgccgttacgccctgtatgaagaaaccctatgccgtctgaaaaccgccggactggtctatccctgccattgcagccgcaaagactggcaggctgcggcaaggcggggcgcagacgggttcgtctataacggacgttgccgccaccccggccaacgccctgcaccgcaaggcaaacagccggcgtggcgcatccgcgtccccgaccgcgacatcggcttttcagacggcatcgtcggcggttacgcccaaaacctcgcccgcgacatcggcgatttcgtcctgcttcgtgcagacggttactgggcataccagctcgccgtcgttgccgacgatgccgaacagggcgttacccacatcgtccgcgggcaagacctgcttgtttccacgccgcgccaaatctatttgcagcagtgtttgggcgttccgacaccgcaatatgcccacctgccgctgctgaccaacgcacaagggcagaaatggtcgaaacagacgctcgcccccgcattggatttaaaccgccgcgaacaactcctccgccaagtgttccgttacctcaacctgcccgaagcaccggaaaccgaccgccctgccgaactgctcgactgggcggtggcacactgggatatggacaaagtgccgaaacacgccgttacccccccctga

SEQ ID NO: 36869 - DNA, 984 bp, Neisseria meningitidis
atgaaaaactttctttcccttttcacttccatattgatgtctgccctgattgccgtgtggttcagccaaaaccccatcaacgcctactggcagcagacctaccaccgcaacagcccgctcgaaccgcttgccgcctacggatggtggcggagcggtgcggcattgcaagaaaacgcctacaccctttcagacggcatcaaagccttcctgtccggcgaaacgccgccgacggctcaagacggcggctcggcagatatgccgtctgaagccgccacatccgaagccgtccctcaaaccggtgaaacagaatggaaacaggacaccgacaccgccgccgtccgcagcggcgacaaagtcttttttgtcggcgactcgctgatgcagggcgttgcccccttcgtgcaaaaaagcctgaaacagcaatacggcatcgaatccgtcaacctcagcaaacaaagcacggggctgtcctacccctcattcttcgactggccgaaaacgattgaagaaaccctgcaaaaacatcccgaaatcagcgtgctcgccgtcttcctcggcccgaacgacccgtgggatttccccgtcggcaaacgctacctcaaattcgcttccgacgaatgggcgcaagaatacctgaaacgcgtcgaccgcatccttgaagccgcacacacgcaccgcgtccaagtcgtttggctcggcatcccctacatgaaaaaagccaagctcgacgggcagatgcgctacctcgacaaactgctttcggaacacttggaaggcaaaatcatcctgattcccaccgcgcacaccctgagcggcggggaagaccgccacaccgactccgtcaacgtcaacggcaaacccgtccgctaccgcagcaaggacggcatacactttaccgccgaaggacaaaaactgctggcggcaaaaataatggaaaaaatcgtttttgaaccaagtacgcaaccatcaagtacacagccatga

SEQ ID NO: 36870 - DNA, 336 bp, Neisseria meningitidis
gtgggaatgacgggatttaatgataccgccgacatagcatccaccccctccgacatcaaaggcaaatatgttgagaaagttgaagtcaaaaacggcgtcgttaccgccacaatgctttcaagcggcgtaaacaaagaaatccaaggcaaaaaactctccctgtgggccaagcgtcaagacggttcggtaaaatggttctgcggacagccggttacgcgcgacgccaacaacgccagcgccgacgccgttaacaaagtcaccggcaacggcaacgacaaaatcgacaccaagcacctgccgtcaacagcaccgacaagaaaatcgacaccaaactag

SEQ ID NO: 36871 - DNA, 1347 bp, Neisseria meningitidis
atgtcggataacgttccaacgattgcggcagtcgctaccgcaccagggcgcggcggcgtgggcgtgatacgcatatcggggaaaaacctgctgccgatggcgcaggctttgtgcgggaaaacgcccaagccgcgcgtggcaacctatgctgattttacggacgcggacggacaggcaatcgacagcgggctgctactgttttttgccgcaccggcaagttttacgggcgaagatgtcatcgagcttcagggacacggcgggccggtggtgatggatatgctgctgaaccgctgtttggaactgggcgcgcgccttgccgaaccgggcgagtttaccaaacgtgcgtttttgaacgacaaactggacttggcacaggcggaaggtgtggcggatttgattgacgcatccagccgttcggcggcgcgtctggcgttgcgctcgctcaagggcgatttttcgcggcggatacacggtctggtcgaagatttgattaccttgcggatgctggtcgaagcgacgctggattttcccgaggaagacattgattttctcgaagcggcggacgcacgcggcaaactggacggcttgcgccgcgccgtggatgatgtgcttgccaacgcacagcagggcgcgattttgcgcgaaggtctgaatgtcgtattggtcggtgcgccgaatgtgggcaagtcgagcctgctgaatgctctggcgggcgacgaagtggcgattgttaccgatattgccggaacgacgcgcgacgcagtcagggaacgtatcctgattgacggcgtgccggtgcatattgtcgatacggcaggtttgcgcgagacggacgacgtggtcgagcgtatcggcatcgaacgcagccgcaaagccgtatccgaagccgatgtcgcgctggtgttggtcgatccgcgcgagggtttgaatgaaaagacacgggcgattttggacgcgctgccgtcggagttgaaacgcatcgaaatccacagcaaatctgatttgcatgcacacgcggcaggcgggttcggtacgggcgcggaaaccgtcatcgcgctgtcggcgaaaactggcgacggcttggacgcgctgaaacggacgttgttgcgcgaggccggatggcagggcgagggcgaagggctgtttttggcgcggacgcggcacgtcaacgcactcaaagcagcgcaggaagaattgtcgctggcggcattgtgcggcaaccatcaaatcgagctgtttgccgaacacttgcgcttggcgcaggtcgcatgcggcgaaatcacgggcgagtttacggcggacgacctgctcggcgtgattttttcgaggttttgtatcggaaaataa

SEQ ID NO: 36872 - DNA, 534 bp, Neisseria meningitidis
atggcagagttcgcaacgattgccagaccttatgcaaaggcattgttcggtctggctcaggaaaaaagccaaattgagtcttggttgggcggactggaaaaacttgcggcggttgttcaggaagggaaggtggcttcattgattgaccgtcctgaaacgaatgcttcagaaaaagcagatatcctcatcgatttggtcggtttgaaagacaaggagttgaaaaactttgttatcgtcttggccgggcagaaacgtttgtcgatattgccggaagtatatgctcaatatcaagacttgaccttatcattcaaccatatcaaatctgccgtcatttacagtgcctatccgttgaccgacaaacaggtcggcgagttggcgcaaatgctgaataagcgtttcgacagcgagctgaaaatctctgtcgaaatcgaaccggagctgattggcggcataaaagttgaagtgggtgatcaggttttggatttgtctgtacgaggcaaattgagtgccttgtacacgactatgacgaattag

SEQ ID NO: 36873 - DNA, 873 bp, Neisseria meningitidis
atgagctggttagataaaatcctgccacccaaaatcaaaaaccgcagcaaagacggttcttccaatgttcccgagggtttgtggcacaaatgtccgtcttgttcggcaaccgtttattcgaccgagttgcagcagaacaatcaggtttgtccgaaatgcaaccaccacaatccgttgtcggcacgacaacgcctgaatctgcttttggatgaggaaggcagggaggaagttgcgggtaatgtcaaaccgatagatcctttgaagtttaaagacggcaaaaaatatccggatcgtttgagtgcggcacgcaagctgaccggggaagatgatgctttggtggtgatgaaaggcaagatgaacggtctgcccgtcgtcgttgccgcgtttgaattccgctttatcggcggttcgatgggttcggttgtgggcgaacgtttcgtacaaggtatccgtcgggcggttgccgacaattgtccgttcgtctgtgtggcggcctccggcggtgcgcgtatgcaggagggtgtgaactcattgatgcagatgacgaaaaccagtgccgcgctgcatttgctgacggaaaaacgcctgccatttatatcggtgttgaccgatccgactatgggcggcgtatccgccagcttcgcatttttgggcgatgtcgtgcttgccgaaccgaacgcgctgatcggttttgccggtccgcgcgtgattgagcagacggtgcgcgaaacgctgccggaaggcttccaacgcgccgagttcctgctggaaaaaggcgcaatcgaccagattgtcgaccgccgcgatatgaagcggcgcatcagtgatttgattacgctgttgtgccgtcaggacaaagtttctgccgcctga

SEQ ID NO: 36874 - DNA, 612 bp, Neisseria meningitidis
atgattacgacttataaaaccattacctccttgacgcaggctgagtttaaagataaaggcagccgttttattgcatttgcctatccgattcggacattggctgatgtgaaaaaatacctcgatccgctaaaggaagagcatcataaagcacgacactggtgctatgcctatcgtttgggtgtggatggtgtgcaatttcgtgccaacgatgatggagagccatcaggaagtgctggacgaccaattttgggacagattgattcggtgggtattaccgacgttttggtcgtggtcgtccgctatttcggtggtactttgttaggtgttccaggtctgatacatgcgtacaaagaggcgacggctcaagcgttggcagttgcagaagtagttgaaaagaatattgaaaaaactgtttggctgaaatgtgaatatccgtttttgaatgaagcgatacgcattgccaaacaatatcaggcggatatattggagcgggatttgcagttggattgccgattgacggtcagtttgtcgttggtaaattatgaggcctgtgttgcggcttggaagaatacacggcagattgaagtaaatacggaaaagccttttgaatga

SEQ ID NO: 36875 - DNA, 732 bp, Neisseria meningitidis
ttggaaaggcgcgcgaaaacaacgtacaataaacccgtttaccacccctcggaatgccgaaccgtgaaccagcttattttcgactttgccgcacacgactatccgagtttcgacaaattcctcggcacggaaaacgcggaactggtctatgtcctccgacacaaacacggacagtttatctatgtctggggtgaagaaggcgcgggcaaaagccatcttttgcaggcgtgggtcgcacaggcgctcgaagccggcaaaaacgccgcctatatcgatgccgcctccatgccgctgaccgatgccgcgttcgaggcggaatacctcgccgtcgatcaagtcgaaaaactgggcaacgaagaacaagccctgcttttttccatcttcaaccgcttccgcaacagcggcaaaggctttttgctgctcggttcggaatacacaccccagcagctcgtcatccgcgaagatttgcggacacgtatggcgtactgcctcgtttacgaagtcaaacccttaaccgaccaagaaaaaatcgacgcgctcgccagtatggcggcggcacgccaagtaaccgtcgattccgaaattttcgaatacctgctcaaacactggcggcgcgatatggacagcctgatgatgatgctcgacacgctggacaactacgccgtcacgatgggcaaacgcatcaccctgccgcttttgcgccagcttttgaaacaacaggaaacccaatga

SEQ ID NO: 36876 - DNA, 522 bp, Neisseria meningitidis
gtgaaagatagtttaatggacgcctttgatttttttatgcaaggcaattttaaaaaaattgcaactgaacaaggtttagaccgtaaatattttatattccaatatatcgtatgtaatttatctgccatttcttctttttgtctaatgaagattattcatacttatactattctctatatattaatagctgtcatcggtattattaatggatttatcttgagaaatagggttctatctatagtaaaaaataaacaaaagtttttatctgatatgtttcccttggaaatgcctttcttttctagagtatacaaaatacctatcttggccagattcttgaataggggaatgaaatggctttatctccaaaattttttctgtttagttatgatttgtttctcgatatctcttatccttaatgaagaaagggggtggatgccttattttgcctgctattggtttggactttgttatccagtaagcacttattacgtttttttatccagagattataaacatatctaa

SEQ ID NO: 36877 - DNA, 267 bp, Neisseria meningitidis
atggactttgaatttggttttaaaaccctgtggccgattgcgacggcggcattttggttttgggtcaatggcatttcaggccgtctgaaagaggcggacaagcgtatcgatgaccttaaagaggagctgcacgcggtcaagctctcttatcacaccaagcaagatgccaaggcagaccgcgacaatatcgcagcttctttgggacgcatcgaaaacaagttggaaaaagtaaacgaaaaactggacaggaaagcggacaaatcatga

SEQ ID NO: 36878 - DNA, 753 bp, Neisseria meningitidis
atgaccgacatccttattgacaacaccgccaccgaaaccgtccgcaccctgatacgggcattcccccttgtgcccgtttcccaaccgcccgaacaaggcagttacctccttgccgaacacgataccgtcagcctcaggcttgtcggggaaaaaagcagcgtcatcgtcgattttgcctccggcgcggcacaataccggcgcacaaaaggcgggggcgaactcatcgccaaagccgtcaaccacaccgcgcaccccaccgtttgggacgcaaccgcaggattggggcgcgacagcttcgtcctcgcctcgctcgggctggccgttaccgccttcgagcaacatcccgccgtcgcctgcctgctttcagacggcatccgccgcgccctcctcaatcccgaaacgcaagacaccgccgcgcacatcaacctccatttcggcaacgccgccgaacaaatgcccgcccttgttcaaacacaaggcaaacccgacatcgtctatctcgaccccatgtatcccgaacgccgcaaaagtgccgccgttaaaaaagaaatgacctacttccatcggctcgtcggcgaagcgcaagatgaagcggcactcctgcataccgcacgccaaacagcaaaaaaacgcgtcgtcgtcaaacgcccccgcctcggcgaacaccttgccggacaagcccctgcctaccaatacaccggcaaaagcacccgcttcgacgtttacctgccctacgggacggacaagggataa

SEQ ID NO: 36879 - DNA, 321 bp, Neisseria meningitidis
atgttcggcaagcagctttttgaagaagtgggctcgaaaatcagcgaaaccatcgccaacagccctgccaaagatgtggaaaaaaatattaaggcgatgctgggcggcgcgttcaaccgtatggatttggttacgcgcgaagaattcgacatccagcagcaggttttgattaaaacccgtaccaaactggcggctttggaagcgcgtttggcaaaactcgaagccgtgcaaaatcccgaacaggcagcattggaagcggctgaagccgctgccgaagaagccgtcgccgaaatcaggcagcaaaccgaagccggcgaataa

SEQ ID NO: 36880 - DNA, 2853 bp, Neisseria meningitidis
atgaaactgtccgaactgttcaaccccgacgaatttgccgcgcggcatttgagtttcggcgacgaagcggcgttgcttgccgctgtcggcgagaaaagcatggacgattttgtcggcaataccgtgccgcaaagcatccgtatgccgtccgaactcgatttgcccgaagccctgaccgaagcggacgcattggcgaaattgaaaggcattgcgtcgaaaaacatgatcaacaaatcctatatcggtttaggctattacccgacccgcgtgccgaacgtgattttgcgtaacgtattggaaaatccgggttggtacaccgcctacacgccgtatcaggcggaaatcgcccaggggcgtttggaagcgttgttgaacttccaacaagtgtgtatcgatttgaccggcttccccgtggcaggcgcgtctttgctggacgaagcgactgccgccgccgaagcgatggcgatggcgcaccgcgtgggcaaagtgaaatccgagcgtttcttcgtggatgcgcgcgtgtatccgcaaactttggacgtgatgaaaacccgcgccaaatatttcggctttgaattggtggtcggcgattttgctcaagccgacgagggcgaatacttcggcgcgctgttccaatacgtcggcaaagacggcgatgtgcaagacttgcaggacgttatcggccgtctgaaagccaaaggcacaatcgtggccgtttccgccgacattatgagcttggttttgctgaaatcgcctgccgaattgggcgcggatattgctttgggcaacacccaacgcttcggcgtaccgatgggcttcggcggtccgcatgctgcttatttcgcgtttaaagacgagttcaaacgttccgccccgggccgcatcatcggcgtatccaaagacgcatcgggcaaacctgccttgcgcatggcgttgtccacccgcgagcaacacatccgccgcgaaaaagcgacatccaatatttgtaccgcgcaggcattgctggcgaacttggcgggtatgtacgccgtttaccacggccctgaaggcgtgaaacgcatcgccaaccgcattcacgcgctggcttctgcttttgccgatgcgctggtttcagacggcattaatgtggttcacaaagtcttcttcgataccgttaccgtcgatttcggcaacaaagagaaagcagaccaagtgtttgccgctgctttggaatcgggctataacctgcgccgcgttaacgatactcaagttgcggctgcattccacgaaacatcggcatgcgaagatttggttgatttgtaccgcgcgtttaccggcaaggatacgttcgcatttgccgatgatgtcaaaggccgtctgaacgccgaactgctgcgtcaagacgacattctgcaacatcccgtgttcaaccgttaccacaccgaacacgaaatgctgcgctacctgaaaaaactcgaagaccgcgacttggcgatgaaccgcagcatgatttcattgggcagctgcaccatgaaactcaacgcgactgcggaaatgttgccgattacttgggcggagttctccgacatccatccttacgctcctgaagcgcaaaccgccggctaccgcgaattgctcgccgatatggaaaacagcctgaaatccatcaccggttttgatgcaatttccttccagcccaactccggcgcgcagggcgaatacagcggtatgcttgccatccgccgctatcaggaagcgcaaggcgaagcgcagcgcaacatctgtctgattcccaaatccgcccacggcaccaaccccgccaccgccgccatgctcggtttgaaagtcgtcgtcgtcgataccgacgaacacggcaacgtcaacatcgacgatttgaaagccaaagccgagcaacaccgcgacgctttgtccgccatcatgattacctatccgtccacccacggcgtgtacgaagaaggcatccgcgacatctgccgcatcgtccatgaaaacggcggacaggtttacatggacggcgccaacctcaacgcccaaatcggcatcatgcagcctgccgaagtcggcgcggacgtgttgcacatgaacctgcacaaaaccttctgtatccctcacggcggcggcggtccgggcatgggtccgattggcttgaaagcccatctggctccgttcgcaccgggacacgctttgaccgacacccacagcgccagtgccgaccaaaccgccgttgctgctgcggccttcggttctgcgtccatactgccgattacttggatgtacctgaccatgatgggcaaacaaggcatggaacaggcgacacgctgggcattgctcaacgccaactacgttgccaaacgcctgagcgaagactatccgattctgtatacaggcaaaaacggccgcgtcgcgcatgaatgtatcgtcgatttgcgtccgctcaaagccgaaagcggcatcactgaaaccgacatcgccaaacgcctgatggactacggcttccacgccccgacggtttccttccccgttgccggtacgctgatgatcgagccgaccgagagcgaaagcaaagccgaactcgaccgcttcatcgccgccctgaaacaaatcaaacaggaagtgctgaaagtcgggcgcggcgaatggccgaaagaggacaatccgctggtcaacgctccgcataccgcatccgatgtaaccggcgaatgggcgcatccgtactcccgtgaagaagccgtctttccgttgccattcgtccgcgaacacaaattctggccgagcgtcaaccgtgtggacgacgtgtacggcgaccgcaatctcgtgtgcagctgcccaccgatggaaaattatgaagactga

SEQ ID NO: 36881 - DNA, 3207 bp, Neisseria meningitidis
atgcgaacgaccccaaccttccctacaaaaactttcaaaccggctgccatggcgttagctgttgcaacaacactttctgcctgcttaggcggcggcggaggcggcacttctgcgcccgacttcaatgcaggcggcaccggtatcggcagcaacagcagggcaacaacagcgaaatcagcagcaatatcttacgccggtatcaagaacgaaatgtgcaaagacagaagcatgctctgtgccggtcgggatgacgttgcggttacagacagggatgccaaaatcaatgccccccccccgaatctgcataccggagactttacaaacccaaatgacgcatacaagaatttgatcaacctcaaacctgcaattgaagcaggctatacaggacgcggggtagaggtaggtatcgtcgacacaggcgaatccgtcggcagcatatcctttcccgaactgtatggcagaaaagaacacggctataacgaaaattacaaaaactatacggcgtatatgcggaaggaagcgcctgaagacggaggcggtaaagacattaaagcttctttcgacgatgaggccgttatagagactgaagcaaagccgacggatatccgccacgtaaaagaaatcggacacatcgatgtggtctcccatattattggcgggcgttccgtggacggcagacctgcaggcggtattgcgcccgatgcgacgctacacataatgaatacgcatgatggaaccaagaacaaaataatgtctgcagccatccgcaatgcatgggtcaagctgggcgaacgtggcgtgcgcatcgtcaataacagttttggaacaacatcgagggcaggcactgccgaccatttccaaatagccaattcggaggagcagtaccgccaagcgttgctcgcctattccggcggtgataaaacagacgagggtatccgcctgatgcaacagagcgattacggcaacttgtcctaccacatccgtaataaaaacatgcttttcattttttcggcaagcaatgacgcacaagctcagcccaacacactgaccctattgccattttatgaaaaagatgctcaaaaaggcattatcacagtcgcaggcgtagaccgcagtggagaaaagttcaatggctccaaccattgcggaattactgccatgtggtgcctatcggcaccctatgaagcaagcgtccgtttcacccgtacaaacccgattcaaattgccggaacatccttttccgcacccatcgtaaccggcacggcggctctgctgctgcagaaatacccgtggatgagcaacgacaacctgcgtaccacgctgctgacaacggctcaggacatcggtgcagtcggcgtggacagcaagttcggctggggactgctggatgcgggtaaggccatgaacggacccgcgtcctttccgttcggcgactttaccgccgatacgaaaggtacatccgatattgcctactccttccgtaacgacatttcaggcacgggcggcctgatcaaaaaaggcggcagccaactgcaactgcacggcaacaacacctatacgggcaaaaccattatcgaaggcggttcgctggtgttgtacggcaacaacaaatcggatatgcgcgtcgaaaccaaaggtgcgctgatttataacggggcggcatccggcggtagcctgaacagcgacggcattgtctatctggcagataccgaccgatccggcgcaaacgaaaccgtgcacatcaaaggcgatctgcagctgggcggcgaaggtacgctgtacacacgtttgggcaaactgctgaaagtggacggtacggcgatgaccggcggcaagctgtacatgtcggcacgcggcaaaggggcaggctatctcaaccgtaccggacaacgtgttcccttcctgagtgccgccaaaatcgggcgggattattctttcttcacaaacatcgaaaccgacggtggtctgctggcttccctcgacagcgtcgaaaaaacagcgggcagtgaaggtgacacgctgtcctattatgtccgtcgcggcaatgcggcacggactgcttcggcagcggcacattccgcgcccgccggtctgaaacacgccgtagaacagggcggcagcaatctggaaaacctgatggtcgaactggatgcctccgaatcatccgcaacacccgagacggttgaaactgcggcagccgaccgcacagatatgccgggcatccgcccctacggcgcaactttccgcgcagcggcagccgtacagcatgcgaatgccgccgacggtgtacgcatcttcaacagtctcgccgctaccgtctatgccgacagtaccgccgcccatgccgatatgcagggacgccgcctgaaagccgtatcggacgggttggaccacaacggcacgggtctgcgcgtcatcgcgcaaacccaacaggacggtggaacgtgggaacagggcggtgttgaaggcaaaatgcgcggcagtacccaaaccgtcggcattgccgcgaaaaccggcgaaaatacgacagcagccgccacactgggcatgggacgcagcacatggagcgaaaacagtgcaaatgcaaaaaccgacagcattagtctgtttgcaggcatacggcacgatgcgggcgatatcggctatctcaaaggcctgttctcctacggacgctacaaaaacagcatcagccgcagcaccggtgcggacgaacatgcggaaggcagcgtcaacggcacgctgatgcagctgggcgcactgggcggtgtcaacgttccgtttgccgcaacgggagatttgacggtcgaaggcggtctgcgctacgacctgctcaaacaggatgcattcgccgaaaaaggcagtgctttgggctggagcggcaacagcctcactgaaggcacgctggtcggactcgcgggtctgaagctgtcgcaacccttgagcgataaagccgtcctgtttgcaacggcgggcgtggaacgcgacctgaacggacgcgactacacggtaacgggcggctttaccggcgcgactgcagcaaccggcaagacgggggcacgcaatatgccgcacacccgtctggttgccggcctgggcgcggatgtcgaattcggcaacggctggaacggcttggcacgttacagctacgccggttccaaacagtacggcaaccacagcggacgagtcggcgtaggctaccggttctga

SEQ ID NO: 36882 - DNA, 285 bp, Neisseria meningitidis
atgtggaaaatcataaaagaggatagtgatgatttaggatttgcaattaaatgcttattctctcaatctattgatttaaatgaattcaaattatggattgaacaagtaatacgagatatgcccatcgaggacatccctttttatatttttgacttggcggatttcgatggggtaattgccgatattgacaatattgtaggttttgtttcgagttacagcctatcaaaatcgaaaaaaaaatgccttgaccggcattgccttcttaagggggatagatgtctatga

SEQ ID NO: 36883 - DNA, 306 bp, Neisseria meningitidis
atggctaagaaagcacttattaatcgtgatctgaaacgtcaagctttggctaaaaaatatgcggctaaacgcgcggcaattaaagcggtaatcaatgattcgaatgcaactgaggaagagcgttttgaggctcgtttgaggtttcaatccattcctcgtaatgcggcacctgtgcgtcaacgtcgtcgttgtgctttgacaggtcgccctcgtggtactttccgtaaatttggtttgggtcgtattaaaatccgtgaaatcgccatgcgtggcgaaattccgggtgttgttaaagccagctggtaa

SEQ ID NO: 36884 - DNA, 840 bp, Neisseria meningitidis
atgaccgccacagccgccgccatagaccgcctgcttccccaaacccaatgccgcgaatgcggctacgacggctgcctgccctacgcacaggcagtcgcaacaggcgaagcgtacaacctctgcgccccgggcggagaagccgtcattcgggacatttccgccctgctcggcaaaccccttgtcgcacctgccaaaacccaagccaaagcactcgcccggatagacgaaaccgcctgtatcggctgcaccgcctgcatccgcgtctgccctgccgatgccattatgggcgcgggcaaacttatgcacaccgtcatcgccgacgaatgcaccggctgcggactctgcgtcgccccctgccccgtcgactgcatccatatgcagcccgttgccgacaccgtcctgccccgcgcgcgccgcttcagcctgtccgccgacagccgttttgccgccgccgaacacgcgcgcgcgcgctacctcaaacgcaacgaacgcaaacagcgcgaagccgacgaacgcaaggccatgcttgccgaacgcgaagccgccgtccgtaacgcgcgtccgcaaacgcccgacacaccgaaaaaaccggcgtttaaccctgccgacctcatcgccaaagccatggcaaaagcgcaaacccaacaagaccgcctcgccgccgccgacaaccgcaaagactatcaggcgaaacagatagccgaagcccgcgaacgcgccgagttgcgccgcgcccaacgcgatatgaaatacggcagcgacagcgaaaaagccgccgccctcgaatacctcaaacaatacaaagccaaacaggaagccgcacaaaacaccgcctcctga

SEQ ID NO: 36885 - DNA, 234 bp, Neisseria meningitidis
atgaaattgaccttgatgtttcgtgaatattgcagcttgtgccacaaaatgcgcgatgcactcaaaccttttcaaaatgaatacgggttcgggctggaagtggtcgatgtggatgaaaatcctgttttggaagaaaaatacaatgagctggttcccgttttgttggcgggagatgaggaaatctgtcactggtttttggatgaggacaggttgaaacagtttctcgaacggtaa

SEQ ID NO: 36886 - DNA, 1785 bp, Neisseria meningitidis
atgagcttagttgaattgaaagtgcccgacattggcggacacgaaaatgtagatattatcgcggttgaagtgaacgtgggtgacaccatcgccgttgacgacaccctgattaccttggaaaccgacaaagcgacgatggacgtgcctgccgaagttgcgggcgtagtcaaagaagtgaaagtcaaagtcggcgacaaaatctccgaaggcggtttgattgttgtcgttgaagctgaaggcacggctgccgctcctaaagccgaagcggctgccgcctcggcgcaagaagcccctaaagctgccgctcctgctccgcaagccgcgcaatttggcggttctgccgatgccgagtacgacgtggtcgtattgggtggcggtcccggcggttactccgctgcatttgccgctgccgataaaggcttgaaagtcgccatcgtcgaacgttacaaaactttgggcggcgtttgcctgaacgtcggctgtatcccttccaaagccttgttgcacaatgccgccgttatcgacgaagtgcgccacttggctgccaacggtatcaaataccccgagccggaactcgacatcgatatgcttcgcgcctacaaagacggcgtggtttcccgcctcacgggcggtttggcaggtatggcgaaaggccgtaaagtggatgttatccaaggcgacggccaattcttagattcgcaccacttggaggtatcgctgactgccggcgacgcgtacgaactggcagcccctaccggcgagaaaaaaatcgttgccttcaaaaactgtatcattgcagcaggcagccgcgtaaccaaactgcctttcattcctgaagatccgcgcatcatcgattccagcggcgcattggctctgaaagaagtaccgggcaaactgctgattatcggcggcggcattatcggcctcgagatgggtacggtttacagcacgctgggttcgcgtttggatgtggttgaaatgatggacggcctgatgcaaggcgcagaccgcgatttggtaaaagtatggcaaaaacaaaacgaataccgttttgacaacatcatgatcaacaccaaaaccgttgcagtcgagccgaaagaagacggcgtttacgttacctttgaaggtgcaaatgcgcctaaagagccgcaacgttacgatgccgtattggttgccgccggccgcgcgcccaacggcaaactcatcagcgcggaaaaagcaggcgttgccgttaccgatcgcggcttcatcgaagtggacaaacaaatgcgtaccaatgtgccgcacatctacgccatcggcgacatcgtcggtcaaccaatgttggcacacaaagccgttcacgaaggccacgttgctgctgaaaactgcgccggccacaaagcctacttcgacgcgcgcgtgattccgggcgttgcctacacttcccccgaagtggcgtgggtgggcgaaaccgaactgtccgccaaagcctccggccgcaaaatcaccaaagccaacttcccgtgggcggcttccggccgtgcgattgccaacggttgcgacaacggctttaccaagctgatttttgatgccgaaaccggccgcatcatcggcggcggcattgtcggtccgaacggtggcgatatgatcggcgaagtctgccttgccatcgaaatgggctgcgacgcggcagacatcggcaaaaccatccacccgcacccgaccttgggcgaatccatcggtatggcggcggaagtggcattgggtacttgtaccgacctgcctgcgcaaaagaaaaaataa

SEQ ID NO: 36887 - DNA, 648 bp, Neisseria meningitidis
atgaaagcattacttttaggcgcgccgggcgcgggcaaaggcactcaggcgcaattcatcaccgccgcgttcggcattccgcaaatctctaccggcgacatgctccgcgccgcgattaaggctggcacgcccttgggtttggaagcgaaaaaaatcattgacgaaggcggcttggtgcgcgacgacatcattatcggcatggtcaaagaacgcatcgcgcaagacgactgcaaaaacggtttcctgttcgacggtttcccgcgcacattggcacaagccgaagcgatggttgaagcaggcgtggatttggatgcagtcgttgaaatcgacgtgcctgacagcgtgattgtcgaccgtatgagcggccgccgcgtgcatttggcttccggccgtacttaccacgttacctacaacccgcccaaagttgaaggcaaagacgacgtaaccggcgaagatttgattcagcgcgacgacgacaaagaagaaaccgtgaaaaaacgccttgccgtttaccacgagcaaaccgaagttttggtcgatttttacagcaaactggaaggcgaacacgcgcctaaatacatcaaagttgacggcactcagccggtagaagccgtgaaagccgaagtattgggcgcattgggcaaataa

SEQ ID NO: 36888 - DNA, 1371 bp, Neisseria meningitidis
atgtccggctggctgctgatgggtctgccgggcgcgatttacctgagcggtttgaatgaggcttggattgccatcggcctcttggtcggcgcgtatttcaactggctcttggtggcgggccgcctgcgcgtgcataccgaatacgccaacaatgcgctgacgctgccggattatttcttccaccgcttcggcgcgggcggacacttgatgaaagtggtttccgcactgattatcctgttcttcttcacgatttattgcgcctcgggcattgtggcgggcgcaaccctgttccaaagcctgtttgaaggtatgacttacaatcaggcaatgtggctgggcgcgggcgcgaccatcgcctataccttcttgggcggtttcttggcggtcagctggacggatacgctgcaggcttctttgatgattttcgccctgattttaacgccggtgatggtctatctgggcttgggcggcgcggaacagatgtctgccgcgattcaaagcgtcgccgcaggcacgggcaaagaatacggcagcctgtttgccggtacgaccgtcatcggcatcatttccaccgccgcatggggcttgggctatttcggacagccgcacattttggcgcgctttatggcggccgaaagcgcgaaatcgctggtatccgcacgccgcatcggcatgacttggatggcgttgtgccttgcgggcgcggtggcggtcggttatttcggcattgcgtatttcggtgcaaatcccgacaaagtttcttctatgagcggcaaccacgaacgcatcttcatcgcgctttccaccctgctgttcaacccttggatcgccggcatcattttgagcgcgattttggcggcggtgatgtccaccctgtcctgccagcttttggtttgctccagcgcgattaccgaagacttctacaaaggctttttgcgtaaaaacgcgcaacagtcggaactggtatgggtcggccgcctgatggtcttggcgattgccgtgatttccatcctgattgcttccgatccgaacagcaaagtattgggactggtgtcttacgcgtgggcaggtttcggtgcggcattcggcccgattgtgattctgtccgtattgtggaaacgcatcactgcctacggcgcgttgtcgggtatggttgcaggtgccttaaccgtggtcgtatgggcggaatgggtgaaaaaaccggctcaagcggcaggcgaaagcggcttgttgacgatgtacgaaatcgtcccgggctttattgtttgcttgatcgttgccgtgttggtttccctgttcaacaaagaaccttcgcgcgaaacccaagaacgctttgaaaaagccgacgcagattaccgcgccgcccgataa

SEQ ID NO: 36889 - DNA, 1716 bp, Neisseria meningitidis
atgaagggcaggtttcagggcgagtttgccggtttgaacgcgcaactggcggaaaaggcggcaagatgtgattttgtcgaacaggcacacggcaaaaccgtgtcggaattggcggtgttggacgggaaataccggcatttgcaggacgaaaattatgctttgggcaaccgtttttccgcagccgaaaagcagattgcccatttgcaggaaaaagaggcggagtcggcgcggctgaagcagtcgtatatcgagttgcaggaaaaggcacagggtttggcggttgaaaacgaacgtttggcaacgcagctcggacaggaacggaaggcgtttgccgaccaatatgccttggaacgccaaatccgccaaagaatcgaaaccgatttggaagaaagccgccaaactgtccgcgacgtgcaaaacgacctttccgatgtcggcaaccgttttgccgcagccgaaaaacagattgcccatttgcaggaaaaagaggcagaggtggagcggttgaggcagtcgcataccgagttgcaggaaaaggcacagggtttggcggttgaaaacgaacgtttggcaacgcaaatcgaacaggaacgccttgcttctgaagagaagctgtccttgctgggcgaggcgcgcaagagtttgagcgatcagtttcaaaatcttgccaacacgattttggaagaaaaaagccgccgttttaccgagcagaaccgcgagcagctccatcaggttttgaacccgctaaacgaacgcatccacggtttcggcgagttggtcaagcaaacctatgataaagaatcgcgcgagcggctgacgttggaaaacgaattgaaacggcttcaaggattgaatgcgcagctgcacagcgaggcaaaggccctgaccaacgcgctgactggtacgcagaataaggttcagggtaattggggcgagatgattctggaaacggttttggaaaattccggccttcagaaagggcgggaatatgtggttcaggcggcatccgtccgaaaagaggaagacggcggcacgcgccgcctccagcccgacgttttggtcaacctgcccgacaacaagcagattgtgattgattccaaggtctcgctgacagcttatgtgcgctacacgcaggcggcggatgcggatacggcggcacgcgaactggcggcacacgttgccagcatccgtgcacacatgaaaggcttgtcgctgaaggattacaccgatttggaaggtgtgaacacattggatttcgtctttatgtttatccctgtcgaaccggcctacctgttggcgttgcagaatgacgctggcttgttccaagagtgtttcgacaaacggattatgctggtcggccccagtacgctgctggcgactttgcggacggtggcgaatatttggcgcaacgagcagcaaaaccaaaacgcgctggcgattgcggacgaaggcggcaagctgtatgacaagtttgtcggctttgtacagacgctcgaaagcgtcggcaaaggcatcgatcaggcgcaaaacagctttcagacggcattcaagcaacttgccgaggggcgcgggaatctggtcggccgcgccgagaaactgcgtctgttgggcgtgaaggcaaacaagcagcttgcacgcgatttgaccgaacgtgccaatgaaacaacggcgttgtcggaatctttggaatatgtggcagaagatgaagcagtctga

SEQ ID NO: 36890 - DNA, 933 bp, Neisseria meningitidis
atgcagcggtcgagtgccgaggaaagtgcttgtgcaaatgcgttcattgcgggaatacgttgggggaaaacttgcggattttaccacgattcttgcgttgtcggcagacggcggcggtttggtggtacaatgtgcgccgtttgcagccttaaggtgtttctgtatttttggagtatggaaacgcattcgggctgttttttgcggaagacggtaatgaaagacgatgttttgaaacagcaggcacacgcggcgatacagaagaaactgggctatgcgttccgcgatatttcgcttttgcggcaggctttgacgcacaggagctgccatacgaaacataatgaacggtttgagtttgtcggcgattcgattttgaattatacggtggcacggatgctgtttgacgcgtttccgaagttgaccgagggcgagttgtcgcggttgcgggcgagtctggtcaatgagggcgtgctggcggaaatggcggcggaaatggatgtcggagaaggcttgtatttgggggcgggcgagttgaagagcggcggctttagacggccttcgatactggcggacgcgatggaggcgatgtttgccgccgtcagcttcgatgccgatttcaacacggcggaaaaggtggtacgccatttgtttgccgatcgagtccggtgtgccgatttccaaaatcaggcaaaagacggcaaaactgctttgcaggaggcgttgcaggcgcgccgtttcgctttgccgaaataccgtatcgaagagcaaatcggccatgccaacgacagtatgtttgtcatttcctgcgatttgggcgaactgggtttcgtgtgctatgccaaagggacgagccgcaaggcggcggaacaggaggcggcgaaagaggctttgaaatggctggaaaagaagctgccgctgaagaagaaaaagaaatga

SEQ ID NO: 36891 - DNA, 1836 bp, Neisseria meningitidis
gtgaacactactcctatccactccaaactcgccgaaatcaccgggcgcattattgaacgcagccgtccgacgcgtgaaaaatatctggcgaagatccgcagtgccaaacaaatgggacgcttagagcgcaaccagctcggctgcagcaacttggcacacggctatgctgccatgcctaaaagtatcaaaatcgaaatgcttcaggaaaccgtccccaacttaggcatcatcaccgcctacaacgacatggtttccgcacaccagccgtttaaagacttccctgaccaaatcaaagacgaagcgcagaaaaacggcgcgaccgcccaagtcgccggcggcacgcccgccatgtgcgacggcatcacgcaaggctacgccggcatggaattgtcgctgttctcccgcgacgtgattgccatgagtaccgccatcgggctgtcgcatcaaatgtttgacggcagcctgtttatgggcgtatgcgacaaaatcgttccaggtttgatgataggcgcgctttcgttcggtcatattccgggtatcttcgtccccgcaggcccgatgtccagcggtatcggcaacaaagaaaaagcccgcacccgccagcttttcgccgaaggcaaggtcggacgcaacgaacttttgaaaagcgaaatgggttcttaccacagcccgggcacctgcactttctacggcacggcaaactccaaccaaatgatgatggaaatgatgggcgtgcacctgcctgccgccgccttcgtccacccttacaccgacctgcgcgaagcgctgacccgctacgccgccggacacctcgcgcgcggcatcaaaaacggcacgattaaacctttgggcgaaatgttgaccgaaaaatcctttatcaacgccttgattggcctgatggcaaccggcggttcgaccaaccacaccatgcacctcgtcgctatggcgcgtgcggccggcgtgattttgaactgggacgacttcgacgaaatttcctccatcatcccgctgctcatccgcgtttatccgaacggcaaggccgacgtgaatcactttaccgcagcgggcgggctgcctttcgttatccgcgaattgctgaatgcaggcctgttgcacgacgatgtcgataccgtcgtcggacacggtatgcgccactacaccaaagagcctttcctcatcgacggcaaactcgaatggcgcgaagcccccgaaaccagcggcaacgacgacatcctgcgcaaagctgacaacccgttctcccccgacggcggtctgcgcctgatgaaaggcaacatcggacgcggcgtgattaaagtgtccgccgtgcgcgaaggttgccgcatcattgaagcgcctgccatcgtgttcaacgaccaacgcgaagtgttggctgcgtttgaacgcggcgagttggaacgcgattttgtgtgcgtcgtccgctaccaaggcccgcgtgccaacggtatgcccgaattgcacaaactgaccccgcctttgggcatcctgcaagaccgcggcttcaaagtggcgctgctgaccgacggccgtatgtccggcgcgtccggcaaagttccggcctccatccacatgacgcctgaagccttgattggtggcaacatcgccaaaatccgtaccggcgacctgatccgcttcgactccgttagcggcgaactcaacgtcctgattaacgaaaccgaatggaatgcccgcgaagtcgaaagcatcgacttgggcgcgaaccaacaaggctgcggccgcgaactcttcgccaacttccgcagcatgaccagcagcgcagaaaccggtgccatgagtttcggcggcgaatttgcctga

SEQ ID NO: 36892 - DNA, 933 bp, Neisseria meningitidis
atgaaaattgcaaacagcatcaccgaactaatcggcaacacgcctttggtcaaactgaaccgtctgaccgaaggtttgaaggcggaggttgccgtgaaactggaatttttcaatccaggcagcagcgtcaaagaccgcattgccgaagcaatgatcgagggtgccgaaaaagcgggcaaaatcaacaaaaacaccgtcattgtcgaagcaaccagcggcaatacgggtgtcggtttggcaatggtatgtgccgcacgcggctacaagctggcgattaccatgccggaaagcatgagtaaggagcgcaaaatgctgttgcgcgcgtttggtgcggagctgattctgacccctgccgccgaaggtatggcgggcgcgattgccaaagcgaaatccttggtggacgcgcatcccgacacttattttatgccgcgccagttcgacaatgaggcaaaccccgaagtccaccgcaaaacaaccgccgaggaaatttggcgggatacggacggcaaagtcgatgtcttcgttgccggcgtcggcacgggcggtacgattaccggcgtgggcgaagtgttgaaaaaatacaaacccgaagttaaagtggttgccgtcgagcctgaagcttcacccgtattgagcggcggcgaaaaaggcccgcacccgattcaaggcatcggcgcaggctttattccgaccgttttgaataccaaaatttacgacagcattaccaaagtgtcgaacgaagcggcttttgaaaccgcccgcgcaatagcggaaaaagaaggcattttggtgggtatttcttccggtgcggcggtttggagtgcgttgcagcttgccaaacagcctgaaaacgaaggcaagctgatagtcgtgctgctgccttcttatggcgaacgctatctctctacgccactttttgcagatttggcataa

SEQ ID NO: 36893 - DNA, 1170 bp, Neisseria meningitidis
atggtttcgattgccggaatcgccttgggcgtaaccgcgctgattgtcgtcttgtcggttatgaacggctttcagaaagaaatacgcgggcagctcctgaatgtcgcgccgcacgccgaaatcggctatatcgacaatacggatacggattggcgcaacctgcttcggtttaccgaaaaccgcaaaggtattttggctgccgcgccctatgtttccaatcaggcattgctggccaatgcgggcgaaatcaggggcgtgcagatgcgcggcattttgccgtctgaagagcgcaaagtggtggaatacggcgacaaaatgccggcaggcaaatttgaagacctgattccgggcgagtttgacattatcctcggtgtcggcttggcggaggctttgggggcggaagtcggcaataaagttaccgtcatcacgccggagggcaacgttacccctgccggagtcgtgccgcgcctgaagcagtttaccgtggtcggtctggttaagacgggcgtttacgaagtggacaactcattggcgatgacgcatatccaagacgcgcgcgtactgtaccgcttggataaggaagttgcggggctgcggctgaaactcgccgacccgcaaaacgcccccgccttgacggcaacactgattccggaggcgcaaagggatacggtttgggtgcgcgattggacgttcagcaatcgaagctattttgaggcggtcgagttggaaaaacggatgatgttcatcatcctgacgctgattatcgccgtggcggcgttcaaccttgtctcttccttggtgatggcggttacggaaaagcaggcggacattgcgattttacggactttgggtctttcccctggcggcgtgatgaagatttttatggtgcagggcgcgttttcaggctttttcggcacgctggcgggtgtggtctgcggcgtgcttttgggttggaacgtcggcagggtcgtggcgttttttgaaaacctgctcggtgtccacctcatcaattcgcaggtttattttatcgactacctgcccagcgatgtcgatatgggcgacgttgccctgattgcctgcatttctttgggactgtctttcgttgccacgctctacccgagccggcgcgcgtcaaaaacccaaccggcggaggctttgcgttatgagtga

SEQ ID NO: 36894 - DNA, 141 bp, Neisseria meningitidis
ttgatttcaaatcatgatactgaattcacaagggatatttattcctttgctattctgaaaacagttgaagttcagcgcaatattgccgaaaaaggcagcagccgtaaaaaagtcggggaattattggcaatttatgcgtaa

SEQ ID NO: 36895 - DNA, 639 bp, Neisseria meningitidis
atgaaaaaaatcaatgttgcccccgaaaatccccaataccgcatcgtcgaaatctttgaaagcctgcaaggcgaaggctggaacacgggcatgcccgccgttttcgtccgcttgggcaaatgcaacctcgcctgcggctggtgtgataccgattatttgacattcggcatgatgagcctgtccgacatcttaggctgtctgaaaacctatgccgcccgcaacatcatcatcaccggcggcgaaccgaccatacagccgcatctcgatatgctgctggacacgctcaaggcggaaggctatttcctctgtctcgaaaccaacggactcaatcccgcgccgccgcaaatcgactacgtcgccaccagccccaaagcctgctatgccgccaaatatgaaaatagctgtatcgaaacagccgacgaagtgcggattgttgccgatggtgatgtccttgcgttctgcgaaaacatggaacgcaaaatccgcgcacatcattactacctttcgccctgtgagcaagacggtgcgatgaacatctacgacaccatccgccaaatcggtattctgaacagccgccccgacgcgccggtgcattggcagttgagcgtgcagacgcacaaatgggcggggatagagtag

SEQ ID NO: 36896 - DNA, 510 bp, Neisseria meningitidis
atgaaaaagaaactgctttcgggcatcaaatttgccgttcagacggcattggtgtttttattggtgtcgctgtttttggattggatacgcaagcccgacgaacctgccggtgcggcagggcggcctttgaccctgctgtcggggcagcggctgactttgggacagtttagccgagataaggcggttttggtgtatttttgggggagctggtgcggcgtgtgccgttatcagtcgccgataatcgatgatttggcggcggacggcgtgccggtcgtcggcgtggcggtacgttccggcagttcggcggaagtggcggcgtatatggcaaaacgcggcttgggctttccgactgccaacgatgaggacgggggtttggcaaggtcttggcggattgtcgcaacgcctgccgtcgttttggtcaaaaatgggaaaatggtccattatacgacgggaatcagcagttattggggcttgcgcgcacgaatttttcaggcggatgttttcggttaa

SEQ ID NO: 36897 - DNA, 1422 bp, Neisseria meningitidis
atgaaaatcattcagatacagaacaatcacaatgtaaacgatgaccgccccgagtttgaccgcgcgctgattgccagcctgcccgccagcggcccgcgctacacttcctaccctaccgccgaccgtttccatgacggtttccgcgaaggcgaatatatcaaagctttacatttgcgcggtatgggcgcgttaaacaaaccgctttccctttacattcacattccgttctgcaacaccatctgctactactgcggctgcaacaaaatcatcaccaaagacaaaagccgcgccgatgcctacatcgaatatcttgaaaaagaaatggaactgctcgctccacatctgaacggacggcaccagcttgcccaactgcacttcggcggcggcacgccgacctttttgagcgacgaacagatcgaacgtgtcttccgcatgatacgcaaacatttcgagttaatccccaccggcgaatactccatcgaaatcgacccgcgcaaagtcagccgcgacaccgtcctcatgctcggcagactcggcttcaaccgcatgagcatcggcattcaggatttcgaccccaaagtgcaggcggcggtcaaccgcatccaaagttacgaagaaaccaaagaagtcatcgatgcggcgcgcgaagcggggttcaaatccgtcagcgtcgatttgatttacggcctgccgcaccagacttcggaaagcatcaaaaccaccatcgataccgttttgtcgctcgatcccgaccgcctcgccctttatcactacgcccacctgccgcacgtgttcaaaccgcaacgccgcatcgataccgccgccgttcccgacagcgaagagaagctcgatatgctgcaatactgcgtccaaaccctaaccgaacgcggctacgtcttcatcggcatggatcatttcgccaaacctgacgacgaactctccatcgccctcaaagaaggcttcctccagcgcaacttccaaggctattcgacctacgcggattgcgatttggtcgccatcggcgtgtcgtccatcggcaaaatcggcagcacctattcccaaaacgaacgcgacatcgatgcctactatgccgccatcgacgaaggcagactgcccatcatgcgcggttatcagctcaatcaggacgacatcctgcgccgcaacatcattcaggatttgatgtgccgtttcgcgctcgactaccggatttacgaaagtatgttcggcatcccgttcgaccgctacttcaaagacgaactggcggatttggaaaaactcgccggtttgggattggtgcgcctgaacagccacgggctgaccgttaccccgaaaggacgcttcctcatccgcaacatcgccatggtcttcgattaccacctgcgccataaagaaaccaaggcgaaatattcgcaaacggtgtga

SEQ ID NO: 36898 - DNA, 1149 bp, Neisseria meningitidis
atgcccctccccctcccctctcccgaagcacggcaatcctcgctcaaactgcaaaccctcattgccgaaaaaatcggtaaacacggcaactggattccattttcacgttttatggaattggttttatacgctccgcaatacggctactacaccggcggcagccataaaatcggcaataccggggattttattaccgcaccgaccctcacctctctgtttgcacagacactggcacgccaacttcaagaacttctatctcaaacggcgggcaatatctatgaattcggcgcgggaaccggacagcttgccgccgatttgttgggcagcatttcggacggcatcagccgttactatattattgaaatatcgccggagctggcagcacgtcagaaaaacctgattcaagcccgcgcaccggaagcatctcaaaaagttgtccacttgaccgcacttcccgaagcgtttgacggcatcatcatcggcaacgaagtactcgatgccatgcctgtcgaaatcgtccgtaaaaatgaaggcggctcattcgagcatgtcggcgtttgcctagataatgaccgttttacctattcggcacgaccgctgcacgacttacagctatctgccttggcttccctctattttcctcaaacagattatccctacaccagcgaactacatccgcaacaatatgcctttatccgcacccttgcctcaagacttgaacgcgggggtatgatattcatcgactacggttttgatgcagcgcagtattaccaccctcaacgcaatcaaggtactctgatcggacactaccgacatcacgttatccacaatccttttgacttcatcgggttggccgacctgaccgcgcatgtcaactttaccgacattgcccaagccgggacggatgccggattagatttgataggttaccttccccaatcccatttcttattgaacttgggcattaccgagctattggcacagacggggaaaacggattcggcagcctacatctgtgaagctgctgccgttcagaaactgattgaccagcatgaaatgggcgaactgtttaaagtcatcgcattcggaaaaaatatcggcatcgactgggcaggattccgcttcggcgacatctgccacaaactctaa

SEQ ID NO: 36899 - DNA, 618 bp, Neisseria meningitidis
atgtttacaggcattgttcaaggattgggaaaactgacggcaatccaccgcccgtcggaggcatttcacacttatgtcgtcgagcttccgcaagaggcggcggacaatctgcaacgcggcgcatcggtcgccaataacggctgctgcctgacgattaccgaaatcgaaggaaaccgcgtcagtttcgatttaatggcggaaactttggcaaaaaccaatttggggctgctgaaggaaggcgattgcgtcaacatcgaacgggcggcgcgtttcggagacgaaatcggcggacacgtcatgagcggacacattatggcaaccgtgcctattgtcgaaatcgaacgggacgggttcaaccgcacggtttggttttcgctcccgcatgaactcaaaccctatatcctgaccaaagggttcgtcggcttggacggttgcagcctgaccataggcaaagtcgaagacggccgtttcaatgtccatctgattcccgaaactttggaacggacgctgttcggcagcagaaaggtcggcgacaggatcaacatcgaaatcgatccgaatacgcaggcaatcgtcgataccgtcgaacggctgatggcgcaaagatatgcaaagtga

SEQ ID NO: 36900 - DNA, 825 bp, Neisseria meningitidis
atgaaatggctcttcacccttttggcggtactcaatattgccgtattcggcggcacggtgggctataaattggccgttaaagcgacgggcggcgtgccggaaaaccgggtcgtcgaaaacacaccccccgcaacgcccgccgccgacaatgcggcggcatccgtggaggatacggcggcactgctcaaaccgggcgacatcctgaccgaagagcaggccgagcagttgcgcttgaaaaaggaagcggaacagaaaaaactgagggagaaaaaacagcgtgaagaaaaagcccgccgcgaaaaactcgccgccgaaaaggcgcaggcggaacgcgaaaacggcgcggcggatgccttatgcgccgcgcaggcaagcctcacgatggacgaagatgactaccaccgcatcaaaggacttttgggcaaatggtcgcacgttgccagcaggagcgtcgaaaaacgcaccgccaaagccaaacctgccgacaaaacctaccgcgtcgtcctgcccgtttccgccgatgccgaaaatcaggcggcggagctgtctgccaaaggtttcaaccccataccgtttgacggcgcattgagtttgggtgtcggcaacagccgggaaaacgcccaagccctgcaaaaccggcttgccggcgccggattcggcggggcgcatattgtcgaacactttgccgaagccgacaggcaggacgattctttgagcgtgtcgcgtatgacggttttgtttaccggcgtgaatgccgccgatgcggacgaaattcgtaaaatcacgtccctatacggcaaactgaacctcaagtcttgcaaatag

SEQ ID NO: 36901 - DNA, 387 bp, Neisseria meningitidis
gtgagaaagattctgcttgatacccatgcgttgctgtggtggttgttggatgacaagaaactggggatatctgcacgcaaactgatagaaaatccgagaaatgcgatctttgtcagtgcagcaagtatttgggaaatttccatcaagcagaacaaggggttgttgaaattaccggaagagttttttgatgtgcttcaagaagaggattttgaaatgttgcctataggtctgtttcatgcaaaacaggctggaagccttccggagatacacaaagaccctttcgataggatgttgattgcacaaacccaagcggaaggctttgaactgatgactgtcgatgaatatattccgcagtatggaattagagttgtcaacgcatcaagctga

SEQ ID NO: 36902 - DNA, 645 bp, Neisseria meningitidis
atgactttaggtctggttggacgcaaagttggtatgacccgcgtgttcgacgaacagggtgtttctgttccggtaaccgttttggatatgtctgccaaccgcgttacacaagtaaaatccaaagatactgacggctatactgccgttcaagttacctttggtcagaaaaaagccaatcgtgtcaacaaagccgaagccgggcactttgcaaaagcaggtgttgaagccggtcgcggtttgattgagtttgctttgactgaagaaaaactggctgaattgaaagctggtgacgaaatcaccgtttctatgtttgaagtcggtcaactggtcgatgtaaccggtatctctaaaggtaaaggtttctccggcacgattaaacgtcataacttcggtgcccaacgtacttcccacggtaactcccgttctcaccgcgttccaggttctatcggtatggcgcaagacccgggtcgcgtgttccccggtaaacgcatggccggccaatacggcaacaccaaagcaactgttcaaaaattggaagttgtccgtgttgatgcagaacgccaactgctgttggttaagggtgctgttccgggtgcggtcaacagcgatgttgtagttcgtcccagcgtgaaagtaggtgcgtaa

SEQ ID NO: 36903 - DNA, 1005 bp, Neisseria meningitidis
gtgcgcggtgtgttcatgcagaactgggaagacgacgacaacgacgaatattgcagcatcaaacaggattcgttcgatgccatcgccgttgccgatattatcggcatcgatatcgacatcgttaatttcgccgcgcaatataaagacaaagtctttgcttattttcttcaggaatacagtgcggggcgcacgccgaatccggatgtgttgtgcaacgccgaaatcaaattcaaatgctttttggattacgccgtagggcagggcgcggataccatcgccaccggacactatgcgcgcaaagaagtccgcaacggcgtgcattacctgctcaaaggtttggatcgaaacaaagaccaaagctatttcctctaccgcctcaagcctttccaactcgagcgcgcgatttttccgttgggcggtttggaaaaacccgaagtgcgccgccttgccgccgaatttaatttgccgactgccgctaaaaaagacagcacgggcatctgtttcatcggcgaacgcccgtttcgcgagtttctgcagaaatacctgccgaccgacaatggtaaaatggttacgcccgaagggaaaaccgtcggcgaacacgtcgggctgatgttctacacgctcggacagcgcaaaggtttgggcattggcggcgcgggcgaaccgtggtttgttgcggctaaagatttgacgaaaaacgaactgattgtcgtgcaaggacacgaccatccgctgctttatacccgcagccttgtgatgaacgatttgagtttcacgctgcccgaacgcccgaaggcaggacgctatacctgcaaaacgcgttaccgtatggcggacgcgccttgtgagttgcgctatttggatgatgaaaccgccgagctggtgtttgacgaaccgcaatgggcggttacgccgggtcagtccgccgtgctgtacgacggcgatatctgtttgggcggcggtatcatccaaacgaccgacaaacccgtcatcatcacacgataa

SEQ ID NO: 36904 - DNA, 258 bp, Neisseria meningitidis
ttgcctcgccttgccgtactatttgtactgtctgcggcttcgtcgccttgtcctgatttaaatttaatccactatattttaatcgcttatgccgtcccggtcttggggtttttgcgcggcagcggctttgccggattgcccgcgacggtcatgccgtccgggatgtcgcacacgataaccgcccccgcgcccattcaacttccatcgtttccaaatggtgtcgaaaacgtagggcggaaagccgtttacgccccatga

SEQ ID NO: 36905 - DNA, 732 bp, Neisseria meningitidis
atggtaaaacttactgcacaacaaatatttgataagttgctgaatgaggaaagaatcttatcggctaatggtcaaattagatttttcttgggcgatgtggatattatcgtcaaacaaaaagatgttgtcggcaacatcattcaggaatggctcggcggatggttgagaaaaagggaaattgaatttgatgtttcaaccaatacccaaatgccccccgatttctttttaaataaaaaagaccgcagtagagaattgttggaagtaaaggcgttcaaccgaaatgccagcccgggttttgatattgcagattttaaaatgtattctgatgaaatcattcataaaccctatatgctggatgtagattatttaatattcggttacgatatggacgacaacggcaatgtaaccatcaaggatttatggcttaaaaaagtatggcaaattaccagaagtatggatggatgggcaattaatcttcaagtcaaaaaaggcgtggtgcataaaatccgcccgggtgtttggtacagcataaataaaaagaatatgccaatgtttgaatgcttggaagattttgtttccgcaattgaagaaaccgtttatcaaaacccggcaacacggcataacgcatccttatggaaaaggaaatttgaggaagcctataaaaaacactacaaccgatcgatttccataccccgttggcacgaaattgcacataaataccaaaagaaataa

SEQ ID NO: 36906 - DNA, 582 bp, Neisseria meningitidis
ttgccgtactatttgtactgtctgcggcttcgtcgccttgtcctgatttttgttaatccactatatctgcatcagtttcatgaaacgcaagtcggaagcgtcaaacaactgattgcccattttgaccggctgattgacgaattggacaaacaaatcgacgaccacacccacacgcattttgacggcaaagcccaagtggcggagcaaatcaaaggcatcggttcgataacgacggctacgctgatggcgatgctgcccgaattggggcggctgtcgcacaaacggatagcgagtttggccggcattgccccgcacccgagggagagcgaggaaaccaaattcaaaagccgctgctttggcggaaggtctgcggtgcgtaaggcactgtatatggctaccgtggcagcgacacgttttgaaccgcttattcgggatttctaccaacgcctgctgtccaagggtaagccgtataaggttgccgttacggcatgtatgcgcaaactgctgacgatatcgaatacccggatgcgtgattattttgccgaaaacgataccgccgaaaacggtatccaaacggcttga

SEQ ID NO: 36907 - DNA, 834 bp, Neisseria meningitidis
atggcaatcgttaaaatgaagccgacctctgcaggccgtcgcggcatggttcgcgtggtaacagaaggtttgcacaaaggtgcgccttatgcacctttgctcgaaaagaaaaattctactgctggtcgtaacagtaatggtcatatcaccacccgtcacaaaggcggcggtcataaacaccattaccgtgttgtagactttaaacgtaacaaagacggcattcctgccaaagtagagcgtatcgaatacgatcctaaccgtactgccttcatcgcactgttgtgctatgcagacggcgagcgtcgttacatcattgctcctcgcggtattcaagccggtgccgtattggtttccggtgctgaagctgccatcaaagtaggcaacaccctgccgattcgcaacattcccgttggtacgactatccactgtatcgaaatgaaacccggtaaaggtgctcaaatcgcacgttctgccggtgcttctgcggtattgctggctaaagaagccgcgtacgctcaagtccgcctgcgctctggcgaagtccgtaaaatcaacgtaaattgccgtgcgaccatcggtgaagttggtaacgaagagcaaagcctgaaaaaaatcggtaaagccggtgccaaccgttggcgcggtattcgtccgaccgtacgcggtgttgtcatgaatcctgtcgatcacccgcatggtggtggtgaaggccgtacgggcgaggcccgcgaaccggtcagcccatggggtactcctgctaaaggctaccgcactcgtaataacaaacgcacggataacatgattgttcgtcgccgttactcaaataaaggttaa

SEQ ID NO: 36908 - DNA, 279 bp, Neisseria meningitidis
atgtcccgaaacctgcttgtccgctggctcgccgtctgcctcatccccttggcgacgcttgccgttttcgccgccaatccgcccgaagacaaaccccagcatctgattaacggcatcatccttgcctgcgaagcgacgtttttgttcaaattcgtccttttcgacgccatcaagcatcatttgaaacaagagtttgatttgaaacgtcaaactatgttgctgtttgttccgattgttttgctggttgtgtatttgttccactatttcggcgcgttttag

SEQ ID NO: 36909 - DNA, 1248 bp, Neisseria meningitidis
atgcaacttaccgctgtcggactcaatcatcaaaccgcacctttaagcatacgggaaaagctggcgtttgccgcggcctgcctgcccgaagccgtccgcaatcttgcccgaagcaatgcggcaacggaggcggtaatcctttctacctgcaaccgcaccgagctttactgtgtaggcgattcggaagaaatcatccgttggctcgcagactatcacagccttcccatagaagaaatcagcccctacctttatactttggggatgcaggagactgtgcgccatgctttccgcgtcgcctgcggcttggattcgatggtgttgggcgagccgcagattttaggacagattaaggatgcggtcagggttgctcaagagcaggaaagtatgggtaagaaactcaatgccctgttccaaaaaaccttttccgttgctaaagagatccgtaccgataccgctgtcggcgagaactcggtttccatggcttccgcttccgtcaagttggcagagcagattttccccgacatcggcgatttgaatgtcttgtttatcggtgcgggtgagatgattgagctggttgccacttattttgccgccaaaagtccccggctgatgacggttgccaaccggacgctggcgcgtgcacaggagttgtgcgacaagctcggtgtcaacgccgaaccgtgcctgctgtccgatctgcctgccattttgcatgagtacgacgtggtggtttcttcaacggcaagccagttgcccattgtcggcaaaggtatggtggagcgcgcattgaaacaaaggcagagtatgccgttgtttatgcttgacttggccgtgccgcgagacattgaggcggaagtcggagatttgaacgatgcctatctttatacggtggacgatatggtcaatatcgtccaaagcggcaaggaggcaaggcagaaggccgccgccgccgccgaaacgctggtgtccgagaaggttgccgaatttgtcaggcagcagcagggcaggcagagtgtcccgttaatcagggcattgagggatgagggagagaaagcgcgcaaacaggtcttggaaaatgcgatgaaacagcttgccaaaggcgcaacggcagaagaggttttggaaaggctgtcgatccaactgaccaacaagctgctgcattcgccgacccaaactttgaataaggcgggggaagaagataaagatttggttcatgccgtcgcgcagatttatcatttggacaaataa

SEQ ID NO: 36910 - DNA, 837 bp, Neisseria meningitidis
atgatagacctgcactgccattccaccgtttccgacggtatgctttcccccgccgaagtcgtgcgcctcgcgcatcaaaacggctgcacgctgctggcgttgaccgaccatgaccacaccggcggcatcgccgaagcgcgtgccgaagccgacaggctcgatttgcgcctgattaacggtgtggaaatctccgtaacgtggcgcgggcgtaccatacacgttgtcggtttggatttcgacgagcaggacgaaaacctgcaaaacttgttggcgcaagtgcggcaaggccgtctgaaacgtcttgaagccatcgccgccaagctcgaaaagaaaggcatcggcggcgcatacgacggcgcgctggcactggcggcaaacaaagaaatggtcagccgcacccacgtcgccgagttcctcatccaagcgggacacgtcaaaaacaagcagcaggcgttcaccaaatacttgggtgacggcaaatcctgcgccgtccgacacgaatgggcgacgctggaagactgcgtatccgccgtcaacggcgcgggcggcatggcagtcatcgcccaccccatgcgctacgatttgtccgccaccgccaagcgcaatctgtttgaagaatttaaaaaactcggcggcgcgggtatcgaagtccacagcggaaactgttgcaaaaacgaccgcctcaactacgcgcttttggcagaacgcttcggcatgctcgccagcgcgggcagcgacttccaccgtttaaacgacttcggcggcggcattctcggcgcgtgtcccgagctgccggaaaactgtaggccggtgtgggcgcatttttcccgacattga

SEQ ID NO: 36911 - DNA, 276 bp, Neisseria meningitidis
atgaacgcgttaaattggagcctttacctgatattgtgtgaaaacagcgcgttctattgcggcatcagcccgaatccgcaacagcggcttgccgcccacacaaccggtaaaggcgcgaaatatacccgcgtattcaaaccggtggcgatgcgtatcgttgcaggcgggatggataaaggcacggcactcaggcaggaaatcgccgtcaaaaaactgaccgccgcacaaaaacggcaattgtgggaacaggcggaaaaaatgccgtctgaaacctga

SEQ ID NO: 36912 - DNA, 348 bp, Neisseria meningitidis
atgcgcctaaaccacaaacagggcgaggcaggggaagatgccgcgcttgccttcctccaatcccaaggctgcacactgcttgcccgcaactggcactgcgcctacggcgaaatcgacctgattgtcaaaaacggcggtatgattctgtttgttgaagtaaaataccgcaaaaatcggcaattcggcggtgtcgcatacagcatttccccatccaaattattgaaactgcaacgaagtgtagagtattatctgcaacagaacaggctgacaaacgtaccgtgccgcctcgatgcggtactgattgaaggaaaccgcccgcccgagtggatacagaatattacaggttga

SEQ ID NO: 36913 - DNA, 174 bp, Neisseria meningitidis
ttgttgccaattatccgaaagaaagttaagcctgatggcattgtatacacggatacctttcgtagttatgatgtgcttgatattagtgaatttagccatttacgtaagtttaacggcattcccaaagagcatttggggctgcatttaaagaaatgccaatggcattttaaatag

SEQ ID NO: 36914 - DNA, 1392 bp, Neisseria meningitidis
atgagcggtcatatgggaaaaggggcggatgcgcctgatttggtgtacggtttggaggataggccgccgttcggtaatgcgctgttgagcgcggttacccatcttttggcgattttcgtgccgatgattacgcccgcgctgattgtgggcggcgcgctggaactgccggtggagatgacggcgtatctcgtgtcgatggcgatggttgcgtcgggtgtcggcacttatttgcaggtcaaccgcttcgggccggtcggttcggggatgctgtccatccagtcggtgaatttctcgttcgttaccgtcatgattgcgctgggcgcggggatgaaagagggcggtttgactaaggatgcgatgatttcgacgctcttgggcgtatcgtttgtcggcgcgtttttggtgtgtttctcggcgtggcttctgccgtatttgaaaaaagtgattacgccgacggtcagcggcgtggtcgtgatgctcattggtttgagtttggtacacgtcggcattaccgatttcggcggcggcttcggcgcgaaggcggacggcacgttcggctcgatggaaaacttggggctggcttcgctggtgttgctgattgtgttggtgttcaactgcatgaaaaacccgctgttgcgcatgagcggcattgcggtcgggctgattgccggctatatcgtcgcgctgtttttgggcaaggtggatttttccgcgctgcaaaacctgccgctggttacgctgcccgtaccgtttaaatacggttttgctttcgactggcacgcgtttattgtggcgggcgcgattttcttgttgagcgtgtttgaggcggtcggcgatttaaccgcgacggcaatggtgtccgaccagccgattgaaggcgaggaatacaccaaacgcctgcgcggcggcgtgttggctgacggcttggtgtcggtgattgcgacggctttgggttcgctgccgctgacgacgtttgcgcaaaacaacggcgtgattcagatgaccggcgtggcttcgcgccatgtgggcaaatatattgccgtgattttggtgctgttgggtctgttccccgttgtcggacgcgcgtttacgacgattccgagtccggtgttgggcggcgcgatggttttgatgttcggcttgattgcgattgcgggcgtgcggattttggtcagtcacggcatccgcaggcgcgaagcggtaattgcggcaacgtcggtcggtttgggcttgggtgtcgcgtttgagccggaagtgtttaaaaacctgcccgtcttgttccaaaactctatttccgccggcggcattacggcagtcttgctgaatttggtcttgcccgaagataaaaccgaggcggcggtcaagtttgataccgaccacttggaacactga

SEQ ID NO: 36915 - DNA, 291 bp, Neisseria meningitidis
ttgccgagcgataaagaagcgcggacagggtgcttatctttgcctgccaataacggtataattcgggcgttatcaccgccttttaccggtataaacatcagactttttgccgccttgggtctcctgtccctttccggcgcggcggcgcaagcctccgtataccattgcaactcaaatggcaaaagcgtatatacatcagccccagcaggatcgtgcgccgatgcggatttacctaaaatcagcagccatcagggaggcggataccgcctgaaaattaaaaaactcagttaa

SEQ ID NO: 36916 - DNA, 288 bp, Neisseria meningitidis
atgaagattgaatttgactccgaaaaaaatcaacgcaatatcgaagagcggaatttgccctttgaatcagtcgggcaaatacgctggacaacggccgttattgtgcccgatgtctgctttgattaccccgaaccgcgttatgttgccgctgcttatctaggcgatacgcaacgcctgcacattgtctgttttacgccgataaaagacggcatccgtgtcatcagttttcgcaaagcgaataaaagagaggttaaaaaatatgcaacgtcaatccttaacaaacgctga

SEQ ID NO: 36917 - DNA, 1569 bp, Neisseria meningitidis
atgagtcaaaccgatacgcaacgggacggacgatttttacgcacagtcgaatggctgggcaatatgttgccgcacccggttacgctttttattattttcattgtgttattgctgattgcctctgccgccggtgcgtatttcgaactatccgtccccgatccgcgccctgttggtgcgaaaggacgtgccgatgacggtttgattcacgttgtcagcctgctcgatgctgacggtttgatcaaaatcctgacgcataccgttaaaaatttcaccggtttcgcgccgttgggaacggtgttggtttctttattgggcgtggggattgcggaaaaatcgggcttgatttccgcattaatgcgcttattgctcacaaaatctccacgcaaactcactacttttatggttgtttttacagggattttatctaataccgcttctgaattgggctatgtcgtcctaatccctttgtccgccatcatctttcattccctcggccgccatccgcttgccggtctggctgcggctttcgccggcgtttcgggcggttattcggccaatctgttcttaggcacaatcgatccgctcttggcaggcatcacccaacaggcggcgcaaatcatccatcccgactacgtcgtaggccctgaagccaactggttttttatggtagccagtacgtttgtgattgctttgattggttattttgttactgaaaaaatcgtcgaaccgcaattgggcccttatcaatcagatttgtcacaagaagaaaaagacattcgacattccaatgaaatcacgcctttggaatataaaggattaatttgggctggcgtggtgtttgttgccttatccgccctattggcttggagcatcgtccctgccgacggtattttgcgtcatcctgaaacaggattggtttccggttcgccgtttttaaaatcaattgttgtttttattttcttgttgtttgcactgccgggcattgtttatggccgggtaacccgaagtttgcgcggcgaacaggaagtcgttaatgcgatggccgaatcgatgagtactctggggctttatttggtcatcatcttttttgccgcacagtttgtcgcattttttaattggacgaatattgggcaatatattgccgttaaaggggcgacgttcttaaaagaagtcggcttgggcggcagcgtgttgtttatcggttttattttaatttgtgcttttatcaatctgatgataggctccgcctccgcgcaatgggcggtaactgcgccgattttcgtccctatgctgatgttggccggctacgcgcccgaagtcattcaagccgcttaccgcatcggtgattccgttaccaatattattacgccgatgatgagttatttcgggctgattatggcgacggtgatcaaatacaaaaaagatgcgggcgtgggtacgctgatttctatgatgttgccgtattccgctttcttcttgattgcgtggattgccttattctgcatttgggtatttgttttgggcctgcccgtcggtcccggcgcgcccacattctatcccgcaccttaa

SEQ ID NO: 36918 - DNA, 1299 bp, Neisseria meningitidis
gtgctaaattccacgtttattctcctgattgagacggttgtcggtagttttcggacggcctttcgctcaaaagaccgtctgaagacggctggcacgattgtaccccatttgaagcaccgtctgaaaccttgcgcggacaatccgcctgcgccgaaccgcttaccgccccctgaccgcgattctatgatttatcaaagaaacctcatcaaagaactctcttttaccgccgtcggcattttcgtcgtcctcttggcggtattggtctccacgcaggcaatcaacctgctcggccgtgccgccgacgggcgtgtcgccatcgatgccgtgttggcattggtcggcttctgggtcatcggtatgacgccgcttttgctggtgttgaccgcatttatcagtacattgaccgtgttgacccgctactggcgcgacagcgaaatgtcggtctggctatcctgcggattggcattgaaacaatggatacgcccggtgatgcagtttgccgtgccgtttgccgttttggttgccgtcatgcagctttgggtgataccgtgggcagagctacgcagccgcgaatacgctgaaatcctgaagcagaagcaggaattgtctttggtggaggcaggcgggttcaacagtttgggcaagcgcaacggcagggtttattttgtcgaaaccttcgataccgaatccggcatcatgaaaaacctgttcctgcgcgaacaggacaaaaacggcggcgacaacatcatcttcgccaaagaaggtaacttctcgctgaacgacaacaaacgcacgctcgaattgcgccacggctaccgttacagcggcacgcctggacgcgccgactacaatcaggtttccttccaaaaactcaacctgattatcagcaccacgccaaaactcatcgaccccgtttcccaccgccgtaccattccgaccgcccaactgattggcagcagcaacccgcaacatcaggcggaattgatgtggcgcatctcgctgaccgtcagcgtcctcctactctgcctgcttgccgtgccgctttcctatttcaacccgcgcagcggacatacctacaatatcttgattgccatcggtttgtttttaatttaccaaaacgggctgaccctgctttttgaagccgtggaagacggcaaaatccatttttggctcggactgctgcctatgcacatcatcatgttcgtcatcgcaatcgtacttctgcgcgtccgcagcatgcccagccagcccttctggcaggcggttggcaaaagtctgacattgaaaggcggaaaatga

SEQ ID NO: 36919 - DNA, 465 bp, Neisseria meningitidis
atggcaatttggaattatcggtactaccttatcccatcagctgctatcagaaataaatttaatgcaaataaagatatcatacttgatgagtatcgatctaatggttttcagaattttaatgagaataaaagttttgaaaattactttatcgataatgatgttatattattatcaataataaatgaagcaaaaaaacagcttaaattgaaagaatcttgggataaagacgcaatcatgttttgtgataattttggtaatagtcttaccgtttggccagatgatatagagtgcgaacttgatttaagatttgattatactaaatttattcagaaaaccattgattgggcaataaaatataattgtctacttgtaatagaaaaaacaggaaatgtagtttcccctaatataaataatctgatgtatgaaataaaagcatatttggaaagcaagccgtggcccatatga

SEQ ID NO: 36920 - DNA, 1218 bp, Neisseria meningitidis
atgcaacgtcgtattataaccctgctctgcgcggcaggtatggcattctcaacacaaactttggcggcaaatttggaggtgcgcccgaacgcgccggaacgctacacggtcaaacagggcgacaccctgtggggcatttcgggcaaatacctgtacagcccgtggcaatggggccgcctgtgggacgcgaaccgggatcaaatccacaatcccgacctgatttatccggaccaggtattggtgttgcgccacgttgacggcgaaccgcgcctcggcttggaacagacagacggcatccccgtcgtcaaaatgagtccagataaggaagtgtccggatacggtattcccgccatcgatgtcaacttctaccgcatctttatgcggcacccgcaaatcgtttcccgcaaagaaaccgctgccgcgccgcgcctgctctcgggcccggaaggcaggctgctgtacaccaaaggcaccagggtttacaccaaaggcctgaaagagccgggccgctacctgacctaccgaatcaataaaaacatcaccgatccggatacgggtaaattcctcgggcgggaagtcgcattcagcggcatcgtgcgctccctcgactataccgactctgtcctcgaacaacgctcgaaacaggctggagaacggccgaaagacaacgaataccatacccgcatccatcctttgattaccccgctgcgcaccccttcgatacagccgctggtggtcgaaaccgccatttccgaaatacagcagggcgactacctgatgaaaatgccggaagacaccgaccgcttcaacatgatgccgcacgaaccgtcccgcccggttcaggctaaaatcgtttccgtgttcgaaggtacaaggattgccggccagtttcaaaccatcaccatcgacaaaggcgaggcggacggtttggacaaaggcacggttttgagcctctacaaacgcaagaaaacgatgcaggtcgacctctccaacaatttcaaaagcagggataccgtcgaactgatttccactcctgccgaagaagtgggcttggcaatggtttaccgcacctccgaacacctgtcgtccgccatcattttggaaaacatctccgatatttccgtaggcgacaccgccgccaatccgggacgcgatttggacaatataccggatcagggccgcagccgcgtgaagtttggcttcaaccgctccgaataa

SEQ ID NO: 36921 - DNA, 501 bp, Neisseria meningitidis
atggcggatttgcagaaaacttttcaaacttcgttccgtgatgcgatggcatcctgtgcggcaggcgttcatgtcatcacgacagacggtgcggcagggcgttacggcattacaatgacggcggttgcgccggtaacggacgagccgccgaccgtgatgctgtgcatcaaccggagtgcgcgaatcattccgatcctgtcggaaaacggcagcctctgcatcaatacgctggcggacgaacatcaggatgttgccgaacattttgccgggctgaccgggctgtcgcccgaagagcggtttgcctaccacatctggcatcgcggcaaaacgggacaacttgaaatagagggcgcgttggcgcacctgcacgggcatattgtcggcaaacatgaaatcggcacgcattttgtgttttacgtcaggctcgacgaaatcaaaaactgcgggtgcaaacgccccgcgctgctgtatttcagacggcagtttagatttttagactga

SEQ ID NO: 36922 - DNA, 660 bp, Neisseria meningitidis
atgaaaaccgccattttgattgacggtgcattttttattaagcgggtacggtcattaggcctgtctcaaaatccacacgatgcaaaaagaattgctgatttggctttccgatattcgatgctgcatctgaaagataaaatcaacggcacagatcaaatggatgatttatatagaattttcttttacgactgcgtgccgtttgaaaagaaaatgcacaatcccgtatctcatcgtgccatagatttttcaaagactccggaagccatatttcgtcgcaatctgcataccgaattgaagaagaagcgtaaattagcgttacgtttaggcaagttgtcggacaatacagcatggatattaaaaccccaagtcatgaaaaatcttctgaaaaacccgtcaactcaaattacggaaaacgatgtcgtgctcgatgttaaacaaaaaggtgtagatatgcgtataggcttggatatttcatctattaccttaaaaaaacaagccgataaaatcatcttgttttctggtgattccgattttgtcccagcagccaaattagccagacgggaaggtatcgattttattcttgatcctatgtggaatcatgtcccacctgacttaatggaacacatcgacggattgaagacaaaatgtccgaaaccgtaa

SEQ ID NO: 36923 - DNA, 915 bp, Neisseria meningitidis
atgaaacaccccaaactcacccttatcgccgcattgctgaccactgccgcaactgccgcccccctgccagttgtaaccagcttcagcattttaggcgacgtagccaaacaaatcggcggagagcgcgtatccatacaaagtttggtcggagccaaccaagatacgcacgcctatcacatgaccagtggcgacattaaaaaaatccgcagtgcaaaactcgtcctgctcaacggcttaggacttgaagctgccgatgtacaacgtgccgtcaaacagagcaaagtatcctatgccgaagcgaccaaaggcatccaacccctcaaagccgaagaagaaggcggacaccatcacgaccacgatcatgaccacgaaggacaccaccatgaccacggcgaatatgacccccacgtctggaacgaccccgtccttatgtccgcctatgcccaaaacgttgccgaagccctgataaaggccgatcccgaaggcaaagtttattatcaacaacgcttgggcaactaccaaatgcagctcaaaaaactgcacagcgacgcacaagccgcatttaatgccgtccctgctgccaaacgcaaagtcctgaccgggcacgatgccttttcctatatgggcaaacgttaccatatcgaattcatcgccccgcaaggcgtgagcagcgaagccgagccttcggccaaacaagtcgccgccatcatccgccaaatcaaacgcgaaggcatcaaagccgtatttaccgaaaacatcaaagacacccgtatggttgaccgcatcgccaaagaaaccggcgtcaacgtcagcggcaaactgtattccgacgcactcggcaacgcgcccgcagacacctacatcggaatgtaccgccacaacatcaaagccttgaccaacgcgatgaagcaataa

SEQ ID NO: 36924 - DNA, 579 bp, Neisseria meningitidis
atgagcgaacagacacagcagcaaaacagtgaagaagcggttgaaaatgtggaggcggtggaaaccgtcgagacagtaggaaatgcggacggtgtgcaggaacaggctgccgcagagccggcttatgaggatttgcaggcgcggattgccgagctggaagcgcagttgaaagacgagcagctgcgcgctttggcaaacgagcaaaacctgcgccgccgccaccagcaggaaattgcggatacgcacaagttcgccggacagaagtttgccgtggaaatgctgccggtcaaggattatctggaaatggcgcttttggatcagagcggcaatttcgatgcgctgaaaatgggcgtgcagatgactttgaacgagttgcagaaagcatttgatgctacgcaaatcaaggaaatcaatcctaaagcgggcgataagctcgatccgaatatccatcaggcgatgcaggcggtggcaagcgaacaggaacccaataccgtggtgggcgtgatgaagaagggttatacgctgtccgaccgcgtgttgcgcccggctatggttacggtggcacagaaggaagcctga

SEQ ID NO: 36925 - DNA, 1191 bp, Neisseria meningitidis
atgaaccccaaacacctcatcgcattttccgccctgttcgccgccacgcaggcagaagccctgcccgtcgcctccgtcagcctcgacaccgttaccgtttccccatccgctccctacaccgatacaaacgggctcttgaccgactacggcaacgccgccgcctcgccttggatgaaaaaactccgatccgtcgcacaaggcagcggcgagaccttccgcatcctgcaaatcggcgactcgcacaccgccggcgacttctttaccgacagcctgcgcaaacgcctgcaaaaaacttggggcgacggcggcataggctgggtttaccccgccaacgtcaaagggcagcgtatggcggccgtccgctataacggcaactggcaaagcctcaacagtcgaagtgccgcagcagacttcccgctcggcggcatcctcgcccacaccggcagcggcggcagcatgaccctgaccgcatcggacggcaagaccggcaaacagcgcatttccctgtttgccaaacccctgctcgccgaacaaaccctgaccgtcaacggcaacaccgtctccgccaacggcggcggctggcaggtactggatacccgcgcggcactgcccttgaccatacagaccgaaatgccgtgggacatcggcttcatcaacatcgaaaatcccgccggcggcattaccgtttccgccatgggcatcaacggcgcacaattgacccattggtcgaaatggcgtgccgaccgtatgaacgaccttgcccaaaccggcgccgatttggttatcctttcctacggcaccaacgaagccttcggcgacaacatcgacattgccgacaccgaacaaaaatggctggataccgtccgccaaatccgcgacagcctgcctgccgccggcatcctcatcatcggcgcacccgaatccctgaaaaacacgctcggcgtatgcggcacacgccccgtccgcctgaccgaagtccaacagatgcagcggcgcgtcgcccgacagggacaaaccatgttctggtcttggcaaaacgccatgggcggcatatgcagcatgaaaaactggctcaaccaaggatgggccgccaaagacggcgtacacttctccgccaaaggctaccggcgcgcggcggaaatgctcgccgacagcctcgaagaactcgtccgcgccgccgcgaaacggtaa

SEQ ID NO: 36926 - DNA, 1446 bp, Neisseria meningitidis
atgacccaatacacattgaaacaggcaagcgtcctgttgcagtccaaacagatttccgccgtcgaactggcaagcgcataccttgccgccattgccgaaaaaaatcccgccctcaacggctatatcaccatcgaccaagataaaacccttgcagaagcccgcgccgccgacgaacgtatcgctcagggcaacgcttcggcacttaccggcatacccgtcgcctacaaggatattttctgccaaaccggctggcgcagcgcgtgcgcttccaaaatgctcgacaacttcatctcctcctacaccgccaccgtcgtccaaaacctgctcgacgaaggtatggtaacgctcggccgcaccaatatggatgagttcgctatgggttcgaccaatgaaaactcattctacggcgcgaccaaaaacccgtggaatcccgaacacgtccccggcggttcgtccggcggttcggcagccgtcgttgccgcccgccttgctcctgccgcgctcggttcggacacgggcggctctatccgccaacccgcatcgcactgcggtattaccggtatcaaacctacctacggcacggtttcccgcttcggtatggtcgcctacgcctccagcttcgatcaagccggcccgatggcgcaaactgccgaagactgcgcgattctgttaaacgcgatggcaggtttcgaccccaaagactccaccagcctcgagcgcgaaaaagaagactacacccgcgatttgaaccaaccgctcaaaggtttgaaaatcggcctgcccaaagaatatttcggcgaaggtaacagcgccgatgttctgacggcattgcaaaacaccattgatttgctgaaagcccaaggcgcggaattgattgaagtttccctgccgcaaaccaagctgtccatccccgcctactacgtcctcgcctccgcagaagccagcaccaacctttcacgttacgacggcgtacgttacggacaccgtgccgcccaattcggcgatttggaagaaatgtacggcaaaacccgcgccgaaggtttcggcagcgaagtcaaacgccgcatcatgatcggcacttatgtactgtcgcacggctactacgatgcctactatctcaaagcccaaaaactgcgccgcctcgttgccgatgattttcagacggtatttgcacggtgcgacctcatcctcgcgccgaccgcacccactgcagccccaaaaatcggagcggattcttcgccggttgaaacctacttgagcgatatctacaccatcgccgtcaacctcgccggactacccgcattgaccctgcctgcaggtttcagcggcggcggactgcccgtcggtgttcagcttatcggcaactacttcgccgaagccagaatactcggtgcggcgcatcaaatccaactcaacagcgattggcacggcaaacgacccgaatga

SEQ ID NO: 36927 - DNA, 846 bp, Neisseria meningitidis
ttgtgtttcagtgcggatatgcttttgaaggacaggcatttttttgcagatgtcaaacctgaagacttggcttggaaggttttggccgtcaatatttcagatatggcggcgatgggcgcgataccgcgttgggtgctgctgagcgcggcgttgcccgaattggatgaagtatggctggaacggttttgcggcagctttttcggtttggcaaaaaagtttggcgtaacgttaatcggcggagatacgaccaagggcgatatggcgttcaatgtaaccattatcggcgaattgccgaagggtagggcattgcggcgtgatgcggcggttgcgggtgacgatatttgggtgtcggggcgtgtcggtatggcggcggcggctttgaactgccgtctgaaacggtgtgtgttgccggatgatgtgtttgccgaatgcgaacaaaagctgctccgccccgagccaagggttgggctggggcttgcgctgttgccgtttgcccgggcggcgcaggatgtttcagacggcctcgcgcaagatttggggcatatcctgaccgcttccggcgtgggggcggaaatttgggccgattcgctgccgtctttatccgtattgaaagatattttgccccgagcgcaatggctgtcttatactttggcgggcggcgacgattacgagctggtgtttaccgcgccggaaagttgccgcagccgcgtgcttgatgcggcagaacggtgcggcgtgccggtaacgcgcatcggcaaaatcaacggaggatgccgtctgaaggttttagatgctgacggcagggaattggaactacattctttaggattcgatcattttggctga

SEQ ID NO: 36928 - DNA, 462 bp, Neisseria meningitidis
atgaccgaagtcatcgcctacctcatcgaacatttccaagatttcgatacctgtccgccgcccgaagacttgggtatgctgcttgaagaagcgggtttcgatacgatggaaatcggcaacaccctgatgatgatggaagtattgctcaacagctccgaattttccgccgaacccgccgacagcggcgcattgcgcgtgtacagcaaagaagaaaccgacaacctgccgcaggaagtgatggggctgatgcagtatctgattgaagaaaaagccgtcagctgcgaacagcgggaaatcatcatccacgcgctcatgcacattccgggcgacgaaattaccgtagataccgccaaagtgctgaccctgctgcttttatgggcaaacaagagcgagctgcccgtgttggtcggcgacgagctgatgagcgcgcttttactcgacaacaaacccacgatgaactga

SEQ ID NO: 36929 - DNA, 870 bp, Neisseria meningitidis
atgtttatgaacaaattttcccaatccggaaaaggtctgtccggttttttcttcggtttgatactggcgacggtcattattgccggtattttgttttatctgaaccagagcggtcaaaatgcgttcaaaatcccggcttcgtcgaagcagcctgcagaaacggaaatcctgaaaccgaaaaaccagcctaaggaagacatccaacctgaaccggccgatcaaaacgccttgtccgaaccggatgctgcgaaagaggcagagcagtcggatgcggaaaaagctgccgacaagcagcccgttgccgacaaagccgacgaggttgaggaaaaggcggacgagccggagcgggaaaagtcggacggacaggcagtgcgcaagaaagcactgacggaagagcgtgaacaaaccgtcggggaaaaagcgcagaagaaagatgccgaaacggttaaaaaacaagcggtaaaaccatctaaagaaacagagaaaaaagcttcaaaagaagagaaaaaggcggagaaggaaaaagttgcacccaaaccgaccccggaacaaatcctcaacagcggcagcatcgaaaaagcgcgcagtgccgctgccaaagaagtgcagaaaatgaaaacgcccgacaaggcggaagcaacgcattatctgcaaatgggcgcgtatgccgaccgccggagcgcggaaggacagcgtgccaaactggcaatcttgggcatatcttccaaggtggtcggttatcaggcgggacataaaacgctttaccgggtgcaaagcggcaatatgtctgccgatgcggtgaaaaaaatgcaggacgagttgaaaaaacatgaagtcgccagcctgatccgttctatcgaaagcaaataa

SEQ ID NO: 36930 - DNA, 279 bp, Neisseria meningitidis
atggctcgttcattgaaaaaaggcccatatgtagacctgcatttgctgaaaaaagtagatgctgctcgcgcaagcaacgacaaacgcccgattaaaacctggtctcgtcgttctaccattctgcctgattttatcggtctgaccattgctgtgcacaacggccgcacccatgtgcctgtgtttatcagcgacaatatggttggtcataaattaggcgaattctcattgacccgtacctttaaaggccacttggccgataaaaaggctaaaaagaaataa

SEQ ID NO: 36931 - DNA, 450 bp, Neisseria meningitidis
atgagccttatcggcgaaattttgcctttgtcccatattgttttggatatggaggtgggcagtaaaaaaaggctgtttgaggaagcgggcctgcttttggaacgcgaatcctcattgtcccatgctgatgttttcgaatgtctttttgcccgtgaaaaactcggttcgaccggtttggggcagggcgttgccatcccgcacggccgtcatgccggcgtgaagcaggcgacgggcgcgttcatccgcacgcgcgaacccgtcggatttgacgcaccggacggcaagccggtttccctgatttttatcttgctggttcctgagaatgcaacgggcgagcatttggaggtattgtccaaactggccggcaagttttcccaaaaaagcatccgcgaatcgctgatgacggtttcttctgcggaagaagcccgcgccatcctgaccgaagaataa

SEQ ID NO: 36932 - DNA, 597 bp, Neisseria meningitidis
atgaatatcaatacttccgaaaataaagatgctgttgccgaacacaccggacaatggttggaaaaagccgtcatcggtctgaacctgtgtccctttgccaaagccccccacgttaaaaaccttgtccgcatcgcgatcagcgaagccaaacaccttgacggttttttggaagacttggacgaagaactgcagcgactgggcaatacacccgccaccgaactggaaactaccctgctggttcacccaaccctattccccgatttcgacgtattcaacgatatgctcgacattgccgatgccgccgttgtcgaaaacggcttggaaggcatcgtccaaatcgccccgtttcatcccgatttccaatttgaaggcacggattcagacgacatcggcaactacaccaaccgttctccctatccgacgctgcacctcatccgagaagacagcattgccaaagccgcacaagcctttcccgacgcttcggcaatattcgaacgcaatatcgccctgctggaaaaaatgggacatgaaggctgggcaaaactcggtatcacatcctgcccttatccgcacaataagaaaaatatttcaaaatga

SEQ ID NO: 36933 - DNA, 1101 bp, Neisseria meningitidis
atgacccgtatcgccatcctcggcggcggcctctcgggaaggctgaccgcactgcagcttgcagaacaaggttatcagattgcacttttcgataaaggctgccgccggggcgaacacgccgccgcctatgttgccgccgccatgctcgcgcctgcggcggaagcggtcgaagccacgcctgaagtcatcaaactgggcaggcagagcatcccgctttggcgcaacatcagaggccgtctgaaaacgcctgccatgatgcaggaaaacggcagcctgattgtgtggcacgggcaggacaaacctttatccaacgagttcgtccgccatctcaaacgcggcggcgtagcggatgacgaaatcgtccgttggcgcgccgacgacatcgccgaacgcgaaccgcaactcggcggacgtttttcagacggcatctacctgccgaccgaaggccagctcgacgggcggcaaatattgtctgcacttgccgacgctttggacgaactgaacgtcccctgccattgggaacacgaatgcgtccccgaaggcctgcaagcccaatacgactggctgatcgactgccgcggctacggcgcaaaaaccgcgtggaaccaagcccccgagcacaccagcaccctgcgcggcatacgcggcgaagtggcgcgggtttacacacccgaaatcacgctcaaccgccccgtgcgtctgctccatccgcgttatccgctctacatcgccccgaaagaaaaccacgtcttcgtcatcggcgcgacccaaatcgaaagcgaaagccaagcccccgccagcgtgcgttcagggttggaactcttgtccgcactctatgccgtccaccccgccttcggcgaagccgacatcctcgaaatcgccaccggcctgcgccccacgctcaaccaccacaaccccgaaatccgttacaaccgcgcccgacgcctgattgaaatcaacggccttttccgccacggtttcatgatctcccccgccgtaaccgccgccgccgtcagattggcagtggcactgtttgacggaaaagacgcgcccgaacgcgatgaagaaagcggtttggcgtatatccgaagacaagattaa

SEQ ID NO: 36934 - DNA, 1215 bp, Neisseria meningitidis
atggaatgggaattcaacagttattacacactgattgccgccacgctcgtgttgctggttggtaaatttctggttcaaaaaatcaaattcttacgagacttcaatattcccgagccggtcgctggcggtttggttgccgcgattatcctgtttgcgctgcacgaggcgtacggcgtgagcttcaaatttgagaaaccgctgcaaaatgcgtttatgctgattttcttcacgtccatcggcttgagcgcggatttttcccgtttgaaggcgggcggtttgccgctggtggtttttaccgcgattgtgggcggatttatcttggtgcaaaactttgtcggggtcggactggctacggctttgggtttggacccgctcatcggtctgattaccggttcggtgtcgctgacgggcggacacggtacgtcaggtgcgtggggacctaattttgaaacgcaatacggcttggtcggcgcaaccggtttgggtattgcatcggctactttcgggctggtgttcggcggcctgatcggcgggccggttgcgcgccgcctgatcaacaaaatgggccgcaaaccggttgaaaacaaaaaacaggatcaggacgacaacgcggacgacgtgttcgagcaggcaaaacgcacccgcctgattacggcggaatctgccgttgaaacgcttgccatgtttgccgcgtgtttggcgtttgccgagattatggacggcttcgacaaagaatatctgttcgacctgcccaaattcgtgtggtgtctgtttggcggcgtggtcatccgcaacatcctcactgccgcattcaaggtcaatatgttcgaccgcgccatcgatgtgttcggcaatgcttcgctttcgcttttcttggcaatggcgttgctgaatttgaaactgtgggagctgaccggtttggcggggcctgtaaccgtgattcttgccgtacaaaccgtggtgatggttttgtacgcgacttttgttacctatgtctttatggggcgcgactatgatgcggcagtattggctgccggccattgcggtttcggcttgggtgcaacgccgacggcggtggcaaatatgcagtccgtcacgcatactttcggcgcgtcgcataaggcgtttttgattgtgcctatggtcggcgcgttcttcgtcgatttgattaatgccgcgattctcaccggttttgtgaatttctttaaaggctga

SEQ ID NO: 36935 - DNA, 693 bp, Neisseria meningitidis
atgaccgcctttgtccacaccctttcagacggcatggaactgaccgtcgaaatcaagcgccgtgccaagaaaaacctgattatccgccccgccggcacacataccgtccgcatcagcgtcccaccctgcttctccgtctccgctctaaaccgctggctgtatgaaaacgaagccgtcctgcggcaaacactggcgaaaacaccgccgccgcaaactgccgaaaaccggctgcccgaatccatcctcttccacggcagacagcttgcccttaccgcccatcaagacacgcaaatcctgctgatgccgtctgaaatccgtgttcccgaaggcgcacccgaaaaacagcttgcgctgctgcgggactttttggaacggcaggcgcacagttacctgattccccgcctcgaacgccacgcccgcaccacacaactgttccccgcctcctcctcgctaacctctgccaaaaccttctggggcgtgtgccacaaaaccacaggcatacgcttcaactggcggctggtcggcgcaccggaatacgttgccgactatgtctgcatacacgaactctgccacctcgcccatccagaccacagccccgccttttgggaactgacccgccgcttcgccccctacacgcccaaagcgaaacagtggctcaaaatccacggcagggaacttttcgccttaggctga

SEQ ID NO: 36936 - DNA, 1107 bp, Neisseria meningitidis
atgtttaagcctgatgaaaacggcatacgccgtaaagtatttacgaacatcaaaggcttgaagataccgcacacctacatagaaacggacgcgaaaaagttgccgaaatcgacagatgagcagctttcggcgcatgatatgtacgaatggataaagaagcccgaaaatatcgggtctattgtcattgtagatgaagctcaagacgtatggccggcacgctcggcaggttcaaaaatccctgaaaatgtccaatggctgaatacgcacagacatcagggtattgatatatttgttttgactcaaggccctaagcttctagatcaaaatcttagaacgcttgtacggaaacattaccacatcgcttcaaacaagatgggtatgcgtacgcttttagaatggaaaatatgcgcggacgatcccgtaaaaatggcatcaagcgcattctccagtatctatacactggataaaaaagtttatgacttgtacgaatcagcggaagttcataccgtaaataaggtcaagcggtcaaagtggttttacactctgccagtaatagtattgctgattcccgtgtttgtcggcctgtcctataaaatgttgagcagttacggaaaaaaacaggaagaacccgcagcacaagaatcggcggcaacagaacagcaggcagtacttccggataaaacagaaggcgagccggtaaataacggcaaccttaccgcagatatgtttgtcccgacattgacggaaaaacccgaaagcaagccgatttataacggtgtaaggcaggtaaaaacctttgaatatatagcaggttgtgtacaaggcggaagaaccggatgcacctgctattcgcatcaagggacagcattgaaagaagtgacggagttgatgtgcaaggactatgtaaaaaacggcttgccgtttaacccatacaaagaagaaagccaagggcaggaagttcggcaaagcgcacagcaacattcggacagggcgcaagttgccacgttgggcggaaagccgctgcaaaatcttatgtatgataattggcaggagcgaggaaaaccgtttgaaggaatcggcgggggcgtggtcggatcggcaaactga

SEQ ID NO: 36937 - DNA, 1194 bp, Neisseria meningitidis
atgtaccgacacatcgaatactatcccggcgatccgattttgagtttggtcgaaaccttcaaaaacgacccgcgccccgaaaaagtcaatttgagcataggcatttatttcgacgacgaaggcaaaatgcccgtgttggaatccgtgagccgcgccgaaaccgcccgcgccgccactcctgtgccgtcgccctacctgccgatggaaggcttagacacttaccgcagcgcggtgcagcatttgttgttcggcaaagacaaccccgcgctcgcgcaaggacgtattgttaccgtacaaaccttgggcggctcaggcgcgctcaaagtcggggcggactttctgcaccgctggtttcccgaagcgcgcgcctacgtcagcgacccgacttgggacaaccatcgcggcatttttgaaagcgcaggtttcgaggtcggcacttacccatattacgaccctgctgccgtcggcgtgaaattcgacgaaatgaccgcgtttttcaacaccctgcccgaaaacagcgtcctgatcctccatccctgctgccacaacccgaccggcgtggatatgtcggaacaacaatgggacgaagtgttgcacatcatcaaaacgcgcaaactgattccgtttatggacatcgcctaccaaggcttcggcggcgatttggacagcgatgcctacgccgtccgcaaagcggtggaaatggaattgcccttgttcgtcagcaattccttctcaaaaaacctgtcgctctacggcgagcgcgtcggcggcctgagcgtggtttgcccgaataaggaagaagcggatttggtgttcggacagctcaaattcaccgtccgccgcatctactccagcccgcccgcgcacggcgcgtatatcgccgccgacgtgatgaacagccccgaactttacgccttgtggcaaaacgaggtttatatgatgcgcgaccgcatccgtgcgatgcggcagaaactttatgatgtcttaactgcgcaaatccccgatcgcgatttcacttatttcatcaaacagcgcggcatgttcggctacacaggattgagcgtggaacaagtccgcaggctgcgcgacgaatttgccgtttacctgctggattccggcaggatgtgcgtcgccggactgaatacgtcgaataccgactatgttgcccgcgcatttgcggaagtcttgaaataa

SEQ ID NO: 36938 - DNA, 234 bp, Neisseria meningitidis
atggcacgagtttgcaaagtgaccggcaaacgcccgatgtccggcaacaacgtatcgcacgccaacaacaaaaccaaacgccgttttttgcccaacttgcaatcacgtcgtttttgggtagaaagtgaaaaccgctgggttcgcctgcgcgtttctaacgccgctctgcgtaccatcgacaaagtaggcattgatgtcgtattggctgatttgcgtgctcgcggtgaagcttaa

SEQ ID NO: 36939 - DNA, 1296 bp, Neisseria meningitidis
atgattcgccctgattttcaagaatatctgccttcttattatttcagttcggttaatcctcatactgtttatccgaaacttcaatgccgtctgaaaaccgatacctgtatcatcggcggcggattgagtggtttgtgcactgcattgcccttggcggagcagggacatgaaacggttgtgttggaagccgcgcgtatcggtttcggcgcgtcgggacggagtggcgggcaggttatcagcgattacgcctgcggtatggaggaaattgaaaaacaggtcggtttggagcaagcgcaatggttttggcaacagtctttgcaggcggtcgaactggtggacgaacgcgtccgcaaacatgccattgattgcgattggcagcgcggttatgccacggttgccatccgttcgcagcattgggaagaattgcaacaatggcatgagcacgcccaaaaatattacggtgcaactcattatcaactctgggataacactgaactgaagcagcagcttgacagcgatatgtaccaaggcgcacagttcgatcccttgtccgggcatctccatccgctcaattacacgttgggcatcgcccgcgccgctgccgaagctggtacgaagatttttgagcattctcccatgatacgcattgaaccttatcaaaacggttggctggtttacacccccgaaggcagcgtcgaatgcaaaaatctggtgtacgccgtcaatacttatgccggtttgaatccgatattcaagcctttggagcgcaaggcgattgctgtcagcacctttattattgccacagaacccttgggcgcgcgtgcaaaagggcttatccgcaacaatatggcagtatgcgacaaccgccatattttggattattaccgcctcagcgcggacggcagactgcttttcggcggtaaggataacgagtttatcgacaatcccgcgcgtatgaccgagcttgtccgccaagatatgcttaaagtttttccgcagcttgccgatgtcaaaatcgaatattcgtggggcggggagtgcgacattaccgccaaccttgtcccgcatttcggacgtttagccccgaatgttttttatacgcaaggttattccggacacgggatggcgataacaggcattgcaggtctggcggttgccgaagcaattttaggggacgaatgccgtctgaagccgtttgagcggttgcgccagccgaatattatcctgcaaccgtttttgcgcaaactcggttctttcctcggctcgaaatattatcagtggaaagacagccgttaa

SEQ ID NO: 36940 - DNA, 411 bp, Neisseria meningitidis
atgcctgtctatttccgcaccccaagcaggaaacgcctgcacaaaatgaaccgccgccagcataaaaagctgcatttgggcgagtttcaaacattgattttcggcgttcaaggcagtttgcaccaagctgcggacgatgccgaagcgtttggccgctttatggacgagctgattgcgtatcttgaggcaaacgactttgaaatggcgggcgggggcgattgcggcgatttttcgtgcctgtttcaaaaatccgccccccgaggcttgggcgaaaccgagaaaaaagccattatctcttggctggcaggccgcgaagatgtcgccactttgcacgccaccccgctggttgacggtttttacggggatgacggctgggaaaattacagcgaaacctataaacaggcagattaa

SEQ ID NO: 36941 - DNA, 594 bp, Neisseria meningitidis
atgtctgaaatgttgaaccatgtggcatcctgccgcctgccgaccgaatggggcgtatttacgatgcacggctttgaagaggcaaacgggcaggaacacgtcgcgctgaccgtcggtaatttttcagacggcaatccggttctgacgcgcatccactccgaatgcctgacgggcgatgcgctgttctcgagaaaatgcgactgcggacctcaacttgaagcggccatgagggcggtacagacagaggggcgcggcatcatcgtctatctgcgtcaggaaggacgcggcatcgggctgattaacaaaatccgcgcctatcatctgcaagaccaaggtatggatacggttgaagccaatttggcactcgggctgcccgtcgatgcccgcgatttccgtttggcgcaatctatctacgaatatctgggcatccgctcggtcaaactgctgaccaacaaccccgaaaaaatccaaaccctgaaagatgcggggattaacgtggtcgaacgcatccccctgcacgtcggggaaaaccttgaaaacaaacgctacctccaaaccaaagcagacaagctgggacatctgatgtcggaataa

SEQ ID NO: 36942 - DNA, 222 bp, Neisseria meningitidis
ttgaaagtaatgggcgcggtgcatcccgagttcgagcaggcggtattggacaccgtccgccttcacgcccccgacacgcaggcgcaccacatcaccacgcgtccgagcagcaaaggcaactatactggcgccaccgtacaggtaaaggttgaaaaccaagaacaattggacaacatctaccgtgcgctgacttcgcacgaactggtcaaagtggtactttag

SEQ ID NO: 36943 - DNA, 2745 bp, Neisseria meningitidis
ttgccgtgtcgcccgcctcctgccggcaatctgccgattcgccgcttccggcaacctgttataattgatgccgactttatttttccaacgtttttaagcgaaaacagaatgactatgcaagaacaataccggcccgccgccatcgagcctgcggcgcagaaaaaatgggatgatgcccgtattttcaacgtctccgaagacgcttccaaacccaaatactactgcctctctatgttcccctatcccagcggcaagctgcatatggggcatgtgcgcaactacaccattggcgacgtattgagccgcttcaaacgcttaaacggcttcaacgtcatgcagcctatgggttgggacgcgttcggcatgccggcggaaaacgcggcgatgaaaaacaacgtcgcccccgccgcatggacttacgacaacatcgaatacatgaaaacccagctcaaaagcctgggttttgcgattgactgggcgcgcgaaaccgccacctgcaaacccgaatactaccgctgggaacaatggctgtttaccaagctgtttgaaaaaggcatcgtttaccgcaaaaacggcacggtaaactgggaccctgtcgatcaaaccgtccttgccaacgagcaagttatcgacgggcgcggctggcgttcgggcgcgttgattgaaaaacgcgaaatcccgatgtattacttcaaaatcaccgattacgccgaagagttgctcaacgatttggacaagctggaacactggccggaacaagtcaaaaccatgcagcgcaactggatcggcaaatctcgcggtatgaccgtgcgctttgccgtttcagacgacagcaaacaaggtttggaaggcgattacgcgagattcctgcaagtttataccacccgccccgacacgctgatgggcgcgacttatgttgccgttgccgccgagcatccgctggcaaccgcagccgccgccgacaaacccgaattgcaggcatttatcgccgaatgcaaagcgggctccgttgccgaagccgatatggcgacgatggagaaaaaaggcgtgccgaccggtcgctacgtcgtcaacccgctcaacggcgataagctggaagtgtggattgccaactatgtattgtggggctacggcgacggcgcggtgatggcggttccggcgcacgacgaacgcgatttcgagtttgccaccaaatacagcctgccgaaaaaacaggtcattgccgtcggcgacaacgcatttgacgcaaaccaatggcaagaatggtacggcgacaaagaaaacggcgtattggtcaacagcggcgacttggacggcatgaattttcagacggccttcgacgccatcgccgccaagctgcaaagccaaggcgcgggcgaaccgaaaacccaataccgcctgcgcgactggggcatttcgcgccaacgctactggggctgcccgattcccatcgtccattgcgaacaatgcggcgacgtacccgtccctgccgaccaactgcccgtcgtcctgcctgaaaacgtcgtacccgacggtatgggttcgccgctggcaaaaatgcccgagttttacgaaactgcctgcccgtgctgcggcggcgcggcgaaacgcgaaaccgacaccatggacaccttcatggaatcaagctggtatttcttccgctacatgtcgcccaagttttcagacggcatggtatcggcggaagccgcaaaatactggggcgcggtcgaccaatacatcggcggtatcgaacacgcgattctgcacctcttgtacgcgcgtttcttcaccaaactgatgcgcgacgaaggtttggtcaatgttgacgaaccgtttgaacgcctgctgacgcaaggcatggtcgtttgcgaaacctactaccgtgaaaacgacaaaggcggcaaagactggatcaaccctgccgatgtcgagctgactttcgacgataaaggccgccctgtttccgccgttctgaaagcagacggactgccagtcgtcatcagcggcacggaaaaaatgtccaagtccaaaaacaacggcgtcgatccgcaagagctgattaacgcctacggcgcggacaccgcccgcctgttcatgatgttcgccgcaccgcccgaacagtccctcgaatggagcgacagcggcgtcgaaggcgcacaccgcttcctgcgccgcctgtggcgtaccgtttacgaatacctgaaacaaggcggcgcggtcaaagcgtttgcaggcaaccaagacggtttgtctaaagaactcaaagatctgcgccacaaactgcattccaccatcgccaaagtcagcgacgactacggccgccgccagcagttcaacaccgccatcgccgccgtgatggaattgctcaaccaatacgacaaaaccgacaccggcagcgaacaaggccgcgccgtcgcccaagaagtattggaaaccgccgtacgcctgctgtggcccatcgtgccgcacatctgcgaaaccctgtggagcgaattgaacggcgcgaaactgtgggaagcaggctggccggcagtcgacgaagccgccttggtcaaatccgaaatcgaagtcatggttcaagtcaacggcaaactgcgcggcaaaatcaccgtcgccgccgacgcatccaaggccgacctcgaagccgccgcccttgccaccgaaggcgcggtgaaattcatggaaggcaagcccgcgaagaaaatcatcgtcgttcccggacgcttggtaaatatcgtcgtctaa

SEQ ID NO: 36944 - DNA, 975 bp, Neisseria meningitidis
atgctcgagaatctgccctatttccagcgacatctgcctgaagaccttgccaaagtcaatgaagtcatcaaccgtgcggtgcaatccgatgtcgcactgatttcgcaaatcggtacatatatcatcagcgcgggcggcaaacgcctgcgtccgattatgacgattttggcgggtaaggcggtcggttatgatgacgagaaactgtattcgctggcggcgatggtcgagtttatccacacttccaccctcctgcacgacgatgtcgtcgatgaaagcgatttgcgccgtgggcgggcaacggcaaacaatctgttcggcaatgcggcggctgtgttggttggcgactttttatacacgcgcgcctttcaactgatggttgcctcgggcagtatgcgcgttttggaagtgatggcggatgcaaccaacattattgccgagggcgaagtcatgcagctgatgaacatcggcaatacggacattaccgaagaacaatatatccaagtcatccaatataaaacggcaaaattgtttgaagctgccgctcaagtcggcgcaattttgggcaaggcttcccccgaacacgaacgggcgttgaaagactacggtatgtatgtcggtacggcattccaaattattgacgatgtgctggactattctggcgaaaccgaagaaaccggcaaaaacgtcggcgacgatttggcggaaggaaaaccgactttgcctttgatttatctgatgcgtcagggttccgaacaggttgcgaacgatgtgcgtactgctttggaaaatgcagatcgcagctattttgagaaaatccacgattatgtcgtccgttcggatgcgttggcatattcgataggcgaggcgcgcaaagcagtcgattgtgccgttaccgccttggatgccctgcccgacagcgaagtgaaggatgccatgattcagctggcgaaggaatctttggtcagggtgtcttga

SEQ ID NO: 36945 - DNA, 1005 bp, Neisseria meningitidis
atgaccatcatcgtaacaggcgcggccggctttatcggcagcaacatcgtcaaagcacttaatcaacgcggtattactgacattgttgccgtcgataatttgagcaaaggcgaaaaattcaaaaaccttgccgagtgcgaaatcgcccattatctcgacaaacatgaattcatccgccaagtgagggaacacattttaccttatcaaaacatcgaagccgttttccatcaaggcgcgtgttccgatacgatgaaccacgacggtttgtatatgatggacaacaactaccagtacacgctggatctgttggactggtgtcaggacgaacgcattcccttcctttatgcctccagtgcggcggtttacggcaaaggcgaaatcttccgcgaagagcgcgaactcgaaaaaccgctcaacgtgtacggctactccaaattcctgtttgaccaagtattgcgccgccgcatgaaagaaggtctcaccgcccaagtcgtcggcttccgctacttcaacgtttacggacaacacgaacaacacaaaggtcgcatggcatccgtcgccttccaccacttccaccaataccgcgaacacggttacgtcaacctgttcggcagcaacgacggctacggcaacggcgaacaaacccgcgacttcgtcagcgtcgaagacgttgccaaagtcaacctctacttcttcgaccatcccgaactttccggcatctacaacctcggaacaggccgcagccaacagttcaacgaactcgctgccgccaccgtcaacgcctgccgcgccgccgaaggcaaacccgaaatgagcttgaaagagctggtagaagaagaacttatccgctacatcccatttcccgatgcgctcaaaggcaaataccaaagcttcactcaagccgacatcaccaaattgcgtgaggcaggttatacggaagaatttttcgatgtcaaatcaggcgtcgagcgctacgtcaaatggatgctggaaaatttggcttaa

SEQ ID NO: 36946 - DNA, 957 bp, Neisseria meningitidis
ttgttaattcactatatcgacatcgccaaacgaaacttcgtcatcgccgtttcgtctttgtctaaaaccaaaaccgaaaccaacaaccccaaaggtatcgcccatactatcgaataccttaaaaaacacaaggtcgccctcgtcgtgacggaaagtactggcggtctcgaaatccccgccgccaaagccatccgccgagcaggcatagccgtgattatcgccaacccgcgtcagacgcatcagtttgcccaatcgcagccgctgaccaaaaccgacgccaaagatgccaaaatgcccgccttcttcacacagatgatgacgcagaaagaagattggcaaaccatgccctaccaaccgcccaccgaagcggaagaagtgttggaagccttggttaaccgccgcaaccaatcggcggatatgcggactgccgagaaaaaccgtctgcatcaggttcatgaaacgcaagtcggaagcgtcaaacaactgattgcccattttgaccggctgattgacgaattggacaaacaaatcgacaaccacacccacacgcattttgacggcaaagcccaagtggcagagcaaatcaaaggcatcggttcgataacgacggctacgctgatggcgatgttgcctgagttggggcggctgtcgcacaaacggatagcgagtctggtcggcattgccccacacccgagggagagcggggaaaccaaattcaaaagccgctgctttggcggaaggtctgcggtgcttaaggcgctgtatatggctaccgtggcagcgacacgttttgaaccgcttattcgggatttccaccaacgcccgctgtccgagggtaagccgtataaggttgccgttacggcatgtatgcgcaaactgctgacgatatcgaatgcccggatgcgtgattattttgccgaaaacgataccgccgaaaacggtatccggacggcttga

SEQ ID NO: 36947 - DNA, 603 bp, Neisseria meningitidis
ttggtttataattttccttttaccgaccgattccgacatatgaccgatttagaaaccaaacgccttgaaacacaggcgatgcttgaaaacgccgagcttttgttcgaccaaggccaatgccgtgccgcactgcaaaaagtggcggacgagattacgcgcgatttgggcggcaaatatccgctgctgctgcccgtgatgggcggcgcggtggtgtttacggggcagttgctgccgctgttgcgttttcccttagattttgattatgttcacgtttcccgttacggcgacaagctggagggcggcgcgttcaactggaagcgtatgcccgatgcggaacaaatccggggcaggcacgtcgtcgtgctggacgatattttggacgaagggcatacgatgtccgccattcaagccaaacttttggaaatgggtgcggcaagctgccgtgcggcggtgttcgccaacaagctgatcgacaaacccaagcctatccgagccgattatgtcggactggctgtgccgaaccgttatgttttcggttacggcatggatgcggcaggctgctggcgcaatttgggcgagatttacgcattggacggaaaataa

SEQ ID NO: 36948 - DNA, 717 bp, Neisseria meningitidis
atgtccgacaaaaaatataatgtcgatgagggggaaatcgccaaattcagccggattgccgacaaatggtgggacaagtcgggcgagttcaaaaccttgcacgacatcaatccgctgcggctggattatatcgacggacacgcggatttgcgcggcaaacgggttttggacgtgggctgcggcggcggcatcttggcggaaagtatggcgcggcgcggcgcggcgtttgtaaagggcatcgacatggcggagcagtcgttggaaaccgcccgcctgcacgcggctttgaacaatgtcgccgatatcgaatacgaatgtatccgcgtggaagaccttgccgaggcggaaccgcactcgttcgatgtggtaacgtgcatggaaatgatggaacacgtccccgatcccgccgccatcgtgcgtgcttgtgccaatctggtcaaaccggacggcatggtgtttttttccaccatcaataaaaacccgaaatcgtacctgcatctgattgtggcggcggaatatctgttgaagtttgtccccaaaggcacgcacgactggaaaaaattcatcgcgcctgccgagctggcgcggatgtgccgtcaggcaggcttggatgtggcggatacgaagggtatgacttaccatgtgttgtcgcaaacttatgccctgtgcgattcgaccgatgtgaattatatgtttgcctgccgtccggcgttctga

SEQ ID NO: 36949 - DNA, 897 bp, Neisseria meningitidis
atggaacgcatcgacatctgccataccacccaagttgtcggcatggatgaatcccctcagtccgccctaaagaacaaaaaagactcctccatgcgcgttgccatcaaccaagttaaagaaggcaaagcccaagccgccgtatccgcaggcaacacgggcgcactcatggcaaccgcacgtttcgtcctcaaaaccattcccggcatcgaacgccccgccatcgccaaattccttccttccgacaccgaccacgttaccctcgccctcgaccttggcgcgaacgtcgactgcacgcccgaacagctcgcccaatttgccgttatcggcagcgaactcgtccacgcactccatcctcaaaaaggacagccgcgtgtcgggctggtcaacgtcggcacggaagacatcaaaggtacggacaccgtcaaacaaacctacaaactgctgcaaaacagcaaactcaactttatcggcaacatcgaaagcaacggcatcctgtacggcgaagcagatgtcgtcgtcgccgacggctttgtcggcaacgtcatgctcaaaaccatcgaaggcgcggtcaaattcatgagcggagccatccgccgcgaattccaaagcaacctgttcaacaaacttgccgccgttgccgccctacccgccctcaaagggctgaaaaacaaactcgatccgcgcaaattcaacggggccatcctgctcgggctgcgcggcatcgtcatcaaaagccacggcggcacagacgaaaccggtttccgctacgcactcgaagaagcctaccacgaagccaagtccgccggcctttccaaaatcgaacaaggcgttgccgaacaactcgccgcactcgaaactgccaaagccgtccaaaacgaaaatgccgacggtctgtaa

SEQ ID NO: 36950 - DNA, 1143 bp, Neisseria meningitidis
atgaatactttatatacacttttcgccacctgcccgcgcggcttggaaaccgttttatcgcaagaactcgaaagcctcggctgtaccgatgtacaagtgtttgacggcggcgtttcctgccggggcggattggaacaggtttacgccgccaacctgcattcgcgtactgccagccgtatcctgctgcgcctgaccaaagggacataccgcaatgagcgcgacatctacaaactcgccaaaaatatcaactggtttaattggtttactttacagcagacgttcaaagtcaaagtcgaggcaaagcgtgccaacgttaagagcatccaatttgtcggactgaccgtcaaagatgccgtctgcgacgctttccgcgacatttacgacgcacgtccgagcgtggacaaagccgcgcccgatgttcgcatccacgcctttttggacgaacgcaatgtcgaaatcttcatcgacacttcgggcgaagccctgttcaaacgcggctaccgcctggataccggcgaagccccgctgcgcgaaaaccttgccgccggactgctgctctcggcaggctacgacggcacgcagccgtttcaagacccgttttgcggcagcggcacgattgctatcgaagccgcttggattgccgcccgccgcgcaccgggtatgatgcgccgcttcggttttgaaaaactgcaaaatttcgataaaacgctgtgggcggatttgcgccgccgcgccgaagcgcaggtcaaccccgcttttgcaccgatttcgggcagcgacaacgaccgccgcatcgttcagacggcattggacaacgcacgcagtgccgaagtggatgacatcgtttccttcagcgttgccgacgcgcaatccgtccgtccgaacggcgaaaacggcatcatggtgtccaatccgccctacggtgtgcgccttgaggaagtccgcgctttgcaggcactttatccgcagttggggacgtggttgaaaaaacactatgccggctggcgggtcggcatgtttaccagcgacagggaaatgcccaaattcatgcgcctgtcgcccaagcggaaaattccgctttataacggcaacctcgactgccgcctgttcctgattgatatggtgcagggatcgaaccgttga

SEQ ID NO: 36951 - DNA, 921 bp, Neisseria meningitidis
atggcagaactgtaccaaaccaccaaacaaaatatcagcaaacacattaaaaccattcttgcagagcaagaattggaagagaaggcaactgtcaacttccagttgacagttcaaaatgaaaacgggcgcaaggtaaaccgcaaaatcgcccattattccctgcccatgattattgccgtcggctaccgcgtccgttccgcgcggggcatccaattccgccaatgggcaaccgaacggctggacgaatatctgaccaaaggctttgccatagacgacgaacgcctgaaaggcacaggcggcggcgactattggaaagaactgctcaaccgcattcgcgacatccgcagcagcgaaaaagccctataccggcaagtgcttgatttatatgccaccagccaagactacaaccccaaaagcagcgaaagccaaaccttttttgccgccgttcaaaacaaactgcactatgccgccagccggcaaaccgtagctgagctgatatacagccgtgccgacagcagcaaagactttatggggctgaccacctttcaaggcgcaatccccacgctgaatgaagccaaaatcgccaaaaactatctgaccgaagacgaactgttccgcctgaaccgtctggtttccgccttcttcgacctggcggaaatcaaagcgcaggagcaaagccccatgtatatgcgcgactggatagccgaattggacaaattttccgggctgtacggacaaggcacattacagggtgcaggcagcatcagccgcaaacaggcagagcagaaagccgaacgcgaataccgcgcctatgaagcgcgcatcctgtcgccggtggagcaagcctatctggaaagcgttaaagcgttggaaaaaacagccgtgcaacagatcaaacagaaaaaagaccgcacaaaataa

SEQ ID NO: 36952 - DNA, 417 bp, Neisseria meningitidis
atgcgcttactccatactatgctccgcgtgggcaatctcgaaaaatccctcgatttctaccaaaacgttttgggtatgaaactgctccgccgaaaagattatcccgaaggcagatttacccttgccttcgtcggttacggcgacgaaaccgacagcacggttttggaactgacgcacaactgggatacggaacgatacgacttgggcaacgcctacggacacatcgcggttgaagtggacgatgcctacgaagcctgcgaacgtgtgaagcggcagggcggaaacgtcgtccgcgaagccggcccgatgaaacacggcacaaccgtgatagccttcgtcgaagaccccgacggatacaaaatcgagttcattcaaaagaaaagcggtgacgattcggttgcctatcaaactgcctga

SEQ ID NO: 36953 - DNA, 1638 bp, Neisseria meningitidis
atggattttaaaagactcacggcgtttttcgccatcgcactggtgattatgatcggatgggaaaagatgttccccactccgaagcccgtccccgcgccccaacagacggcacaacaacaggccgtaaccgcttccgccgaagccgcgctcgcgcccgcaacgccgattaccgtaacgaccgacacggttcaagccgtcattgatgaaaaaagcggcgacctgcgccggctgaccctgctcaaatacaaagcaaccggcgacgaaaataaaccgttcatcctgtttggcgacggcaaagaatacacctacgtcgcccaatccgaacttttggacgcgcagggcaacaacattctaaaaggcatcggctttagcgcaccgaaaaaacagtacagcttggaaggcgacaaagttgaagtccgcctgagcgcacctgaaacacgcggtctgaaaatcgacaaagtttatactttcaccaaaggcagctatctggtcaacgtccgcttcgacatcgccaacggcagcggtcaaaccgccaacctgagcgcggactaccgcatcgtccgcgaccacagcgaacccgagggtcaaggctactttacccactcttacgtcggccctgttgtttatacccctgaaggcaacttccaaaaagtcagcttctccgacttggacgacgatgccaaatccggcaaatccgaggccgaatacatccgcaaaaccccgaccggctggctcggcatgattgaacaccacttcatgtccacctggatcctccaacccaaaggcggacaaagcgtttgcgccgctggcgactgccgtatcgacatcaaacgccgcaacgacaagctgtacagcaccagcgtcagcgtgcctttagccgctatccaaaacggcgcgaaatccgaagcctccatcaacctctacgccggcccacagaccacatccgttatcgcaaacatcgccgacaacctgcaactggccaaagactacggcaaagtacactggttcgcctcccccctcttttggcttttgaaccaactgcacaacatcatcggcaactggggctgggcgattatcgttttaaccatcatcgtcaaagccgtactgtatccattgaccaacgcctcttaccgctctatggcgaaaatgcgtgccgccgcacccaaactgcaagccatcaaagagaaatacggcgacgaccgtatggcgcaacaacaggcgatgatgcagctttacacagacgagaaaatcaacccgctgggcggctgcctgcctatgctgttgcaaatccccgtcttcatcggattgtattgggcattgttcgcctccgtagaattgcgccaggcaccttggctgggttggattaccgacctcagccgcgccgacccctactacatcctgcccatcattatggcggcaacgatgttcgcccaaacttatctgaacccgccgccgaccgacccgatgcaggcgaaaatgatgaaaatcatgccgttggttttctccgtcatgttcttcttcttccctgccggtctggtattgtactgggtagtcaacaacctcctgaccatcgcccagcaatggcacatcaaccgcagcatcgaaaaacaacgcgcccaaggcgaagtcgtttcctaa

SEQ ID NO: 36954 - DNA, 957 bp, Neisseria meningitidis
atgcatcaatattatgacgcagtaattttatcggttggaaatgggttgttaaaaaggttctttaagcagaatgcgcaattaaatattgcttcaaggccattgattattaccttgtttccaggtgtagtattcggtgatcaggcaagtattctatctcgtatgggggctgatattgttttatataataataagcatgattttagaattgcagaggaatataagaaacaatataaattaagttgtcaaaatatactttatggttatccaatttttcgccacgcatcaaaaggtcgtcatggagagaaaatttactttattgaccaagttaaaatcccatttaaaaaagaagaaagaatttatacattaaaaaaattgattgccttggctgaaaaataccctgagaaagaatttactattttgctaagggttgcagataaagatattactgtgcatcaggataaacattcgtatatagagctggcaaagcagtttcagttgccgagtaatttgacaatagagcgaaaaagtaccgcgcaagccttccaagaaatggggtattgtttatcttattcatctactatgctttttgaagctgaatgtaagggtatccctgttggtgttgttgcagacttaggcttttctaaatcctatgcaaatcagcattttttaggtagtggggttttaatttattttgatcaaatagatttcacttccccaaaaatagcaaatccgggctggcttgattgctatgctactaaaaaggtgattacaactgatgagtttaataagctattaaaacaggttgtgccattgcaacatgattaccaagaatatttatttgcagtgaacagtatagaatcaacccaaaccatttttttgcggaagtttaaaaagctcattagagatcccaagcaatttttttatgactctaaatggtttagaagaagaaatagttga

SEQ ID NO: 36955 - DNA, 1128 bp, Neisseria meningitidis
atgaaacacttactcatcgattttgaaaacgtccagccgcaaaacttagacaaattactaaccgaaaatacccatatttggctatttataggtgtattacacaaaatgttacctattagtctggtgcaatccctactacgtttcggcgaacgtgtccatcttgtccagttacaaaaaacggggaaaaacgcattggatttttacctgtcctattacctcggacaaattaccgccacagaccccaatgcccaaatcggcatactctcgcgtgatggaggatacgatgttctggtcgaacatattttgaaaaaccaccaggcgaagggtatcgtgcgcctagccaatatagatgaagtacaacatcagaaaattactaccgaaccgccgtcagcattgctggaaaacactcctcagcctgaaaccaccctcaaaccacagcaaccattaacttcctatttccaagcagccctaactgcactgcgccgccccgacgctttccgcccctgccgcctgcataacctgcgacaaaatctgcgtaagcatattttgagtgatttgtttaaagaaaaaaccgatgaagaatgcgaaataaccactgctaacgttatcaataaactcaaagcacaaaacttcatcagcattgatgaacaggaaaccgtttcctaccatctcagtgataatgatttgttacaaagaatccaacgccatattttaagccaacgtcccaaaacctacgctgattttcaagccgtcgtgcaaaaccgagcagatgcacttcacttaacagtcggtaccaacgacattcaatcctttgcgcgacatttgcgcgaccaaaacctgatccgccaaaacaatgggaaaattgaatatgcaccgtttactgaacctaaaccacagccaacgcccaagcagcctaaaaaaaccgcatgggaacctgatgaaattatttggaaaaaagtgattgccgcgttatcgttaaagaaccgtcctaataaaaccaaaactttacgcaatacaatccaggcactcacaaaatccaatgcacaagaaactgacaaactgctacaacatttacaagatacccaagtcctacgtattgacggtactaaaattgtgtatatcaagtag

SEQ ID NO: 36956 - DNA, 1935 bp, Neisseria meningitidis
atgagcttgatcgaatgtaaaaacatcaaccgctatttcggcagcggcgagaaccgcgtccatattttgaaagacatcagcctgtcgatagagaagggcgattttgtcgccatcatcgggcagtccggttcgggcaagtccacgctgatgaacatactcggttgtttggataccgccggttccggttcgtaccgaatcgacggcatcgaaactgccaaaatgcagcctgacgaactggcggcattgcgccgcgaacgcttcggctttatcttccaacgctacaacctcttaagctcgctgaccgcaagggataacgtcgcgctgccagccgtctatatgggcgcgggcggcaaagagcgttccgcgcgggcggacaaactcttgcaggatttgggtttggcaagcaaagagggcaacaagcccggcgaactctcgggcggacagcagcagcgcgtctccatcgcccgcgccctgatgaacggcggagaaatcatcttcgccgacgagccgaccggcgcgctcgataccgccagcggcaaaaacgtgatggaaatcatccataagctgcacgaagccgggcataccgtcattatggtcacgcacgaccccggcatcgccgccaatgccaaccgcgtcatcgaaatccgggacggcgaaatcatttccgacacctcgaaaaatccagaaatccccgcaagcaatgtcgggaggattcaggaaaaagcctcgtggtcgttttattacgaccagtttgtcgaagccttcagaatgtcggtgcaagcagtattggcgcacaaaatgcgttcgcttctgacgatgctcggcatcatcatcggtatcgcttcggttgtctccgtcgtcgcattgggcaatggttcgcagaaaaaaatccttgaagacatcagttcgatagggacgaacaccatcagcatcttcccggggcgcggcttcggcgacaggcgcagcggcaggattaaaaccctgaccatagacgacgcaaaaatcatcgccaaacaaagctacgttgcttccgccacgcccatgacttcgagcggcggcacgctgacttaccgcaataccgacctgaccgcttctttgtacggcgtgggcgaacaatatttcgacgtgcgcggactgaagctggaaacggggcggctgtttgacgaaaacgatgtgaaagaagacgcgcaggtcgtcgtcatcgaccaaaatgtcaaagacaaactctttgcggactcggatccgttgggtaaaaccattttgttcaggaaacgccccttgaccgtcatcggcgtgatgaaaaaagacgaaaacgctttcggcaattccgacgtgctgatgctttggtcgccctatacgacggtgatgcaccaaatcacaggcgagagccacaccaactccatcaccgtcaaaatcaaagacaatgccaatacccaggttgccgaaaaagggctgaccgatctgctcaaagcgcggcacggcacggaagatttcttcatgaacaacagcgacagcatcaggcagatagtcgaaagcaccaccggtacgatgaagctgctgatttcctccatcgccctgatttcattggtagtcggcggcatcggcgtgatgaacatcatgctggtgtccgttaccgagcgcaccaaagaaatcggcatacggatggcaatcggcgcgcggcgcggcaatatcttgcagcagtttttgattgaggcggtgttaatctgcgtcatcggcggtttggtcggcgtgggtttgtccgccgccgtcagcctcgtgttcaatcattttgtaaccgacttcccgatggacatttcggcggcatccgttatcggggcggtcgcctgctcgaccggaatcggcatcgcgttcggctttatgcctgccaataaagcagccaaactcaatccgatagacgcattggcgcaggattga

SEQ ID NO: 36957 - DNA, 1842 bp, Neisseria meningitidis
atgcagacaaattatttgtctgaaacggattcgattatgaaaaaactgatttgcctgttcgccgtatttttgatgttgtgcggacgagctttcgcgctggatgcgaacgatctgctgccgccggaaaaggcattcgtgccggagcttgccgttgccgacgacggtgtgaacgtccgtttcaggattgccgacggatactatatgtatcaggcgaaaatcgtcggcaagaccgatccggcggatttgttgggacagccttctttcagcaagggtgaagagaaggaagacgagtttttcggcaggcagacggtttaccatcacgaagcgcaggttgcctttccttatgcaaaggctgtcggcgaaccgtataaattggttttgacctatcagggctgtgccgaagccggcgtgtgctatccgcccgtggataccgagtttgatatttccggcaacggcacttaccatccgcaaaccgacgaaccggcatccgccaaagaccgctttttgcagccttcctctcaaaacggcagcggggtgctgccgcccccgaagggggatgagggcggcgacagccgtttcaagctgtcttgggatacgctcaacgccaatcttttggcgttttttctcgccggtttgggtctgagttttaccgcctgtatgtatcccctgttgccgattgtttccagtattgtggtcggcgacaaaaaggcgggcaaggcgcgggcgtttgtgctgtccgtcgtttatgttcagggtttggctctgacttatacgctggtcggcattgttgccggactgacgggcgcactgctgaccgtatggttgcagcaggcttgggtggtgttggcggcatcggctttaatggtcgtcttggcactgtctatgttcgggctgttcaacatccagcttcccaacgccgtgcagtcgtattttcagaatcaaagcagcaggctttcaggcggtaaaatcgtttccgtctttattatgggcatattgtccgcgctgattgtcgggccgtgcgtcgccccgccgctggcatttgctttgggctacatcggtcagacgggcgatgcggttttaggcggtttggcactttacactttggcgttgggcaccggcgttccgctgattgccatcggcacgttcggcgggcatatcctgcctaaggcaggcgattggatgaatgccgtcaaatacgctttcggctttatcctgcttgccgtcgccgtttacctcgccacgccgcacttgccctattatctcgtcgtcgcgctgtacacgctgctgatgctggttcctgcctgtatgctgctggtcaacggacgcaggcagaaacgccgtccgaaagctgtggcattcgtattgggcggcatattgctgataggcggcgcgtggttcggctggcagggcgcaaacggcaaaacgaccgcgctgcaccatttcctgaccctcaatccgccggctgaagcaggcaaatcttcggaacacggaaaaatgtttgccgatactgccgcgctgaaggcagcgatggatacggcgttgaaagaacatcctgacaaacccgtcgttttggatttttatgccgactggtgcatttcctgcaaagaaatggcggcttacacgctcaatcagccggaagtgcatcaggcagtcgatatggaacgctttttccaaatcgatgtaaccgccaacatgcccgaacatcaggcgttgttgaaagaatacggtctgttcgggccgccgggcgtgtttgtcgtccgctccgacggcagccgcagcgagccgctgctgggttttgtcaaagcagacaagtttatcgagtggtatgaacaaaaccgctga

SEQ ID NO: 36958 - DNA, 774 bp, Neisseria meningitidis
atgtatcaccaaatcggaatgtgggatcaaaaatgggtcatcggcaactggaaaatgaacggccggctccaaaacaacaattcgctcatgcaccgcttccgcatcctccccaccgccgaacgcgtcctcatcggactcgccgccccgaccgtttacctgctgcaactgcacaacgccatgcaaatcgtcttaaacaaccgcatcctcacctgcgcccaagacgtgagccgcttccccgacaacggcgcgtacaccggcgaagtgtccgccgaaatgctcgccgacaccggcacagacatcgtcctcatcggacactccgaacgcagcctttatttcggcgaaaaaaacgaaatccaacgccgcaaaatggaaaacgtcctcaacgtcggactcatcccgttattgtgcgtcggcgaaagcctcgaagagcgcgaagccggcaaagaacacgaagtcatcgcccatcagctttccatcctgcaagggctggataccaaaaacatcgccgtcgcctacgaacccgtctgggcgatcggcaccggcaaagtcgccaccgtcgaacagattgccgatatgcacgcattcatctacaaagaaatcttgtctttgtgcggaagcgatgttaaaatccgtgtcctttacggcggaagtgtgaaagcggacaacgcggccgacatcttcgcagtaccttatgtggacggcgcactcgtcggcggcgcgtcattgtcgtacgactcctttaccgccatcatcagtgccgcacaaaatgcgtag

SEQ ID NO: 36959 - DNA, 2178 bp, Neisseria meningitidis
atgtgtaaaccgaattatggcggcattgtcttgttgcccttacttttggcatcttgtatcggcggcaatttcggcgtgcagcctgttgtcgaatcaacgccgaccgcgccaactctgtcagattccaaatcttccaatcctgcggataagcctgctccagctcctgccgagccttcggtagaaaccacgccggtcaaccggcccgccgtcggtgcggcaatgcggctgttgaggcggaatactgcttttcatcgtgaagatggcacggcaattcccgatagcaaacaagcagaagaaaagctgtcgtttaaagaaggtgatgttctgtttttatacggttcaaaagaaaataaacttcaacaacttaaaagcgaaattcataaacgtgatcctaatgtaaaaattaggacatcagaaaatgaaaatgaaaaatatagttataaatttgtagatgcaggttatgtgtttgctaaagacggaaaagatgaaattgagaaaacatcggatgaaaagcagttttctaatcgtttaggctatgacggttttgtatattatctcggagaacatccttcccaatctttaccgagcgcgggaacggtgaaatattccggcaactggcaatatatgaccgatgccatacgtcatcggagaggtaagggggtttccagtgtggatttgggttataccacatattatggtaatgaaattggggcagcttcttatgaggctagggatgccgatggccgggaaaaacatcctgccgaatatacggttaatttcgacaaaaaaaacctggaaggtaagttgattaaaaatcagtatgtgcaaaagagagatgatcctaaaaatccactgaccatttacaacattactgcaacattggacggaaaccgctttaccggcagtgccgaggtcaatcctgatttagcgaaaaaccatgccggtaaggagcatttgtttttccataccaatgccgatcggcggcttgagggcggttttttcggcgataacggagaagagcttgccggacggtttatcagcaacgacaacagcgtattcggcgtattcgcaggcaaacaaaaaacagaggcagcaaacgcagcagatacaaaacctgccctgacgtctggaaaacacaccaaaatcttggattctctaaaaatttccgttgatgaggcaagtgatgaaaatccccgaccgtttgaggtttccactatgcccgattttggtcatcccgacaaacttcttgtcgaagggcgtgaaatctccttgctcaaagatactcaaaccatcgttcttgccgacggcaggaaaaagacaatccgagcctgctgcgattttctgaactatgtgaaaatcggacggatgcaaaccgaacgccccgccgtcaaaccgaaggcgcaggatgaagagggggacgaagaggatgcaggcgttgataacggcgaagacgaagaagaaatcgccgaagaaagcgaagacgaagtttccgaagatgaaggcgaagaagccgaagtttccgaagatgaaagcgaagaagacgaagaaatcgtcgaagaagaaaccgaagaagaagctgaacccgaagaagccgaagaaaccgaagaagaatcgccggcagaaagcggcagcggttcaaacgccatcctgcctgccccggaagcccctaaaggcagggatatcgaccttttcctgaaaggtatccgcacggcggaagccgacattccgcaaactggaaaagcacactataccggcacttgggaagcgcgtatcggcgtgccggataagaaaggcgaacagctagatggcactacgtccattcaaaaggatagctatgcgaatcaagcggcaaaagcagaatttgacgttgattttggtgcgaagtcgctttcaggtaagttgacagaaaaaaatgatacaaaccccgctttttatattgaaaaaggtgtgattgatggcaacggtttccacgctttggcgcgtactcgtgaaaatggtgttgatttgtctgggcaaggttcgactaatccccaaagttttaaagccagtaatcttctcgtagaaggaggattttatggtccgcaggcggcagaattgggcggtaatattatcgacagcgaccggaaattcggtgcggtatttggggcgaaaaaagatgacaaggaggcaacacgatga

SEQ ID NO: 36960 - DNA, 1329 bp, Neisseria meningitidis
atgaaaaaagtatttatccgtaccttcggctgccagatgaacgaatacgacagcgacaaaatgctcgccgtcctcgccgaagaacacggcggcatcgaacaggttacccaagccgacgaagccgacatcatcttgttcaacacctgctccgtgcgcgaaaaagcacaggaaaaagtgttctccgatttggggcgcgtgcgtccgctcaaagaaaaaaaccccggccttatcatcggcgttgccggctgcgtcgcctcgcaagaaggcgaaaacatcatcaaacgcgcgccttatgttgacgtggttttcggcccgcaaacgctgcaccgcctgcccaaaatgattgtggacaaagaaaccagcgggctgtcgcaagtcgatatttcctttcccgaaatcgaaaaattcgaccacctgccgcccgcccgcgtcgaaggcggcgcggcatttgtatcgattatggaaggctgttccaaatactgctccttctgcgtcgtcccctacacgcgcggcgaagaattctcccgcccgctcaacgacgtattgacagaaatcgccaaccttgcccagcaaggcgtgaaagaaatcaacctcttgggacaaaacgtcaacgcctattgcggcgaaatggacgacggcgaaatctgcgacttcgccaccctgctgcgcatcgtccacgaaatccccggcatcgaacgtatgcgcttcaccaccagccacccgcgcgagtttaccgactcgattatcgagtgctaccgcgacctgcccaaattggtttcccacctgcacctgccgattcaaagcggttccgaccgcgtattgagcgcgatgaaacgcggctacaccgctttggaatacaaatccatcatccgcaaactgcgtgccatccgtcctgatttatgcctgagcagcgatttcatcgtcggcttccccggcgagaccgaacgcgagttcgagcaaaccttgaaactggtgaaagacattgccttcgacttgagcttcgtgtttatttacagtccgcgccccggcacgcctgccgccaacctgcacgacgacacgccgcacgaagaaaaagtgcgccgcctcgaagccttgaacgaagtcatcgaagccgaaaccgcgcgcatcaaccaaacgatgatcggcacggttcaacgctgcctggtcgaaggcatctccaaaaaagaccccgaccagctccaagcccgcaccgccaacaaccgcgtcgtcaactttaccggcacgcccaacatgattaaccaaatgatcgatttggaaatcaccgaggcctacaccttctccctgcgcggcaaagttgtcgaagcctaa

SEQ ID NO: 36961 - DNA, 261 bp, Neisseria meningitidis
ttgaaaaactgctccgctaaacatacaaaccgattaggaaacaccatgaaaaccctgctcctcaccttcggcatcttcctgaccgtcatcatcggtatggcggtcggctatatcttctccaaacgcaccatcaaaggcagttgcggcggcattaccgccttgggtatgaaaaaaatgtgcgactgcgacacgccttgcgacaccctgcaaaagaaactggatgaagaaaaacaggcaggcggcatacgggttgaccgttaa

SEQ ID NO: 36962 - DNA, 564 bp, Neisseria meningitidis
atggcgatagaactaaatggtaactggacaaaaggatttgctttagaccatcatatgcaaaaaagtattttgttaggttatgatgaattagggcatcctcactttgatagcaagagaagtgtgattggagaatgggtttatcaattaaaatatcgtaatcaaacccaaaatgtttctttgctggtagactatattttacaaaaatttagtggtttagaatctataaatttaattgttcccgccccttttacaacagagcgtattaatcaaccagttcaattaattgccaaagaactaagtgatcgcttgaatattccatattctcctattttaagaaaatctagctcacacacaccactcaaaaatattgaagaaaaatcagaaaaactagaaatactgaataattccatcacaattgacaatatagatctatccaataagaatattttagtaattgatgatttatttgatagcggagcaacattggaaatatcaactgaaaaattgttttcaaaaaatgctagatctgtaattgttttagcaatgacaaagactagaggataa

SEQ ID NO: 36963 - DNA, 1215 bp, Neisseria meningitidis
atgaccgtcaaaacccccgtttacctcgactacgccgccactacccccgttgacaaacgcgttgccgaaaaaatgattccctatctgaccgaaaccttcggcaaccccgcctccaacagccacgcattcggctgggaagcagaagaggccgtcgaaaaagcccgcgccgacatcgctgccctgattaatgccgaccccaaagaaatcgtcttcaccagcggcgcgaccgagtccgacaacctcgccatcaaaggcgcggcaaacttctacaaaaccaaaggcaaacacctcattaccgtcaaaaccgaacataaagccgttttagatacaatgcgcgaactcgaacgccaaggttttgaagtaacctacctcggcgttcaagaaaacggtttgattgatttggaagaactcaaagccgccatccgcgacgacaccatcctgatttccgtaatgtgggtaaacaacgaaatcggcgtggtgcaagacattcccgccatcggcgaaatctgccgcgaacgtaaaatcgtcttccacgtcgatgccgcccaagcctgcggcaaagtgcctgtcgatgtcgaagccgccaaaatcgacctgctctcgatgtccgcgcacaaagtgtacggccccaaaggcatcggcgcgctgtacgtccgccgcaaaccccgcgtccgcctcgaagcccaaatgcacggcggcggccacgaacgcggcttccgcagcggcacattgccgacccaccaaatcgtcggtatgggcgaagccttccgcatcgccaaagaagaactcgaacaagatatggcgcactaccgcaaactgcgcgacatcttcctcaaaggcatcgaaggcatcgaagaagtctatgtcaacggcgacctcgaacaccgcgccccgaacaacctgaacgtcagcttcaacttcgtcgaaggcgaaagcctgattatggcggtgaaagaactcgccgtatccagcggctccgcctgtacttctgccagtctcgaaccaagctacgtcctacgcgcgctcggtcgcaacgacgaactggcgcactcatccctgcgcatcactttcggccgcatgaccaccgaagaagaagtgcaattcgccgccgaactgattaaatccaaaatcggcaaactgcgcgaactgtcgccgctgtgggaaatgttcaaagacgggattgatttaaactcaattgaatgggcggcgcattga

SEQ ID NO: 36964 - DNA, 1050 bp, Neisseria meningitidis
ttgatattaatgaacacacccatccccttctccgaacggctcatccgctggcaaaaacaacacggtcgccaccacctcccttggcaggtcaaaaacccttattgcgtctggctttccgaaatcatgctccagcaaacgcaggtcgccaccgtgttggactactatccgcgtttcttagaaaaattcccgaccgttcagacgcttgccgccgcgccgcaagacgaagtgttgtcgttgtgggcgggcttaggctattacagccgcgcgcgcaacctgcacaaagccgcgcaacaagtcgtcgaacaattcggcggcacatttccgtcggagcgcaaagacctggaaaccctctgcggcgtaggcagaagcaccgccgccgccatttgtgcctttgccttcaaccgccgcgagaccattttggacggcaacgtcaaacgcgtgctctgccgcgtgttcgcccgcgacggcaatccacaggacaaaaaatttgaaaacacgctctggacgctcgccgaaagcctgctgccgtctgaaaacgccgagatgcccgcctacacgcaaggcttgatggacttgggcgcgaccgtgtgcaaacggacgaaacccttgtgccaccaatgcccgatggcggacatctgcgaagcgaaaaagcaaaaccgcaccgccgagctgccgcgcaaaaaaaatgccgccgaagtaccgaccctgccgctttactggctgattgtccgcaaccgggacggcgcgattttgctggagaaacgccccgccaaaggcatttggggcggtctgtattgcgtgccgtgttttgaaagtttgaacgggctttccgactttgccgccaaactctccctgacgatggcggatatggacgaacaaaccgccctgacccaccggctgacgcaccggctgctgatgattacgccgtttgaagggcaaatgccgtctgaaagcccttcagacggcatttggataaagccgacgcatttgaaagattacggcctgcccaagcctttggaaatttatttaaacggtaataggttagaataa

SEQ ID NO: 36965 - DNA, 1869 bp, Neisseria meningitidis
atgcaagctgtccgatacaggcctgaaattgacggattacgggctgtcgccgtgctctccgtcatgattttccacctgaataaccgctggctgcccggaggattcctgggggtggacattttctttgtcatctcaggattcctcattaccggcatcattctttctgaaatacagaacggttctttttctttccgggatttttatacccgcaggattaagcggatttatcctgcttttattgcggccgtgtcgctggcttcggtgattgcctctcaaatcttcctttacgaagatttcaaccaaatgcggaaaaccgtggagctttctgcggttttcttgtccaatatttatctggggtttcagcaggggtatttcgatttgagtgccgacgagaaccccgtactgcatatctggtctttggcagtagaggaacagtattacctcctgtatcctcttttgctgatattttgctgcaaaaaaacaaaatcgctacgggtgctgcgtaacatcagcatcatcctatttctgattttgactgccacatcgtttttgccaagcgggttttataccgatattctcaaccaacccaatacttattacctttcgacactgaggtttcccgagctgttggcaggttcgctgctggcggtttacgggcaaacgcaaaacggcagacggcaaacagcaaatggaaaacggcagttgctttcatcactctgcttcggcgcattgcttgcctgcctgttcgtgattgacaaacacaatccgtttatcccgggaatgaccctgctccttccctgcctgctgacggcactgcttatccggagtatgcaatacgggacacttccgacccgcatcctgtcggcaagccccatcgtatttgtcggcaaaatctcttattccctatacctgtaccattggatttttattgccttcgcccattacattacaggcgacaaacagctcggactgcctgccgtatcggcggttgccgcgttgacggccggattttccctgttgagctattatttgattgaacagccgcttagaaaacggaagatgaccttcaaaaaggcatttttctgcctctatctcgccccgtccctgatacttgtcggttacaacctgtacgcaagggggatattgaaacaggaacacctccgcccgttgcccggcgcgccccttgctgcggaaaatcattttccggaaaccgtcctgaccctcggcgactcgcacgccggacacctgcgggggtttctggattatgtcggcagccgggaagggtggaaagccaaaatcctgtccctcgattcggagtgtttggtttgggtagatgagaagctggcagacaacccgttatgtcgaaaataccgggatgaagttgaaaaagccgaagccgttttcattgcccaattctatgatttgaggatgggcggccagcccgtgccgagatttgaagcgcaatccttcctaatacccgggttcccagcccgattcagggaaaccgtcaaaaggatagccgccgtcaaacccgtctatgtttttgcaaacaacacatcaatcagccgttcgcccctgagggaggaaaaattgaaaagatttgccgcaaaccaatatctccgccccattcaggctatgggcgacatcggcaagagcaatcaggcggtctttgatttgattaaagatattcccaatgtgcattgggtggacgcacaaaaatacctgcccaaaaacacggtcgaaatatacggccgctatctttacggcgaccaagaccacctgacctatttcggttcttattatatggggcgggaatttcacaaacacgaacgcctgcttaaatcttctcgcgacggcgcattgcagtag

SEQ ID NO: 36966 - DNA, 1599 bp, Neisseria meningitidis
ttggattatgatgccgcacttccatgcgcaccaaccccaaaacacaggcaatgccgtctgaaccgatttcctatgaaaacacgcagcctccttcccctgttgttcctcctgctctgctcgtgcgccgcatggctgccgcccttggacgaacgcacggaaagccgccattttgacactgcttcccccgtccgtttggataaagtcctgcacatccgccatttcccgtccgacagccgcctgtccgacatttacctgctcgacgacccccacgaagcctttgccgcccgcgccgcccttatcgaatctgccgaacacagcctcgatttgcaatactacatctggcgcaacgacatttccggccgactgctgttcaacctcgtgtaccttgccgcagaacgcggtgtgcgcgtacgcctgctgttggacgacaacaacacgcgcggattggacgacctcctgctcgccctcgacagccatcccaatatcgaagtgcgcctgttcaaccccttcgtcttacgaaaatggcgcgcactcggctacctgaccgacttcccccgcctcaaccgccgcatgcacaacaaatcctttaccgccgacaaccgcgccaccatactcggcggacgcaatatcggcgacgaatacttcaaagtcggtgaggacaccgttttcgccgacctggacatcctcgccaccggcagcgtcgtcggcgaagtatcgcacgacttcgaccgctactgggcaagccattccgcccacaacgccacgcgcatcatccgcagcggcaacatcggcaagggtcttcaagcactcggatacaacgacgaaacgtccagacacgcgctcctgcgctaccgcgaaaccgtcgaacagtcgcccctctaccaaaaaatacagacaggacgcatcgactggcagagcgtccaaacccgcctcatcagcgacgaccctgcaaaaggactcgaccgcgaccgccgcaaaccgccgattgccgggcggctgcaagacgcgctcaaacagcccgaaaaaagcgtctatctggtttcaccctatttcgtccccacaaaatccggcacagacgcactggcaaaactggtgcaggacggcatagacgttaccgtcctgaccaactcgctacaggcgaccgacgttgccgccgtccattccggctatgtcaaataccgaaaaccgctgctcaaagccggcatcaaactctacgagctgcaacccaaccatgccgtccctgccacaaaagacaaaggcctgaccggcagctccgtaaccagcctgcatgccaaaaccttcattgtggacggcaaacgcatcttcatcggctcattcaacctcgacccccgttccgcacggctcaatactgaaatgggcgttgttatcgaaagccccaaaatcgcagaacagatggagcgcacccttgccgataccacacccaaatacgcctaccgcgttaccctcgacaggcacaaccgcctgcaatggcacgatcccgccacccgaaaaacctacccgaacgaacccgaagccaaactttggaaacgcatcgccgcaaaaatcctatccctgctgcccatagaaggtttattatag

SEQ ID NO: 36967 - DNA, 837 bp, Neisseria meningitidis
atgttaccgctcaaaacgcccggcgtactgcccggcttcaaactcagccttggtctgaccgtattgtgcctgtcgctgcttgtggtcttgccgtttgcgatgatggcggcgaaggcggcggaaatcggctggggcggcttttggaacacgattgccgagccgaacgtgttggcggcggtatggctgagcttgcggatgtcgttttatgcgatgctgaccaatgtcgtgttcggcacgctggtggcgtgggtattggtgcgttatgaattcccgggcaagggtctggcgaacgcgctggtcgatttgccgtttgcgctgccgacggcggttacgggtatcgcgttggcgaccctgtatgcgcccaacggttggataggccgttttttcgagcctttgggcatcaaaatcgcgtttacgcccgtcggcatttggattgcgctggtcgtcgtcagcctgccctttatcgtccgcgccgtgcagccggtgttggaggaattatcgggcgaatatgaggaagcggcggcgactttgggcgcaaaccgctttacgacgttccgccgcgtgctgctgccggaaatcacgccggcactcttgactggcgcgggaatgatgttcgcgcgggcaacgggggaatacggctcggtgatttttatcgcgggcaatattccgatggtttctgaaatcctgccgctgattattacgggcaagctggaacagttcgacgtacagggcgcgtcggcggtggcgttgtttatgctgctggtttcgtttgtgattctgtttgcgctgaacgtgatgcagtgggcgttgggcaggcgttcgggcgcgaagggttga

SEQ ID NO: 36968 - DNA, 1170 bp, Neisseria meningitidis
atgagcgaatatctgtttacttccgaatcggtatccgaaggccatccggacaaagtggccgaccaagtatccgatgctattttggatgcgattctggcgcaagaccccaaagcgcgtgtcgccgcagaaactttggtcaacacaggcttgtgcgtattggcgggcgaaatcaccaccaccgcccaagtggactacatcaaagtcgcacgcgaaaccatcaaacgcatcggctacaactcctccgagctgggctttgatgccaacggctgcgcggtcggcgtgtactacgaccaacaatctccggacattgcccaaggcgtaaacgaaggcgaaggcatcgacttgaaccaaggcgcaggcgaccaaggtctgatgttcggctacgcctgcgacgaaaccccgaccctgatgccgtttgccatctattacagccaccgcctgatgcaacgccaaagcgaattgcgcaaagacggccgcctgccgtggctgcgtcctgatgccaaagcccaactgaccgtggtttacgacagcgaaaccggtaaggtaaaacgcattgataccgtcgtcctctctacgcaacacgatccggaaatcggttatgaagagttgaaaaacgccgtcattgagcagattatcaagcccgtcctgccgtctgaactgctgaccgacgaaaccaaatacctgatcaacccgaccggccgcttcgtcatcggcggcccgcaaggcgactgcggtttgaccggccgtaaaatcatcgtcgatacctacggcggcgcggctccgcacggcggcggcgcgttctccggcaaagatccgtccaaggttgaccgttccgccgcctacgcctgccgctatgtggcgaaaaacatcgtcgccgcaggcttggcaacccaatgccaaatccaagtttcctacgccatcggcgttgccgaaccgacttcgatttccatcgatactttcggcacaggcaaaatcagcgaagaaaaactgattaccttagttcgcgaacatttcgacctgcgccccaaaggcatcgtccaaatgctcgacctcttgcgcccgatttacagtaaatccgccgcttacggacatttcggccgcgaagaacctgagttcacttgggagcgcaccgacaaagctgctgcattgagggcggcagcggggctgtaa

SEQ ID NO: 36969 - DNA, 1155 bp, Neisseria meningitidis
atgaaattcatcgacgaagcaaaaatcgaagtcgccgcaggcaaaggcggtaatggcgcaaccagtttccgccgcgaaaaattcgtaccgcgcggcggcccggacggcggcgacggcggcaaaggcggtagcgtctgggcggaagccgacgaaaacaccaacaccctcgtcgaataccgcttcgttaaacgctaccaagccaaaaacggcgaaaaaggccacggttccgaccgttacggcgcaggtgcggacgacatcgtcctcaaaatgcccgtcggcacccttatccgcgacctcgacaccgacgaaatcgttgccgacctcacttaccacggacagcgcgtctgcctagccaaaggcggcaaaggcggcttggggcacatccacttcaaatcctccgtcaaccgcgccccaaaacaatccacgcccggcgaagaaggcgaaacccgctccctgcaactcgaactcaaagtcctcgccgatgtcggcttattaggcatgcccaacgccggcaaatccaccctgattaccgccgtatccgccgcacgccccaaaatcgccaactaccccttcaccaccctgcatccgaacttgggcgtggtacgcatcgacgaaaaccacagcttcgtgatggccgacatccccggcctgattgaaggcgcggcagaaggcgcgggtttggggcatcgtttcctcaaacacttatcgcgcaccggattattgctgcacgtcgtcgatttggcgcccttcgacgaagccgtcgatcccgccgaagaagcccttgccatcatcaacgaattacgcaaatacgatgaagaactctatggcaaaccgcgctggctggtgctgaacaaactcgacatgctcgatgaagaagaagcccaagaacgcaccgtcaccttcctcgaagccgtcggctgggattacccgaaaccggacgaccgcttccaattcgatatggaaaccccgcgcctcttccaaatcagcgcgctaacccaccaaggcacgcaggaattggtacaccaaatcaaccaatacctgaccgagaaaaaacgcttggaagccgaaaaagcagaagcggagaaagcggcggcaaatgttgaaattatcgaacagcagcctaaaacggatacgggcgtgtttaagccggagtga

SEQ ID NO: 36970 - DNA, 1569 bp, Neisseria meningitidis
atggcaaaaaaggacaataaaactaaaatccaaaagcccgaggctgcattgcagacggatgcggctcaaattacggcgaccggtcgggttatcgccgagcatccgtccaattttattacgccgcaaaagatgcgggccctcttcgaggacgcagaaagcggcgacatccgcgcccaacacgagcttttcgcggacattgaggagcgcgacagcgacatcgcggcaaatatgggtacgcgcaaacgcgcgctgctgacgctcaactggcgcgtcgccccgccgcgaaatgcgacgcccgaagaagaaaagctgtccgaccaagcctacgaaatgatggacagcctgcctacccttgaagacctgatgatggatttgatggacgctgttgggcacggattttctgcgttggaggtcgagtgggtattttcagacggcctttacctaccccgaaactttatccaccgcccgcaaagctggttcaaatgggacaaagacaacgggctgctgctgcgtacccgcgaaaatccggaaggcgaagcgttgtggccgctgggctgggtcgttcatacccaaaaatcgcgcagcgtccagcaggcgcgcaacgggcttttccgcacgctttcctggctgtatatgttcaaacactacgccgtccacgattttgccgagtttttggagctgtacggcatgcccatccgtatcggcaaatacggcgcgggcgcaaccaaagaggaaaaaaacaccctgcttcgagcggtggcggaaatcggtcacaacgcggcaggcatcatgccagaaggtatggaaatcgagctgcacaacgcggcaaacggcatgacttccgccggcaatccgtttttgcagatggccgactggtgcgaaaaatcggcggcgcggctgattttggggcaaacgctaaccagcggtgcggacggaaaatccagcaccaacgcgctgggcaatatccacaacgagatacgccgcgatttgctggtgtcggacgcaaaacaggtggcgcaaaccatcacaagccaaatcatcggaccgttcctgcaaatcaactatccccatgccgacccaaaccgcgtgccgaaatttgaatttgacacgcgcgagccgaaagacatcgcggtctttgccgacgctatcccgaaactggtggatgtcggcgtacaaatccccgaaagctgggtgcgcgacaaactggtcattccagatgtgcaggagggtgaggctgtgttggtgcggcaggtaccggacaatccggtaaacagaactgcattggcggctttatctgcccacaccgtaccatctaaggctacgggcaggcatcaggaaatattggacggcgcgttggatgacgcgctggttgagcccgatttcaattctcagctcaacccgatggtgcgtcaggcggttgccgcacttaatgcttgcaacagctacgaggaggcagatgccgcactgaatgcgctttatccgaatttggacaacgcgaaactgcgtacctatatgcagcaggccttgtttatcagcgatattttgggacaagaccatgcccgcgcctga

SEQ ID NO: 36971 - DNA, 492 bp, Neisseria meningitidis
atgaattccctctttgtggacaatactgttttcattacacggctgaaagccgggcatatcggcaggttggttcaggcgttgtttgaggagtggcacggatttgaaccgtggtcttctgtggataagattcgtgcctattacggcagatgtttgaaagatgacgaactgccgctggcttttgcggctgtggatgatttcggaaccctgttgggttcggctgcggtcaagcggcatgatatggaaagttttccacagtatgaatattggttgggtgatgtctttgttttacctgaatatcgcggaaaaggcattggcaggaggctggtcgcccactgcataggcgcagcgcgttcgctggggataaagttcttgtatctttatacgcctgatgtgcaaatattttatgaatcattcggctgggcggttgtcgggcgacatttccataacggtgaatgggttacggttatgcgtttggatatggataaggtttaa

SEQ ID NO: 36972 - DNA, 915 bp, Neisseria meningitidis
atgaaacaaattaatcaagcattgcaacaaaaactggttgaatttaaagaaaaatcgggaatgaaccaaacccaactggcacgcggtatcgatacttcgccggcctccatcagtatgtatctgaacggcacttatgccgataaaggcggcaattatgaaaccatcgagacgaaaatcgaggcgtttttggagatggaggacagtaaggcgcgacgtgaagagctggtgttgggatttgtatcgactaagacgacacgccgaatcgcggaagtgatgcgcgatgcgcacgaaggcggcgaaacggtggtgatctacggtcaggcgggtttgggcaagacgcagtcggtcaaaaactactgcgagaaaaaccctgcggctatcttgattgaggctaatccgagctttacggctttggtactgatgcgcaagttggcgacggcggcgaaggtatcggcgatgggcagcctgaatgatttgtttgagtctgtatctgaccgcctgcgcgattcgggccgtctgattgtggtcgatgaagcggaaaacctgcccttgcgcgcccttgagattatccgccgactgcatgatgaaacgggctgcggtttggtgttgagcggtatgccccgactggttgcgaatttgcgcggtaagcatggcgagctggtgcaactttatagccgcgtgtctgttgcgctgaatttgggcgaatctttgccggatgacgaactctttgagattgcgaaagcggctttgcctgatgcggacgaagaaacgctcttggaactggttaaacatagtaacggcaatacgcgccggatgagtaaattgatgcgcggcgcggtacgcacggcgaacaagaacggtatcaagatgcaggccggtatcgttaagaaatacagctccctgattatccgatag

SEQ ID NO: 36973 - DNA, 1044 bp, Neisseria meningitidis
atgagtaaaaaaatcaaagtcggcattgtcggcgcgacgggctacacgggcgtggaactgctgcgcctgcttgccgcccatcccgatgtcgaagtcgccgccgtaaccagccgcagcgaagcgggaactgcagttgccgattactttccgagtttgcgcggcgtgtacggcctcgccttccaaacgcccgacgaggcaggtttggaacaatgcgacatcgtcttcttcgccacgcccaacggcatcgccatgaaagacgcgccgcgcctgattgaacagggcgtgcgcgtcatcgacctttccgccgacttccgcatacgggacattccgacctgggaacactggtacggcatgacccacgccgcccccgacctcgtttcccaagccgtgtacggattgagcgaactcaaccgcgaagccgtcgcacaggcacgcctcgtcgccaaccccggctgctacccgacctgcgtatccctgccgctcgtgccgctgttgcggcaatgccgtctgaagcccggtatgccgctgattgccgactgcaaatccggcgtgtccggcgcgggcaggaaaggcaatgtcggttcgctgttgtgcgaagccggcgacaacttcaaagcctacggcatagccggacaccgccacctgcccgaaatcaggcagaccatcgccgggcttcaggacggcatcgccgaaggattcgtgttcacgccgcacctcgcgccgatgatacgcggtatgcacgccaccgtttacctccacctttcagacggcagcaaccccgaaaccgttttgcgcgactattatcgcgacagcctgttcgtggacatcctgcccgccggttcgacacccgaaacccgcagcgtgcgcggcgcaaacctctgccgcatcagcatccaacaggcggcgcaatccgatgtgtgggtcgtcctttccgtcatcgacaacctcgtcaaaggcgcggcgggacaggcggtgcaaaatatgaacatcatgttcggactgaaggaaacacacggcttggacgcaatccccctgctcccctga

SEQ ID NO: 36974 - DNA, 876 bp, Neisseria meningitidis
atgagtcaacactctgccggagcacgtttccgccaagccgtgaaagaatcgaatccgcttgccgtcgccggttgcgtcaatgcttattttgcacgattggccacccaaagcggtttcaaagccatctatctgtccggcggcggcgtggcagcctgttcttgcggtatccctgatttgggcattaccacaatggaagatgtgctgatcgacgcacgacgcattacggacaacgtggatacgcctctgctggtggacatcgatgtgggttggggcggtgcattcaatattgcccgtaccattcgcaactttgaacgcgccggtgttgcagcggttcacatcgaagatcaggtagcgcaaaaacgctgcggccaccgtccgaacaaagccattgtatctaaagatgaaatggtcgaccgtatcaaagctgccgtagatgcgcgcgttgatgagaacttcgtgattatggcgcgtaccgatgcgctggcggtagaaggtttggatgccgctatcgaacgcgcccaagcttgtgtcgaagccggtgcggacatgattttccctgaagccatgaccgatttgaacatgtaccgccaatttgcagatgtggtgaaagtgcccgtgttggcgaacattaccgagtttggttccactccgctttatacccaaagcgagctggctgaaaacggcgtgtcgctggtgctgtatccgctgtcatcgttccgtgcagcaagcaaagccgctctgaatgtttacgaagcgattatgcgcgatggcactcaggcggcggtggtggacagtatgcaaacccgtgccgagctgtacgagcatctgaactatcatgccttcgagcaaaaactggataaattgtttcaaaaatga

SEQ ID NO: 36975 - DNA, 906 bp, Neisseria meningitidis
atgaatccggcaatgattgagcgtcttaaggcagtcgagaatcaggcggaagcaatgggacgcggcgcacgctctgcatatcttaagcagcaggcgcaggaattgggcatcagccttgccacgctataccgcaagctggaggcggtcagcatcaagccgacgcgcaaacggcgcagcgatgcgggcaagacggagcttaaaacggaagaagccaaattgatttcggcggttttggtggaggcgatgaggcgcaacggcaagcggttgatgtcggtgcggcaggcggtggaaatgctgcgcaccaacggaaaaatcgaggcggcgcggattgatggggaaaccggggaagtcatcccgtccgtccgcactgctttccgcccgctggcaagacatcgacctcaccgcccggttatggcacatccccgccgccgacatgaagaccaaacacccctttaccgtcccactgtcggactgggcggtagaaatactccgagagctgcacacgcagaccggcgacaacatccaccttttccccggcatccgcccacggcgcaaacccgccccccccatcccgaccacatcagcatcaaattcgcccacaacgccatccgacgactgggctatgacggcagcacccccggcaaatccaaacacacaatgcacggattccgccacctcttcaccaacatcagcctgaccgccggaaaagacaccctcacaacagacctcgccctcggccacatcagccgcgccgccctccaacgcgccggcttctcaagcctgcaccactacctgaccgccgacagctaccgcctccaagagcggcgcgaactcgccgaatggtacagccgccgccaccgccaagcatacgaagccgccgcccaaaacacttgcaataaaacctaa

SEQ ID NO: 36976 - DNA, 1086 bp, Neisseria meningitidis
atgactgttccctgtattccgcgcggcctcgtcatggccgacattgccgccttccgcctgaccgaagaggaaaagcaacgccttctcgatcccgccgtcggcggagtcatcctgttccgccgcaacttccaaaatatcgcacagctcaaagaactcaccgccgaaatcaaagccctgcgcacacccgaactcattatcgccgtcgatcacgaaggcggcagggtgcaacgtttcatcgaaggcttcacccgcctgcccgcaatgagtacgctcggcgagatttgggacaaagacggcgcgtccgccgccgaaaccgccgccggacaagtcggccgggttttggcaaccgagctttccgcctgcggcatcgatttgtccttcacgcccgtcttagatttggactggggaaactgccccgtcatcggcaaccgcagtttccaccgcaatcccgaagcggtcgcccgccttgccctcgcccttcaaaaaggtttggaaaaaggcggtatgaaatcctgcggtaaacattttcccggacacggatttgtcgaaggagacagccatttggtgctacccgaagacgggcgcagcctgtccgaactcgaagccgccgacctcgcccccttccgcattatgagccgcgaaggtatggcagcggttatgcccgcccacgtcgtttatccgcaagtggacacaaagcccgcagggttttccgaaatctggctcaaacaaattttgcgccgcgacatcgggtttaaaggcgtaattttctcggatgatttgactatggagggcgcgtgcggggcaggcggcatcaaagaacgcgcccgcatttcctttgaggcaggttgcgacatcgtcctcgtctgcaaccgtcccgaccttgtggacgaactgcgcgaagatttccgcattcccgacaatcccgctttggcgcaacgttggcaatatatggccaacacgctcggcagtgccgccgcgcaagccgtgatgcaaacaacggatttccaagcggcgcaagcctttgttgccggccttgcctcgccgcaggacacggcgggcggcgtgaaagtcggagaggccttttaa

SEQ ID NO: 36977 - DNA, 1881 bp, Neisseria meningitidis
atgaatattttttacgaagagtccggccaattcaaaatcgccgccatcatccaaaaaaacgatgccacctaccaagtcgataccccacacggcaaacgcaccaaagtgaaggcgaacaacgtctttgccgagtttgacggcgatatggcggcgtttttggaaaacgcgcaggcacaggcggcggacatcgacaccgatttattgtgggaagtatgcggcgaagaggaatttaccgctgaagccatagccgaagaatattacggccatgcgccgaccaaaaccgagctggcggcgaccttgattgcgctgtacgccgcgccgatgtatttctacaaaaaagccaaaggcgtgttcaaagccgcgcccgaagaaactttgaaacaggcacttgccgccatcgaacgcaaaaaacagcaagacgcgcaaatcgacgcttgggcggaagccttgaaacgcggcgagatgccgtctgaaatcgcggcggatctgaaaaccatcctgcacgcgcccgacaagcagtcgctgacctacaaagcctttaccaaagccgccgacgcgctgaaaacctctgcctacgaattggcgaaaaaaacgggcggcattacgtccattccccaatacctgcaagacgggtttgaaatcaaatacttccccaaaggaacaggcttccccgaccttccgcttcccgaaatgcccgacctgcccaaggctgacgttaccgccttttccattgacgacgaatcgaccaccgaagtggacgacgctttaagcctgaccgacttggacaacggcacgaagcgcgtcggcatccacatcgccgcgccgtcgcttgccattaaacaaggcgacaaaatggaaaaaaacatcatggaacgcttgagcacggtttatttccccggcggcaaaatcacgatgctgcccgaaaactggattgccgcgttcagccttgatgcaggtgcataccgcccttccatcagcatttatttcgatgtggacagcgagttcaacgtcggcgcgccgacctgcaaaatcgaagcggtcaacatcgccgaaaacctgcgtatccaagccatcgaaccgcatttcaacgccgaagcgggcttggacgaagcgggcgaaatgatgttcgcccaccatcaagacctgatttggttctatcaattcgccaccgccctgcaaaaagcgcgcggcaaatacgagcccgaccgtgcgccgcaatacgattacagcatcgaattggatgaggaaggcaacgtatccgtcgtccgccgcgaacgcggttcgcccatcgatacgctggtcagcgagatgatgattcttgccaacagcacttgggcgcaaatgctggacgaaaacgagctgcccggccttttccgcgtccaaccggcaggcaaagtgcgcatgagcaccaaatccgagccgcacatcggcatgggcgtgcagcattacggctggttcacttcgccgctgcgccgcgccgccgactacatcaaccaaaagcagctgatcagcctgatagacgactctgccgagccgctgtatcaaaacagcgatgccgagcttttcgccgcgctgcgcgactttgatgccgcctataccgcctacgccgacttccaacgccaaatggaagcctactggagcctcgtctatctgcaacagcaaggcacgagcgagctgacggccaccatcctcaaagaagacctcgtccgcattgaaggcctgccgctggtaacgcgcgcgaccggtattccgtttgacgcgctgcccaaatcacaggcattgttcaaaatcaccgaattggatgccgagaagcagtttgtctcgctcaactacatcaaggcagtcgcacccgcgggtacaacggcaggcaatgccgtctga

SEQ ID NO: 36978 - DNA, 933 bp, Neisseria meningitidis
atgtatgagataaaacagccttttcatagcggatacttgcaggtgtctgaaattcatcaaatttattgggaagagtcgggcaatcccgacggtgtgccggtcattttcctgcacggcggaccgggcgcgggggcttcgcctgaatgtcggggttttttcaatcccgatgtgttccgcatcgtcatcatcgaccagcgcggttgcggacgttcgcgcccgtatgcttgtgcggaagacaatacgacttgggatttggtggcggatattgaaaaagtccgtgaaatgctgggtatcaggaaatggctggtgttcggcggttcgtggggcagcactttgtcgctggcttatgcccaaacccatcctgaacgggtaaagggattggtattgcgcgggatatttttgtgcaggccgtctgaaacggcgtggctgaacgaggcgggcggtgtgagccggatttatccggaacaatggcaaaaatttgtcgcgccgattgctgaaaatcgacggaaccggctgattgaggcgtatcacgggttgctgtttcatcaagatgaagaagtgtgcctgtctgccgcaaaggcttgggcggattgggaaagctatctgatccgtttcgagccggaggaagtggatgaagatgcttatgcctcgctggcaatcgcgcgtttggaaaaccattattttgtcaacggcggctggttgcagggcgatagggcgattttgaacaatatcggcaaaatacggcatatcccgaccattatcgtgcaggggcggtatgatttgtgtacgccgatgcagagtgcgtgggcgctgtcgaaagcctttccggaagcggaattgagggtggttcaggcagggcatcgtgcgttcgatccgcctttggcggatgcgctggttcaggcggttgaggatattttgccccgtttgttgtaa

SEQ ID NO: 36979 - DNA, 225 bp, Neisseria meningitidis
atggacgcggttcaagagttggaacgccgtattgtcgaactggaaatccaatccgcgcttcaggaggacgtaatcgccggcctgaacgcgatggtggcggaattgcggcagacgctggatttgcagcaggctcagttgaggctgctgtatcaaaaaatgcaggacaggaatcccgacgcgcaagagccgtattccctgcgcgacgagattccgccgcattattga

SEQ ID NO: 36980 - DNA, 747 bp, Neisseria meningitidis
atgacctcatgtgaacctgtgaatgaaaagacagatcaaaaagcagtaagtgcgcaacaggctaaagaacaaaccagtttcaacaatcccgagccaatgacaggatttgaacatacggttacatttgattttcagggcaccaaaatggttatcccttatggctatcttgcacggtatacgcaagacaatgccacaaaatggctttccgacatgcccgggcaggatgcttactccattaatttgatagagattagcgtctattacaaaaaaaccgaccaaggctgggttcttgagccatacaaccagcaaaacaaagcacactttatccaatttctacgcgacggtttggatagcgtggacgatattgttatccgaaaagatgcgtgtagtttaagcacgactatgggagaaagattgcttacttacggggttaaaaaaatgccatctgcctatcctgaatatgaagcttatgaagataaaagacatattcctgaaaatccatattttcataaactttactatattaaaaaaggagaaaatccggcgattattactcatcagaactatcataggtatggagagaacgattacagcactagcgtaggttcctgtattaacggtttcacggtacggtattacccgtttattcgggaaaagcagcagctcacacagcaggagttggtaggttatcaccaacaagtagagcaattggtacagagttttgtaaacaatccaagtaaaaaataa

SEQ ID NO: 36981 - DNA, 408 bp, Neisseria meningitidis
atgacttataccactgccaaagccgccgaaaaaataggcatctccgcccacaccctacgtttttacgacaaagaaggtttgttgcctaatatcggacgtgatgaatacggtaaccgctgttttaccgataacgatttgcaatggttgggcttattgcaatgcttgaaaaatacggggatgagcttaaaagacatcaaacgctttgcggaatgtaccgtcattggcgacgataccattgaagaacgcctttccttgtttgaaaatcaaatagaaaatgtgaagtgtcaaattgccgaattaaaacgctatttagatttgcttgaatacaaattggcgttttaccaaaaagcgaaagcattaggttcggtaaaagccgtaaatttgccgcaaattcctgaaacggcttag

SEQ ID NO: 36982 - DNA, 1035 bp, Neisseria meningitidis; identical to SEQ ID NO: 36789

SEQ ID NO: 36983 - DNA, 1056 bp, Neisseria meningitidis
atgactattttatcggacgttaaagcattaggacaacaaatctggctggacaacctttcccgctcgctggtgcaaagcggcgaattggcgcaaatgttgaaacaaggcgtgtgcggcgtaacttccaatcccgccattttccaaaaagccttcgccggcgacgcgctttatgccgacgaggttgccgccctcaagcagcaagacctcagccccaaacaacgctacgaaacaatggcggttgccgatgtgcgtgccgcctgcggcatctgtcttgccgaacacgaatccaccggcggcaaaaccggtttcgtcagcctcgaagtttcgcccgaattgtccaaagacgcgcaaggcacggtagaagaagcgcgccgcctctacgccgccatcgggtgcaaaaacgcgatgattaaagtgcctgccaccgacgcaggcatcgatgcgctcgaaaccctcgtttcagacggcatcagcgtgaacctgaccctgctgttctcacgcgtccaaaccctcaaagcctacgccgcctacgcgcgcggcattgccaaacgcttggcagccggacaaagcgttgcccatatccacgtcgtcgccagcttcttcatctcccgtgtggacggcgcgctggacacaacgctgcccgaccacctcaaaggcaaaatcgccatcgcccttgccaaagccgcctatcaagattgggaacaatatttcaccacccccgaatttgccgcactggaagcccaaggcgcaaaccgcgtgcagcttttatgggcatctaccggcgtgaaaaacccagcctatcccgacacgctctacgttgacaacctgatcggcgcgcacaccgtcaacaccgttcccgatgccacgctcaaagcctttatcgaccacggcacagccaaagccacgctgaccgaaggcgtagaagaagcacaagcgcagcttgccgaaaccgccgcgctcggcatagacgtagaaaccctcgccaaccgcttgcaggaagacggtttgaaacaatttgaagaagcgtttgaaaaactgctcgcaccgttggtttaa

SEQ ID NO: 36984 - DNA, 420 bp, Neisseria meningitidis; identical to SEQ ID NO: 36841

SEQ ID NO: 36985 - DNA, 612 bp, Neisseria meningitidis
atgcgccgcgccatccttctgattctgaccctgactgccggcacgtcccttgctgccggcttcagccaaaaagacacgccgatcaacacccgctaccgcgaaacgcccgaagaagccgccgcccgcgaatttaaagaacataccgccaaactgccgccgctgcccgatacgcactcggacggctggtttgacatttatgtggatgaaaattacggcaaacagccgaaaatcctgctcgacagcctgcaaattatgcccgcgcccgacggcagcatccgctacattctcaatatccgctccgacaaaggctacgacaacctgactgccgaaggcatattctgcgcccgctcatccatccgtttcggcaacgacaaactttcctcctacaaagtgttcggctacggcgacacggtcaaccgccgctggatacagccccgaaacgccgaatggaaaccgataggcggtacattaagccgcaacgacgcactgcgcaccgtcctgtatcaggcattctgcgagggcggtgtacccgccgacacgaaaggtttggtacaacgcctgaaagaacgtgccggacgctatgccccgtcgataaagccgcacgacaaataa

SEQ ID NO: 36986 - DNA, 1908 bp, Neisseria meningitidis
atgaacccaagccccctactcgacctgattgacagcccgcaagatttgcgccgtctggacaaaaaacagctgccgcgccttgccggcgagttgcgcacctttctgctggaatctgtcgggcagaccggcgggcatttcgccagcaatttgggcgcggtcgaactgaccatcgccctgcactatgtgtacgacacgcccgaagacaagctggtgtgggatgtcggacaccaaagctatccgcacaaaatcctgacaggcaggaaaaaccagatgcacaccatgcgccaatatggcggtttggcgggttttccgaaacgttgcgagtccgagtacgacgcgttcggcgtggggcattcctccacctccatcggcgcggcgttgggcatggcggcggcagacaaactcttgggcagcgaccgccgcagcgtcgccatcatcggcgacggcgcgatgacggcggggcaggcgtttgaagccttgaattgcgcaggcgatatggatgtggatttgctggtcgtcctcaacgacaacgaaatgtcgatttcccccaacgtcggcgcgctgccgaaataccttgccagcaacgtcgtgcgcgatatgcacggcctgttgagtaccgtcaaagcgcaaacgggcaaggtattagacaaaatacccggcgcgatggagtttgcccaaaaagtcgaacacaaaatcaaaacccttgccgaagaagccgaacacgccaaacagtcgctgtctttgtttgaaaacttcggcttccgctacaccggccccgtggacggacacaacgtcgaaaatctggtggacgtattgaaagacttgcgcagccgcaaaggccctcaactgctgcacgtcatcaccaaaaagggcaacggctacaaactcgccgaaaacgaccccgtcaaataccacgccgtcgccaacctgcccaaagaaagcgcggcgcaaatgccgtctgaaaacaaacctgccgccaaaccgacctatacccaagtgttcggcaaatggctgtgcgaccgggcggcggcagattcccgactggttgcgattacccccgccatgcgcgagggcagcggcttggttgagtttgaacaacgattccccgaccgctatttcgacgtcggcattgccgagcagcacgccgttacctttgccggcggtttggcttgcgaagggatgaagcccgtcgtggcgatttattccacctttttacaacgcgcctacgaccaactggtgcacgacatcgccctgcaaaacctgcccgttttgtttgccgtcgaccgcgcgggcatcgtcggcgcggacggcccgacccatgccggtttgtacgatttaagctttttgcgctgcattccgaatatgattgtcgccgcgccgagcgatgaaaatgaatgccgcctgctgctttcgacctgctatcaggcagacgcgcccgccgccgtccgctatccgcgcggcacgggtacgggcgtgccggtttcagacggcatggaaaccgtggaaatcggcaagggcattatccgccgcgaaggtgagaaaaccgccttcattgccttcggcagtatggtcgcccccgcattggcggttgccgaaaaactgaacgccaccgtcgccgatatgcgctttgtcaaaccgatagacgaagagttgattgtccgccttgcccgaagccacgaccgcatcgttacccttgaagaaaacgccgaacagggcggcgcaggcggcgcggtgctggaagtattggcgaaacacggcatctgcaaacccgttttgcttttgggcgttgccgataccgtaaccggacacggcgatccgaaaaaacttttagacgatttgggcttgagtgccgaagcggtggaacggcgtgtgcgcgcgtggttgtcggatcgggatgcggcaaattaa

SEQ ID NO: 36987 - DNA, 717 bp, Neisseria meningitidis
atgacagacaccgccgaaaaccaaacaccaaacgaccgtcaagccggacatccccgcagcatccgcagtttcgtcctccgccaaagccatatgaccgccgcgcagcaacgcgccatcgataccttatgggacagcttcggcatcgattaccaagcaacaccggtcgatcttgatgccaatttcggaagcaaccgccccaaaatcctcgaaataggcttcggtatggggacagcaaccgcagaaatcgccctccgcctgcccgaaaccgacttcctcgccatcgacgtacacggtcccggcgtaggcaacctgctcaaactcatcaacgaaaaccatttagaaaacatccgcgtgatgcggcacgatgccgtagaagttgtcgaaaatatgctgcaagacggctcgctcgacggcatccacatattcttccccgacccgtggcacaaaaaacgccaccacaaacgccgtctgatacaagcccccttcatcgccaaactactgcccaaactcaaaaccggcggctatatccacctggcgacagactgggaagaatatgcacagcagatgcttgaagtcctcagtagcttcgacagcctgcaaaatacggcgacagactacgcccctaccccggactaccgccccgaaaccaaattcgaagcgcgcggcaaacgtctcggacacggcgtttgggacttggtattcaaacggatcagataa

SEQ ID NO: 36988 - DNA, 516 bp, Neisseria meningitidis
atgaaatcaaaactccccttaatcctaatcaacttttccctgatttcaagcccattgggtgcgaatgcggccaaaatctacacctgcacaatcaacggagaaaccgtttacaccaccaagccgtccaaaagctgcctctcaaccgatttgcccccaatcggcaactacagcagcgaacgctatatcccgccccaaacatccgaaccgacaccatcaccgtcaaacggcggacaggctgtcaaatataaagccccggtcaaaacagtatccaagccggcaaaatccaatacgcccccgcctcaacaagcacctgtaaacaacagcagacgctccattctcgaagcagaattgagcaacgaacgcaaagccctgactgaagcccaaaaaatgttatcacaagcacgtctggcaaagggcggcaacatcaaccatcaagaaataaatgcattacaaagcaatgtattggacaggcagcaaaatatccaagcactgcaaagagaattgggacgtatgtaa

SEQ ID NO: 36989 - DNA, 945 bp, Neisseria meningitidis
atgcttgaacaaaaccactatatcaacctttccctcgcgctgacgatgtcgcccgatgccggaacttatgccgcgctgctttccagtgtgaacgcggtactcgattgcgagaaagaaggcgaagtgcagtggttcgccctgccggtcgtgctggtgtccggctgcaagaaagaacgggcaatcgagatgaagctgccgacggaggcattgtttgcctgtttgcaaaactatccgcacctgcgcgcgttggcgcaagagacacaatggctgccttatcttgtgcattcttccgatttaagtgcggtcgcgccggatgagtggtggcgtgccaaacaaaataccgaagcggcagcgcaacacttacgccgtttcgccccgcgccctttgctgttgcccgaagggcagtccgtccacgtcgtttacgcgctgggtttcggtagcggcaaagttcagacggcattgggtcagaaccttcttcaggcaggtctgcccttgatgcaggtatggcaggaaaatcttgcatcggaaggcgttacgctgtttgccaacccgctttccccggattctccggtacgcgcgctttcagagggcagccacacgcgccaacgtatggcgatggatgtttttgcggcaaacgcgatacgcgccgtccgtatgcagagcccgcgcgtcggcgtggtcgctgcggcaaaggtaggtggacagattctattcggatttaatgcgaccgacggcgcgtttgaagtcgtgccgcaggtgttttcgtggcagctttcctttaccgacaatatcgccgttgttcagcaaaattttttggatttaatggcagaatgccgtgtagaacacgtttacctgttgcacaatcccttgggcgaacaggaaagcatcccgagctatgcggaagcattgaaacgggaagggcacaatccgtttttcagcgcatag

SEQ ID NO: 36990 - DNA, 4170 bp, Neisseria meningitidis
atgaccgataccgcaccgacagataccgatccgaccgaaaacggcacgcgcaaaatgccgtctgaacaccgccctgccccgccggcaaaaaaacgccgcccgctgctgaagctgtcggcggcactgctgtctgtcctgattttggcagtatgtttcctcggctggctcgccagtacggaagcgggtttgcgcttcgggctgtaccaaatcccgtcctggtttggcgtaaacatttcctcccaaaacctcaaaggcacgctgctcgacggcttcgacggcgacaactggtcgatagaaaccgagggtgcagaccttaaaatcagccgcttccgcttcacgtggaaaccgtccgaactgatgcgccgcagcctgcacattaccgaaatttccgccggcgacatcgctatcgttaccaaaccgactccgcctaaagaagaacgcccgccactcagccttcccgacagcatagacctgcctgccgccgtctatctcgaccgcttcgagacgggcaaaatcagcgtcggcaaaacctttgacaaacaaaccgtctatctcgaacggctggatgcttcataccgttatgacatcaaaggacaccgtctcaacctgaaaaccgccgacaccccgtggagcaaatcgaccggcgcagtcgtaatcggtctgaaaaaaccttttgtcctcaacactgccatctacaccaaaggcgaactggaaggcgaaaccatacacggtacggcgcgcctgtggggcagtttgcaggatatgcacaccgacctgatactggatggcgacaatatccatttatcggggaaatccgtcatccacccgtttgccgaatcattggataaaacattggaagaagtgctgattaaaggattcaacatcaatccatccgccttcctgccctccctacccaaagcaaggcttaactttgacctgaccgccattccgtctttttcagacggcatcgcactggaaggctcgctcgatttggaaaacaccaaagccggttttgccgaccgcaacggcatccccgtccgtcaggttttaggcagctttgtcatccggcaggacggcacggtgcatatcggcaatacgtccgccgccctgctcggacggggcggcatcaggctgtcgggcaaaatcgacaccggaaaagacatcctcgatttaaatataggcatcaactccgtcggcgcggaagacgtactgcaaaccgcgttcaaaggcaggttggacggcagcatcggcatcggtggcacgaccgcctcgcccaaaatctcttggcaactcggcatcggcacggcgcgcacggacggcagcctcgccattgcaagcgaccccgcaaacggacagcggaaactggtgctcgacaccgtcaacatcgccgccgggcaaggcagcctgaccgcgcaaggctatctcgagctgtttaaagaccgcctgctcaagctggacatccgttcccgcgcattcgacccttcgcgcatcgatccgcaacttccggcaggcaatatcaacggctcaataaaccttgccggcgaactggcaaaagagaaattcacaggcaaaatgcggtttttacccggcacgttcaacggcgtaccgattgccggcagtgccgacattgtttacgagtcccgccaccttccgcgtgccgccgtcgatttgcggctggggcggaacattattaaaacagacggcggcttcggcaaaaaaggcgaccggcttaacctcaatatcaccgcacccgatttatcccgtttcggtttcggactcgcggggtctttaaatgtacgcggacacctttccggcgatttggacggcggcatccgaacctttgaaaccgacctttccggcgcggcgcgcaacctgcacatcggcaaggcggcagacatccgttcgctcgatttcacgctcaaaggttcgcccgacacaagccgcccgatacgcgccgacatcaaaggcagccgcctttcgctgtcgggcggagcggcggttgtcgataccgccgacctgatgctggacggcacgggcgtgcagcaccgcatccgcacacacgccgccatgacgctggatggcaaaccgttcaaattcgatttggacgcttcaggcggcatcaacagggaacttacccgatggaaaggcagcatcggcatcctcgacatcggcggcgcattcaacctcaagctgcaaaaccgtatgacgctcgaagccggtgcggaacgcgtggcggcaagtgcggcaaattggcaggcaatgggcggcagcctcaacctgcaacacttttcttgggataaaaaaaccggcatatcggcaaaaggcggcgcacacggtctgcatatcgccgagttgcacaatttcttcaaaccgcccttcgaacacaatctggttttaaacggcgactgggatgtcgcctacgggcgcaacgcgcgcggctacctcaatatcagccggcaaagcggcgatgccgtattgcccggcgggcaggctttgggtttgaacgcattttccctgaaaacgcgctttcaaaacgaccgtatcggaatcctgcttgacggcggcgcgcgtttcgggcggattaacgccgatttgggcatcgccaacgccttcggcggcaatatggcaaatgcaccgctcggcggcaggattaccgcctcccttcccgacttgggcgcattgaagccctttctgcccgccgccgcgcaaaacattaccggcagcctgaatgccgccgcgcaaatcggcggacgggtaggctctccgtccgtcaatgccgccgtcaacggcagcagcaactacgggaaaatcaacggcaacatcaccgtcgggcaaagccgctctttcgataccgcgcctttgggcggcaggctcaacctgaccgttgccgatgccgaagtattccgcaacttcctaccggtcggacaaaccgtcaaaggcagcctgaatgccgccgtaaccctcggcggcagcatcgccgatccgcacttgggcggcagcatcaacggcgacaaactctattaccgcaaccaaacccaaggcatcatcttggacaacggctcgctgcgttcgcatatcgcgggcaggaaatgggtaatcgacagcctgaaattccggcacgaagggacggcggaactctccggtacggtcggtatggaaaacagcggacccgatgtcgatatcggcgcggtgttcgacaaataccgcatcctgtcccgccccaaccgccgcctgacggtttccggcaacacccgcctgcgctattcgccgcaaaaaggcatatccgttaccgggatgattaaaacggatcaggggctgttcggttcgcaaaaatcctcgatgccgtccgtcggcgacgatgtcgtcgtattaggcgaagtcaaaaaagaggcggcggcaccgctccccgtcaatatgaacctgactttagacctcaatgacggcatccgcttcgccggctacggcgcggacgttaccataggcggcaaactgaccctgaccgcccaatcgggcggaagcgtgcggggcgtgggcacggtccgcgtcatcaaagggcgttataaggcatacgggcaggatttggacattaccaaaggcacggtctcctttgtcggcccgctcaacgaccccaacctcaacatccgcgccgaacgccgcctttcccccgtcggtgcgggcgtggaaatattgggcagcctcaacagtccgcgcattacgctgacggcaaacgaaccgatgagtgaaaaagacaagctctcctggctcatcctcaaccgcgccggcagtggcagcagcggcgacaatgccgccctgtccgcagccgccggcgcgctgcttgccgggcaaatcaacgaccgcatcgggctggtggatgatttgggctttaccagcaagcgcagccgcaacgcgcaaaccggcgaactcaaccccgccgaacaggtgctgaccgtcggcaaacaactgaccggcaaactctacatcggctacgaatacagcatctccagcgcggaacagtccgtcaaactgatttaccggctgacccgcgccatacaggcggttgcccgtatcggcagccgttcgtcgggcggcgagctgacatacaccatacgtttcgaccgcttctccggttcggacaaaaaagactccgccggaaacagcaaaggaaaataa

SEQ ID NO: 36991 - DNA, 1974 bp, Neisseria meningitidis
atggttaccgccgccatatccgtttactgcatcgcctaccgtttttacagcctctacatcgccaaccacgtaatgcggctcgatcctaaccgcctgactccggcagaacgccacaacgacggcttggactacgttccgacgcacaagggcgtattgttcggacaccactttgccgcgattgcgggcgcgggccctttggtcggcccggttttggcggcgcaaatgggttacctgcccggtactttgtggattatcttcggcgtggtgtttgccggcgcggtacaggatatgatggtcttgttcgtctctatgcgccgcgacggtaagtctttgggcgatattgtgaaacaggaactcggcactgtccccggcgtgattgcctccatcggtattttgatgattatggtcatcattatggcggtgttggcgttgattgtcgtaaaagcactggttcacagcccttggggtacgtttaccatcgccgccactatgccgattgccctgtttatgggtatttacacgcgctatatccgtccgggcaaaatcggcgagatttccatcgtcggctttattttgctgatgctggcggtaatttacggcgaagatgtggcgaaaagttccatcggacattggttcgaccttgacggcatccagctcacttgggcgattatgatttacggctttgtcgcctccgtattgcccgtatggttgctgctcactccgcgcgactatctctccaccttcctgaaaatcggtacgattgcggccttggctttgggcatcgtcatcgtcaatcccgctttgcaaatgcctgccgtaacccactttatcgacggttcgggtccggtattctcaggcgcattgttcccgttcctcttcatcaccatcgcctgcggtgcggtttcgggcttccacgcgctgatttcctccggcaccacgccgaaaatgctggaaaacgaaacccacgtccgtatgattggttacggcggtatgttgatggaaagtttcgtagccattatggcgcttgccgccgccgcatcgcttgatcccggcgtgtacttcgccatgaacagccctgccgccctgatcggtacggatgccaataccgccgccgaagtgattaccaccaagctgcaattccctgtcgatgcggcaaccctgttgcacaccgctaaggaagtgggcgaaaacaccatcctttcccgtgccggcggtgcgcccaccctcgcagtcggtatggcgcacattatgagccgcctgattccgggcgaggcgatgatggcgttctggtatcacttcgccctgttgtttgaagccttgttcatcctgaccgccgtcgatgccggtacgcgcgtcgcacgttttatgattcaagacttaggcagcatcttctacaaacctttcggcaacaccgactccatccctgccaacctgattgcgaccttcttcgccgtggcattgtggggctacttcctctacaccggcgtaaccgacccgctgggcggcatcaactcgctctggcctttgttcggcatcgccaaccaaatgctggcaggcgtagccttgattatgtgcgccgtggtgctgattaagatgaaacgcgaccgttatgtctgggtggtactcgttcccgccgtcggcgtactgtttgtaacctgctacgccggcctgcaaaaactgttccacagcgacccgcgcatcagcttccttgcccacgccggcaaatacagcgacgcattggctaaaaacgaagtcctcgcgcccgctaaagacatcggcgaaatggcgcaaatcatcttcaacgacaagattaatgccggtctgaccatcctcttcttgtcggttgtcgtgattgtcgccgcgtacggtttgcgtaccgccctcaaagcacgcaaagtcggctggccgaccgccaaagaaatcccggcggtgtaccgcgacggcaaacagccggaggcacaaagtgaagcataa

SEQ ID NO: 36992 - DNA, 1575 bp, Neisseria meningitidis
atggctcaaatccaaatgagcgcaaatgttaaaaccatcaacgccgtctttgccgccatgctggtaggtacagtcggctattttatttatgggggcttgggttatacccattacaattacgccgccttattcattattgccacgatgttcggcgtgtttatggcgttcaacatcggcggcaacgatgttgccaattctttcggcaccagcgtcggtgcgggtacgctgaccatcccgcaggctttgctgattgcggcggtatttgaggtcagcggcgcggtcatcgcgggcggcgaggtaaccaataccatacgcaaaggcatcgtcgatttgaagggtgttgatttcgaacccatacagtttgtgtttattatgatgtccgcgcttttggcggcggcgttgtggctgttgtttgcctcgaaaaaagggcttccggtatctaccacccattccattatcggcggcattgtcggtagcgcggtatgtatggcggtaatgaacgatgccgcatcgggcgatttgatacgttggggcaagctgggcggtattggtgtttcttgggtattgtcgcccgtgttgggcggcgcggtgtcctatttcctgttttcgcgcgtcaagaaaaacgtcttagattacaacgcttgggcggaaggcacgctcaagggcatcaagcaggaaaaaaaggcctataaagaacggcaccgcctgtttttcgagggtttgtccgaagccgaaaaagtcgagtacgccaccaaaatggcgcacgacgcgcaaatttacgacgaacccgaattcgatccgcaagagctgcaatcggagtattaccgcggtctttatgcgttcgacaaccgtaaaaacaatgtcgattcctacaaggcactgcattcttggattccctttatcgcttcgttcggcgcgatgatgatttccgctatgctgattttcaagggcttgaaaaacctgcatttggggatgagcaacgtcaacagcttcctgaccatctttatgataggcgcggcggtgtggatggggacgtttgtgtttgccaaaagcctcaagcgtaaagacttgggcaaatcgacctttcagatgttttcatggatgcaggtctttaccgcctgcggtttcgcattcagccacggtgcgaacgatatcgccaacgccatcggtccgtttgccgcgattatggatgttttgcgtaccaacagcgttgccgcgcaaaatgtcgtccccccgattgcgatgctgactttcggtatcgcgctgattgtcggtttgtggtttgtcggtaaagaggtgattaaaaccgtcggtacgagtttggcggaaatgcatcctgcttcgggttttaccgccgaactgtccgccgcatccgtcgtgatgggcgcgtcgctgatggggctgcccgtgtccagtacgcatatcttggtcggcgcggtactcggcatcggtctggtcaaccgcaatgccaactggaaactgatgaagcccatcggtttggcgtgggtcattaccctgcctgccgccgccgtattgtcggttgtctgctacttggttttacaggcagtattctga

SEQ ID NO: 36993 - DNA, 2037 bp, Neisseria meningitidis
atgactgacaacgcactgctccatttgggcgaagaaccccgttttgatcaaatcaaaaccgaagacatcaaacccgccctgcaaaccgccatcgctgaagcgcgcgaacaaatcgccgccatcaaagcccaaacgcacaccggctgggcaaacactgtcgaacccctgaccggcatcaccgaacgcgtcggcaggatttggggcgtggtgtcgcacctcaactccgtcgccgacacgcccgaactgcgcgccgtctataacgaactgatgcccgaaatcaccgtcttcttcaccgaaatcggacaagacatcgagctgtacaaccgcttcaaaaccatcaaaaactcccccgagttcgacaccctctcccccgcgcaaaaaaccaaactcaaccacgatctgcgcgatttcgtcctcagcggcgcggaactgccgcccgaacagcaggcagaactggcaaaactgcaaaccgaaggcgcgcaactttccgccaaattctcccaaaacgtcctagacgcgaccgacgcgttcggcatttactttgacgatgccgcaccgcttgccggcattcccgaagacgcgctcgccatgtttgccgctgccgcgcaaagcgaaggcaaaacaggctacaaaatcggtttgcagattccgcactacctcgccgtcatccaatacgccgacaaccgcgaactgcgcgaacaaatctaccgcgcctacgttacccgcgccagcgaacttttagacggcggcaaattcgacaacaccgccaacatcgaccgcacgctcgcaaacgccctgcaaaccgccaaactgctcggcttcaaaaactacgccgaattgtcgctggcaaccaaaatggcggacacccccgaacaagttttaaacttcctgcacgacctcgcccgccgcgccaaaccctacgccgaaaaagacctcgccgaagtcaaagccttcgcccgcgaaagcctgaacctcgccgatttgcaaccgtgggacttgggctacgccagcgaaaaactgcgcgaagccaaatacgcgttcagcgaaaccgaagtcaaaaaatacttccccgtcggcaaagtattaaacggactgttcgcccaaatcaaaaaactctacggcatcggatttaccgaaaaaaccgtccccgtctggcacaaagacgtgcgctattttgaattgcaacaaaacggcgaaaccataggcggcgtctatatggacctctacgcccgcgaaggcaaacgcggcggcgcgtggatgaacgactacaaaggtcgccgccgtttttcagacggcacgctgcaactgcccaccgcctacctcgtctgcaacttcgccccacccgtcggcggcagggaagcccgcctgagccatgacgaaatcctcaccctcttccacgaaaccggccacggcctgcaccacctgcttacccaagtggacgaactgggcgtgtccggtatcaacggcgtagaatgggacgcggtcgaactgcccagccagtttatggaaaatttcgtttgggaatacaatgtattggcgcaaatgtccacccacgaagaaaccggcgagcccctgccgaaagaactcttcgacaaaatgctcgccgccaaaaacttccaacgcggaatgttcctcgtccgccagatggagttcgccctcttcgatatgatgatttacagcgaagacgacgaaggccgtctgaaaaactggcaacaggttttagacagcgtgcgcaaagaagtcgccgtcatccaaccgcccgaatacaaccgcttcgccttgagcttcggccacatcttcgcaggcggctattccgcaggctattacagctacgcgtgggcggaagtattgagcgcggacgcatacgccgcctttgaagaaagcgacgatgtcgccgccacaggcaaacgcttttggcaggaaatcctcgccgtcggcggatcgcgcagcgcggcagaatccttcaaagccttccgcggccgcgaaccgagcatagacgcactcttgcgccacagcggtttcgacaacgcggcttga

SEQ ID NO: 36994 - DNA, 1677 bp, Neisseria meningitidis
atgtcccaacaatacgtctattctatgctgcgcgtgagcaaggttgtgccgccgcagaaaaccatcattaaagatatttccctttctttcttccccggcgcgaaaatcggcctgctcggtttgaacggcgcgggcaagtccaccgtgctgcggattatggcgggcgtggataaggaatttgagggcgaagccgtgccgatgggcggcatcaaaatcggctacctgccgcaagagcctgagcttgatccggaaaaaaccgtgcgcgaggaagtggaaagcggtttgggcgaagtggctgccgcgcagaaacgtttggaggaagtgtatgccgagtacgccaatcctgatgcggattttgacgcgttggcagaagagcagggccgcttggaagcgattattgcggcaggttcgtccacgggcggcggtgcggaacacgaattggaaatcgccgccgacgcgctgcgcctgccggaatgggatgccaaaatcgataatttgtccggcggtgaaaaacgccgcgttgccttgtgcaaactcttgttgagcaagcccgatatgcttttgctggacgagccgaccaaccacttggatgcggaatcggtcgaatggctggagcaatttctcgtgcgcttccccggcacagtcgttgcggtaacgcacgaccgctacttcctcgacaatgccgccgaatggattttggaactcgaccgcggccatggtattccgtggaaaggcaattactcgtcttggctggagcagaaagaaaaacgcttggaaaacgaggcaaaatccgaagccgcgcgcgtgaaggcgatgaagcaggaattggaatgggtgcgccaaaatgccaaaggccgccaagccaagtccaaagcgcgtttggctcgttttgaagaaatgagcaactacgaataccaaaaacgcaatgaaacgcaggaaatcttcattcccgtcgccgagcgtttgggtaacgaagtgattgaatttgtgaatgtttccaaatcgttcggcgacaaagtgctgattgacgatttgagcttcaaagtgcctgcgggcgcgattgtcggcatcatcggtccgaacggcgcgggtaaatcgacactgtttaaaatgattgcgggcaaagagcagcccgattccggtgaagtgaaaatcgggcaaaccgtgaaaatgagcttgattgaccaaagccgcgaaggtttgcaaaacgacaaaaccgtgttcgacaacattgccgaaggtcgcgatattttacaggttggtcagtttgaaattcccgcccgccaatatttgggacgcttcaatttcaaaggcagcgaccaaagcaaaatcgccggcaacctttcaggtggcgaacgcggtcgtctgcacttggcgaaaaccttgttgggcggcggcaatgtattgctgttggatgaaccgtctaatgaccttgacgtagaaaccctgcgcgcgctggaagacgcattgctggaatttgccggtagcgtgatggtgatttcgcacgaccgttggttcctcgaccgtattgctacgcatatcttggcttgcgaaggcgactccaaatgggtgttctttgacggcaactatcaggaatacgaagccgacaagaaacgccgactcggcgaagaaggcacgaaaccgaaacgcatcaaatacaaaccggtaacgcgttaa

SEQ ID NO: 36995 - DNA, 1011 bp, Neisseria meningitidis
atgagcgatacccccgctacccgcgatttcggtctgatcgacgggcgtgccgtaaccggctatgtgctgtccaaccggcgtggtacgcgtgtctgcgtgctggacttgggcgggattgtgcaggaattttccgttttggcagacggcgtgcgcgaaaacctcgtggtgtcgttcgatgatgcggcttcctatgcggacaatccgtttcagattaacaaacagatagggcgcgtggccggacgcatccgcggtgcggcgttcgacatcaacggcaggacttaccgcgtggaggccaacgaaggcaggaacgcgctgcacggcggttcgcacgggctggccgttacccgtttcaacgcggtggcggcagacggccgttcggtggtgctgcgcagccgcctgcaacagtcggccgacggttatcccaacgatttggatttggatatttcctaccgcttggacgaggacgaccggcttaccgttacctatcgcgccaccgcgctcggcgacacggtgttcgacccgacgctgcacatttactggcggctggacgcgggcctgcacgatgcggttctgcatattccgcagggcggacatattccggccgatgccgaaaaactgcccgtctcaacggtttcagacggcctcgaagtatttgatttcagccggcccaagccgctggatgccgccgttgccgccctgcgccgcgaaacgggtcgggccggttttgacgacgcttaccgcgtgccgtccgatataggccgtcccgccgctgtgttgcaagccggacgccgctgtcgtatcagcatatacagcgaccgcaacggcttggtcatctttaccgccgccccgcaggatttcgcgcggcacgatgcgggcgtttacgacgcgctggcgaccgaggcgcagacgctgcccgacagcctgcattggcccgagttcggcaatattcgtctgaacaagggtgataccagggaggcgacgattgcttacggcatcgaatccctttcttag

SEQ ID NO: 36996 - DNA, 633 bp, Neisseria meningitidis
atgaccctacgttacgaaatcttccccgttacccccttccgccaaaactgcaccctgatttgggacgacgaaagcggcgaagccgtcctgaccgatgtcggcggcgacgtgccgttcctgctgcaagcgttggcaaaccgcaaacttacgctcacggcaatctggctgacgcacggccatctcgatcacgcgggcggcgtggtcgaaatgttgaaaacgcataaagtccctgtcctcgggccgcatccggacgatgaattcctgctccaatcgctgccgcaaaccaccgcgcaatacggattccccgtctcgcccgcctttgcgccgaaccattggctcgaagaaggcgaaacgctcaaagtcggacgctacgccttccaagtgctgcatattccggggcacacgccgggacacgtggttttctattgtgccgaagcggagctgctgattgcgggcgacgtgctgttttacgaaaccataggcagaaccgattttccgcgcggcaaccacgccgacttaatcaataatatccgcaacaaattattcgccctccccgaaaccgtgcaagttgtcgccggacacgggcgtatgacttccatcggacacgaaaaacggcacaatccgtttttctaa

SEQ ID NO: 36997 - DNA, 321 bp, Neisseria meningitidis
atgtcaaacacacaaaccatccgctctgccgacttcaccacttcccgcgcatggggcgcactcgacatcgccaatatgaacggcaccaccgtgcgcctgcactggacggaccagccctacaaatggcacgtcaacgacggcgaggaagtgtttgccgtgatggatggcgaagtcgatatgcactaccgagaaaacggcgaagaacacatcgttcggttgaaaagcggcgacatcttctacgcaggaatcggcgcggaacacgtcgcccacccgcgcggcgaaacgcggattttagtgattgagaaagaaggcagtgtttag

SEQ ID NO: 36998 - DNA, 507 bp, Neisseria meningitidis
atgcccctgttagacagtttcaaagtcgaccacacccgtatgtatgcccccgctgtgcgtgtggcgaaaaccatgaccacgcccaaaggcgataccattaccgtattcgacctgcgcttttgcgttcccaacaaagaaatcctgcctgaaaaaggcatacacacgctggagcatttgtttgcaggctttatgcgcgaccacttgaacggcaacggcgtggaaatcatcgacatttccccgatgggctgccgcaccggtttctacatgagccttatcggcacgccttccgaacagcaggtcgccgatacgtggctggcttcgatgcaagatgttttgaccgttcaagaccaaagcaaaatccccgaattgaacgaataccaatgcggcacttacctgatgcactcgcttgccgaagcgcagcaaatcgcgcaaaacgtgttggcgcgcaaagtggcggtgaataaaaacgaagagctgacgctggacgaagggctgctgaacgcctaa

SEQ ID NO: 36999 - DNA, 228 bp, Neisseria meningitidis
atggacataaaattcaatactttgggggttatcctgaatggggtcaatcctgaagaaaaattcataaaaattattgatgatcaggaaaataccgggggatttctgatactgttatcttcaaatgacaaattctcatcatttgacagttacgatgactgggtcgaaaacttagaaatattaaaagaatacctgcaagaatctcattggataataaagtgggtcggatag

SEQ ID NO: 37000 - DNA, 252 bp, Neisseria meningitidis
atgggcagcatcgcacagcgtttggaatatctggaagaggcgaacgacgtgctgcgtatgcagaaccacgtcctgtccaccgccttcaaagccctaatccgcgcccttcccgccgacaccgccgaagtcgcggtcgagtccatccagcttgcttttgaggacgccttggcagaattgagctatgaggacagcccgcatacggatttgttccacgacgttacttatgcgtttttccgtgaaaaagaacgttaa

SEQ ID NO: 37001 - DNA, 1911 bp, Neisseria meningitidis
atgactctggaaaccctgatcgccctgccgcgcaacatcaagaaaatctgtttcctcatacacgattttctgatgattttcattgcattctggttcacccaaagcctaaaggccgactactcgaacgaatggttcgaccctgtcaactggcagtctttcctattgaccgcgctgttgaccatcggcctgttcgtcagaatggggctctaccgtgccgttacacgctttgtcagtttccacgtcctgaccaccgcttttgccggcagcattgtttccgccgtcctgttcttcctcaacacattgatttttgaagaaaggctgcgcctcgccctgccgattgtctatttcttactgctgtttgtttccgtgaccggctcgcgtatggttttgcgcggactgttgtccgaacaccccaaaaaacagatgatccctgtcatcatttacggcgcagggcaggcgggcagacaactgcttgaggccgtcaaacagatacgcgaatattccgcggtcgcctttgtggacgacaaccccaaactgtggcacaccgtcatctacgaccttgccgtttaccagcccgatgccatcgccttcctcatcgaacgctacggcgtggaaaaaatcctactcgccatccccggcgcgacccaggaacaacgccgccgaatcatcaacaaactggaagcctatccgtgcgaagtgttgaccattcccggaatgaaagacctgatggacggaaaaatcagcatcggcacgctcaaaaaaatctctgtgtccgacctgctcgggcgtgattccgtcgcgcccgacgaccgcctgatgagtgccgacatcgaaggcaaaaccgtcatggtaaccggcgcgagcggctccatcggttcggaactctgccgccagattatccgccgccgccccgaaaagctgctgctgttcgagttatccgaattcgccctgtacgccatcgaaaaagaattgcgcgaaacctgcatccaaaaacgcctcgacaccgaaatcctgccctttctcggttcggtgcaaaaccgcacgctgctcgaacacgtcatgaccgccttttccgttgcgaccgtctatcacgccgctgcctacaaacacgtccccatggtcgagttcaacaccgtcgaaggcatacgcaacaacatcttcggcacactcgagtgcgcgcttgccgccacgacatcgggcgtggaaactttcgtcctcatctccaccgacaaagccgtccgccccaccaacaccatgggtgccagcaaacgcatggcggaactctgccttcaggcactcgccgccgaacccggacaaaaaacccgcttcagcatggtacgtttcggcaatgttttaggttcgtccggctccgttgtcccgctgtttgaaaaacagattgcagaaggcggcccgcttaccctgacccaccccgaaatcacacgttatttcatgaccatacccgaagcggcgcaactggttatccaagccggcgcgatgggcaaaggcggcgacgtgttcgtcctcgatatgggcgaatccgtcaaaatcatcgaccttgcccgccaaatgattaccttaagcggactcaaacccaaaacgcccgaacaacccgacggcgacatcgaaatcctcattaccgggctgcgtcccggcgaaaaactctacgaagagctgctcatcggcgacaacgtccgcaaaaccggccatccgcgcatcatgaccgccaacgagaccatgctgccgtggcacgagctctccgccctgctcgaccgcatccgtgcggcctgcgaccgttacgaccagcaggcaatccgcaccctgctcatcaacgccccgaccggctttgccccgagcgacggcatctgcgacctgctttgggtacgagaaacacacagaaaaaatgccgtctga

SEQ ID NO: 37002 - DNA, 552 bp, Neisseria meningitidis
atgaaagcgtatctggctctgatttctgccgccgttatcggtttggctgcctgctctcaagaacctgccgcgcctgctgccgaggcaactcctgctgctgaagcacccgcttccgaagcgcctgccgccgaagctgctcctgcagatgctgccgaagcccctgctgccggcaactgtgcggcaactgtcgaatccaacgacaatatgcagttcaacaccaaagacatccaagtcagcaaagcatgtaaagagttcaccatcactctgaaacataccggtacgcaacccaaaaccagcatgggtcacaatctcgtgattgccaaagctgaagatatggacggcgtatttaaagacggcgtaggtgctgccgataccgattatgttaaacctgatgatgcacgcgttgttgcccataccaaactgatcggcggcggcgaagaagcttccctgactctggatcctgccaaactggctgacggcgaatacaaatttgcctgcaccttcccgggtcacggtgctttgatgaacggcaaagtgactttggtcgattaa

SEQ ID NO: 37003 - DNA, 402 bp, Neisseria meningitidis
gtgaagattaaaccattacaattttctaacaataatcacagattttatgtggacaaaatttgtgttaccgaacaagatgtgaacattttggcatccgaccgaaattatgaattaaatattgaaatatttattgacaatataattcattttcaaataacagatgaatcttataaagtaaaattttcagaatatttatttgaaaataaagaaaaaaatgattgggatagaaatcctgctataaattattttttcgagataatagatgacagttatatggactggttgaaagaagaaagttttgatttttttgaaaagaaatattataaggcttatattttcttttttagcgattctgtaatagaagttatcagctcgacagaacctgtattttattcaaaataa

SEQ ID NO: 37004 - DNA, 960 bp, Neisseria meningitidis
atgagcaccttcttccagcaaaccgcccaagccatgattgctaaacacatcgaccggttcccactattgaagttggaccaggtgattgattggcagccgatcgaacagtacctgaatcgtcaaagaacccgttacctccgagaccaccgcggccgtcccgcctacccgctgttgtccatgttcaaagccgtcctgctcggacaatggcacagcctctccgatcccgaactcgaacacagcctcattacccgcatcgatttcaacctgttttgccgttttgacgaactgagcatccccgattacagcaccttatgccgctaccgcaaccggctggcgcaagacaataccctgtctgaactgttggaactgattaaccgccaactgaccgaaaaaggcttaaaagtagagaaagcatccgccgccgtcgttgacgccaccattattcagaccgccggcagcaaacagcgtcaggctatagaagtcgataacaaaggacaagtcagcggccaaaccacaccgagtaaggacaaagatgcccgttggacaaagaaaaacagcctctacaaactcggttacaaacaacatacccgtaccgatgcggaaggctatatcgagaaactgtacatcactcccaccaatgcccatgagtgcaaacacctgtcgcctttgctggaagggatagccgaaggtacgaccgtctatgccgacaaaggctacgacagtgcggaaaaccggcaacatctggaagaacatcagttgcaggacggcattatgcgcaaagcctgccgcaaccgtccgctgacggaaacgcaaaccaaacgcaaccggtatttgtcgaagacccgttatgtggttgaacaaagcttcggtacgctgcaccgtaaattccgctacgctcgggcagcctatttcggactgatttgcgcccgctgccgcctaaaaggcagcccggatgcctga

SEQ ID NO: 37005 - DNA, 876 bp, Neisseria meningitidis
atgaatacagaaattgaaattatcgcaaccgacaaagtaagcaatcaggcagcgatgcgcagtgtgctggtgatggagcagtggggtaacggcgagacttatagcgaagagcgttgggttgaacgcggtcgtcaagcagtacggcagacgatggaaggcatgttcgaactgggacgtgcgctgattattttaaaagagcatacggaacacggacggtttatggaaattgtgaaaagccaatttgggctgggtatcgcagaaacatcacgtctgatgtcagccactcgccgctttgcgaccccgcaaatgcagaaagccgcgccgaagctgatggatttgggcaagtcaaagctgctggaactcttggtcgaagaagacgttacgttggtgggacttgccgaaggagaagaagtcaacggcatgacctttgacgatgtggaccgaatgacggtgcgcgagctgcgcgtcgccctgcgcgaaagccgtgaaaacctcgccgccaaagacgaagtgatgaaaaccaaaacagccaaaattgatgagctgaccgagaagctggctaagaagcaaaccgttgtcagagagccgaaggcggaagacgtgggcagtgagttggcgatgcagttaacaagccttgaggtcggtatccgcagtcaagtgagccgtttgaaagatttgttcgaccaacttaatgcgcacagtgaggcacacgagatcagccatcaggcaaagatggtcggcacgctcaatcaaattattttggactgcgagcaactgcgcgaaagctatgccctgccgactgaagcaccgacagacaatgtgccggaatggttgggcggtgaaacgggagaaggcgatgaatccggcaatgattga

SEQ ID NO: 37006 - DNA, 543 bp, Neisseria meningitidis
atgaggacacaccgcaagacctgctctgcggtgtgttttgcttttcagacggcatcgaaacccgccgtttccatccgacatcccagcgaggacattatgagcctgaaaatccgccttaccgaagacatgaaaaccgcgatgcgcgccaaagaccaagtttccctcggcaccatccgcctcatcaacgccgccgtcaaacagtttgaagtggacgaacgcaccgaagccgacgatgccaaaatcaccgccatcctgaccaaaatggtcaaacagcgcaaagacagcgcgaaaatctacactgaagccggccgccaggatttggcagacaaagaaaacgccgaaatcgaggtactgcaccgctaccttccccaaatgctctctgccggcgaaatccgtaccgaggtcgaagccgccgttgccgaaaccggagcggcaggtatggcggatatgggcaaagtgatgggcgtattgaaaacccgacttgccggcaaagccgatatgggcgaagtcaacaaaatcctgaaagccgtgctgaccgcctga

SEQ ID NO: 37007 - DNA, 780 bp, Neisseria meningitidis
atgcatatcatcgattcgcactgccacctcaattttgaaggtttgaaagaacgcctgcccgaagttttgtccaacatggaagcaaacggcgtggggcaggcgctcgccatcagcgtcagtagggaaagcttctccgaagtctttgccatcgccgaagcgcacgaacacatctattgcaccataggcgtacatcccgacagcaaggaagccgaagaattttctattgcggaaatggttgccgcagccgcctcgccgaaagtggtcggcattggcgagacgggtttggattattactggtgcaaaggcgatttgtcctggcaacacaaacgctttgcagaccacatcgaagcagccaatcaaaccggactgcccgttatcgtccatacgcgtgatgcggcggcggacaccttgtctatcctgaaagaatgccgggttaattcgggcgttatccactgtttttccgaagacatcggttttgcccgtgcagcaatggatttggggctttatatttctttctcgggaatcgttacctttaaaaacgcacccttggttcaggaggcggcaaaatacgttccggacgaccgcattttggtggaaaccgatgcgccgttcctcgcccccgttcccaaacgcggcaggcagaacgaaccggcttttgtgcgccataccgccgaacatatcgccaaattgcggaaccaaacattggaacaggttgcggcatatacgacggaaaacttttaccggctgtttaaaaaagtacccgatatgcggaccgtctga

SEQ ID NO: 37008 - DNA, 834 bp, Neisseria meningitidis
atgtcttggtgggaatttaggggattttggggaattttgcaaaggtctcggactatcaaacagcgtaagcgacaaccctataagctcgattcgcagctgattcagcacatcgacacccttatccgccgcaaactcagtcccgaacaagtatgcgcctacctgtgcaaacaccaccggatcacgctccaccacagcaccatttaccgctaccttcgccaagacaaaagcaacggcagcacgttgtggcaacatctcagaatatgcagcaaaccctaccgcaaacgctacggcagcacatggaccagaggcaaagtccccaaccgtgtcggcatagaaaaccgacccgctatcgtcgaccagaaatcccatatcggcgattgggaagccgacaccattgtcggcaaaggacagaaaagcgcattattgaccttggtcgaacgcgttacccgctacaccatcatctgcaaattggatagcctcaaagccgaagacactgcccgggcagctgttagggcattaaaggcacataaagacagggtgcacaccatcaccatggataacggcaaagagttctaccaacacaccaaaataaccaaagcattgaaagcggagacttatttttgtcgcccttaccattcttgggagaaagggctgaatgagaacaccaacggactcatccggcaatacttccccaaacaaaccgatttccgtaacatcagtgatcgggagatacgcagggttcaagatgagttgaaccaccggccaagaaaaacacttggctacgaaacgccaagtgttttattcttgaatctgttccaaccactaatacactag

SEQ ID NO: 37009 - DNA, 240 bp, Neisseria meningitidis
atgattctcaacatacgcaaaatgggaaactcgcaaggcgtgattctgcccaaatcattattgggtcaaataggggcagtagacagcttggctgttacagttgaaaagggcaatattattttaagctgtcctaccgttcgcaggggatgggcagaagctgccgcaatgcttgtcgaaaccgagcaggagcattttttttccgaaattgaaaacgaagcggataaagaatggatatggtag

SEQ ID NO: 37010 - DNA, 516 bp, Neisseria meningitidis
atgtacacttgcacttcctgcggcgaaaaacatgaagatatgcccgcaatcggctttaccgccccctatccctataatcaactcagtgaagaagaacgcattgcttaccaagctgaatgcggcggcgatttctgcatcatccgctatcccgaccaaaccgaccgttttatccgcgcggtgctgcttattccgattatcgggcatgaggaaacgctggaatatggggtgtgggtatctgtcagcgaaaagagttttaacgactatcaaagccactttcacgacaatccggaaaatgtcgtttatttcgggatgatctgcaaccggctgcccccttacgaatccgacaccttcggtttgcattgcaatgtcgttacccagtccgacaaccaacgccctttgctgcaacttcatcaaagcggcggacatccgctggtacgcgacttttatcacggcatagaatatgccgaggcacaggcaaggataggagcggtatccgaatcggattgttcaggataa

SEQ ID NO: 37011 - DNA, 573 bp, Neisseria meningitidis
atggacaatcccgctacggcaccctggcaggacggttggctgcaaagcgtgcgccacattccgtcgccgaatttcggcccgagggagtccaaagaagaggtttcccttgtcgtattgcacaatatctcgctgccgccgttcgaatatggtacggatgcggtggaaaagctgtttgccaaccggctcgaccccgacggacatccgttcttcagcctgatacacactttgcgcgtatccagccattttttaatcaaacgcgacggcgaaacggtacagttcgtttcctgcgacaatatggcataccatgccggcgtatcctcgtttcgcggacgggaaaaatgcaacgcattttccatcggcatcgaactggaaggctgcgatttcgaaccctttaccgaagcgcaataccgttcgctcgaagccttgttggacgcaatctgccgccgctaccccatcacggcggtaacggggcaccaagacatcgcgcccagccgcaaaaccgaccccggtcattttttcgactggcggcggatacgggggaaagggtttcccgtggacagaaatgccgtctga

SEQ ID NO: 37012 - DNA, 1221 bp, Neisseria meningitidis
atggctgtcaacctgactgaaaaaaccgccgaacaactgcccgacatcgacggcattgccctctacaccgcccaagcaggcgtgaagaagcccgggcataccgacctgacactgattgccgtagccgccggcagcaccgtcggtgcagtcttcacgaccaaccgtttctgtgccgcgcccgtccacatcgccaaatcgcaccttttcgacgaagacggcgtgcgcgccctcatcatcaacacgggcaacgccaacgcgggtacgggcgcacagggcagaatcgatgctttggcagtgtgtgccgccgccgcccggcaaatcggctgcaaaccgaaccaagtgctgcccttctccaccggcgtgattctcgaaccgctgcccgcagacaaaatcatcgccgcgctgcccaaaatgcagcctgccttctggaacgaagcggcacgcgccatcatgaccaccgacaccgtgcccaaagccgcctcgcgcgaaggcaaggtcggcgacaaacacaccgtccgcgccacgggcatcgccaaaggctcgggcatgattcatcccaatatggcgaccatgctcagtttcatcgccaccgatgccaaagtttcccaacccgtcctccaactgatgacgcaggaaatcgccgacgaaaccttcaacaccatcaccgttgacggcgacaccagcaccaacgacagcttcgtcatcatcgccaccggcaaaaacagccaaagcgaaatcgacaacatcgccgacccgcgttacgcccaactcaaagaattgttgtgcagcctcgcgctcgaactcgcccaagccatcgtccgcgacggcgaaggtgcgaccaagttcatcaccgtccgcgtcgaaaacgccaaaacccgcgacgaagcccgccaagccgcctacgccgtggcacgttcgccgctggtcaaaaccgcctttttcgcctccgaccccaacctcggcaggctgctcgccgccatcggttatgccggcgttgtcgacctcgatactgacctcgtggaaatgtatctcgacgatattttggttgccgaacacggcggacgcgccgcaagctacaccgaagcacaagggcaggcggtgatgtcgaaggccgaaatcaccgtccgcatcaagctacatcgcggacaaagtgccgccaccgtctatacctgcgacctgtcgcacggatacgtttccatcaacgccgactaccgttcctga

SEQ ID NO: 37013 - DNA, 1473 bp, Neisseria meningitidis
atgaaccagacaagccgcgatctgacccgcatcagccacaacaccaaaatcgtcgccacccttgggccgggcagcaacaacgtagaactgttggaagatatgatccgcgtcggcggcctgaacgtcgtccgcttcaacttcagccacggcacgcccgaattccatcaggaaaacgcccgcatcgtgcgcgaggcggcaaaacgcgccggacaggaaatcgccatcattgccgacctgcaagggccgaaaatccgcgtgggcaaaatcgccggcggcggcattgaattgaacaaaggcgaaacgctggtactggatgccgcgctcgaaggcgaaggcacgcgcgaggcggtcggtttggactaccgcgacctgcccgacgacgttgccgcaggcgacgtattgtggctggacgacggcctgctgaccctgaccgtggaatccgtcgaaggcagcaggattatcacaagggtggaaaacagccacgtcctgaaaagcaacaagggcatcaacaaacgcggcggcggtctgtccgcaggcgcgttgaccgaaaaagacttccgcgacctgaaaaccgcgattgccatcggttgcgactacctcgccatcagctttgtgaaatccgccgaagatttgcatatcgcgcgcgccaaagtcgaagaagaaatgaagggcagcacggccgtgcgccccggtttggtttccaaaatcgaacgcgtggaagcgattgaaaacttggacgaaatcatccttgccggcgacggcattatggttgcgcgcggcgacttggcggtcgaagtcggacacgccgccgtccccgccctgcaaaaacggatgatccgccgcgcccgcgagttgcgccgcttcagcattacggcgacgcaaatgatggaatcgatgattaccaaccccgtgccgacccgcgcggaagtcagcgatgtggcaaacgcggtattggacggcaccgatgcggtgatgtgttccgccgaaaccgccgtcggcgcgtatccgtttgaaaccgtcagccaaatggcaattatctgcgcggctgcggaaaaagagcaggattcgctcaacggcgttgccgaacaggcggagtatcccgaagcggtcagcaccaacctggcggttgccggcggcgcggtcagcgtggcgcgcgcggttcacgccaaagccatcgtcgccctgaccgaaagcggttcgaccgcctttgaaatcagccgccacaacatcaccctgccgattttcgcgctgaccccgagcgtttccgcccaacgccgtatggcgatgtaccggggcgtgcgcccgctgattttggcaaccagcaccgaccacgacacggcgttaaacgaagtcgaaaccatgctggtggaacacaacatcctgcattccggcgaccaatacatcattaccagcggctcgcaaatgcgcgaatccggttcgaccaatacgctggaagtgctgcgcgtcaaataa

SEQ ID NO: 37014 - DNA, 813 bp, Neisseria meningitidis
atggacatcggcacggcaaaaccgtccgcctccgaacgcgcctttgtcccgcaccaccttatcgacatcattacgcctgttcagacatacagtgccgcccgttttgtcgaagactgcacgcgtctgatcggcgaaatcacggcgcgtgggaaatgtccgctgattgtcggcggcacaatgatgtatttccgcgccctgacccaaggtttgaacgatttgcccgaggccgatgcctgcctgcgtgccgacttggacgaacaaaaacagatgtacggcttggatttcctctaccgcaccctgcaaaaagtcgaccctgaaaccgcatgccgtctgaaaccgaacgacagccagcgtatcgaacgcgctttggaagtttattatctgaccggcaaaccgatgagcgaacacctcggcagacaaagcccccatacgctccccttcgatttgcataccgccgccctgattcccgaaaaccgcgcccgcctgcatgaaaacatcgccctgcgtttccacctgatgcttgaacagggctttatcggcgaagtagaaaacctgcgccgccgctatcccggcctgaccgccgactcccccgccatccgctgcgtcggctaccgtcaggcatgggaatatctagacggaaaaaccgatttcccggcatttgtcgagaaaggcattgccgccacccgccaacttgccaaacgccaactgacttggttgcgcaaaacacctttagactgcgttgccgacccgttttcagacggcacttcatgcacacgcctgattgaggcggcaaaacggtttttcggcgcataa

SEQ ID NO: 37015 - DNA, 687 bp, Neisseria meningitidis
atgtacgcatttaccgacgcacagcaacagaaggcactcttctggctggtgcttttccatatcctcatcatcgccgccagcaactatctggtgcagttccccttccaaattttcggcatccacaccacttggggcgcgttttcctttcccttcatcttcctcgccaccgacctgaccgtccgcattttcggttcgcacttggcacggcggattatcttttgggtcatgttccccgcccttttgctttcctacgtcttttccgttttgttccacgacggtggttggacaggcttgggcgcgctgtccgaattcaacacctttgtcggacgcatcgcgctggcaagttttgccgcctacgcgctcggacaaatcctcgatattttcgtattcgacaaattacgccgtctgaaagcgtggtgggttgccccgactgcatcaaccgtcatcggcaacgccttagatacgttggtatttttcgccgttgccttctacgcaagcagcgatggatttatggcggcaaactggcagggcatcgcttttgtcgattacctgttcaaacttaccgtctgcggtctgtttttcctgcccgcctacggcgtgattctgaatctgctgacgaaaaaactgacgaccctgcaaaccaaacaggcgcaagaccgccccgcgccctcgctgcaaaatccgtaa

SEQ ID NO: 37016 - DNA, 1170 bp, Neisseria meningitidis
atgccgcaaattaaaattcccgccgtttactaccgtggcggtacatcaaaaggcgtgtttttcaaacgttccgacctgcccgaggcggcgcgggaagcgggaagcgcacgcgacaaaatcctcttgcgcgtactcggcagcccggatccctacggcaagcagatagacggtttgggcaacgccagttcgtccaccagcaaagccgtgattttggacaagtccgaacgcgccgatcacgatgtcgattaccttttcgggcaagtttccatcgacaaaccttttgtcgattggagcggcaactgcggcaacctcaccgccgccgtgggcgcattctccatcgaacagggcttggtcgataaaggcaagattccttcagacggcatctgcacggtcaaaatctggcagaaaaacatcggcaaaaccattattgcccatgtaccgatgcaaaacggcgcagttttggaaacaggcgattttgagctcgacggcgtaacgttcccggcagccgaagtacaaatcgaatttcttgattcagccgacggcgaaggcagtatgttcccaaccggcaatttggtcgatgaaattgatgtgccgaatataggccgtttgaaagccacgctcatcaacgcgggcattccgaccgttttcctgaatgccgccgacttgggctacacgggcaaagagttgcaagacgacatcaacaacgatgccgcggctttggaaaaattcgagaaaatccgcgcttacggtgcgctgaaaatgggtctgatcagcgacgtatccgaagctgccgcccgcgcgcacacgccgaaagtcgccttcgtcgcgcccgccgccgattacaccgcctccagtggcaaaaccgtgaacgccgccgacatcgatttgctggtacgcgccctgagcatgggcaaactgcaccacgcgatgatgggtaccgcctctgttgccattgcgaccgccgccgccgtgcccggtacgctggtcaaccttgccgcaggcggcggaacgcgtaaagaagtgcgcttcgggcatccttctggcacattgcgtgtcggtgcagccgccgaatgtcaggacggacaatggacgaccaccaaagcggttatgagccgcagcgcacgcgtgatgatggaaggttgggtcagggtgcctgaggattgtttttaa

SEQ ID NO: 37017 - DNA, 816 bp, Neisseria meningitidis
ttgggcggtgcgttgctggcgggttcgagttacgccaatgcgctggctttagcgttggacaagcctgttattcccgtccatcatttggaaggacatctgctgtcgccgctgttggcggaggaaaaacccgactttccttttgtcgcgctgttggtttcgggcgggcatacgcagattatggcggtcaggggcataggcgactacgcgcttttgggcgagagcgtcgatgatgcggcgggcgaggcattcgacaaaacggcgaaactgctgggcttgccgtatccgggcggtgcgaaactgtcggaacttgcggaatcgggcaggcccgaagcgtttgtttttccgcgcccgatgattcattccgacgatttgcagatgagtttttcaggtttgaaaaccgctgttttgactgccgttgaaaaagtgcgtgaggcaaacggttcggaaaccattcccgagcaaacccgcaacgatatttgccgtgcgtttcaagatgcggtagtcgatgtgttggcggcgaaagtgaaaaaagccctgttgcagacagggttcagaaccgtagtggtcgccggcggggtcggtgcaaaccgcaaactccgtgaaactttcggcaatatgacggtgcaaatcccgaccccaaaaggcaagccgaaacatccgtccgaaaaagtcagcgtgtttttcccgccgacggcatactgcacggacaacggtgccatgattgcctttgccggtgcgatgcacctgggcaagggcagggaggtcggtgcgttcaatgtccgtccgcgctggccgctgtcggaaatcgtcagatga

SEQ ID NO: 37018 - DNA, 351 bp, Neisseria meningitidis
atggaagccttcaaaaccctaatttggattgttaatataatttccgctttggccgtcatcgtgttagtattgctccaacacggcaaaggcgcggatgccggcgcgactttcggatcgggaagcggcagcgcgcaaggcgtattcggctctgccggcaacgctaacttcctcagccgctcgaccgccgttgcagcaacatttttctttgcaacctgcatggctatggtgtatattcacacccacacgacaaaatacggtttggacttcagcaacgtacaacaaactcagcaagcacccaaacccataagcaataccgaaccttctgcccctgttcctcagcagcagaaataa

SEQ ID NO: 37019 - DNA, 231 bp, Neisseria meningitidis
atgaaaacattagacgaacgaataaaaaatttaggaaaatctcttgaagatagaattgacgctaatctaattgatgccgcactagagtacattactttttcagaacgtttgctagcttttgaaacgctatgtgattatatagaagatttcaatatccagcttacggaaaaagaatcccaagaaatctcttttattaataaggaatttggaattgaaagtacatcagattaa

SEQ ID NO: 37020 - DNA, 4116 bp, Neisseria meningitidis
atgacctaccccatccccaaaccccgtgaaaaatcccgttggtccaatctttcgcaaggctcgctgcccttggctttggcgcgttatctgccgcataagcggctcaaggtcgtgctgacccaagatgcggaacaggcgctacgccttcagacggcatggcggtttttccgtccgcacgacacggcggtgttcctgccggactgggaaacgctgccttacgagcgtttttcgccgcatcaggatttggtgtcggaacggctgtcggcgttgtggcagattaagagcggcgcggcggacgtgttgttcgtgccggttgccacggcgatgcagaagctgccgcccgtgccgtttctggcagggcgcacgttttggctgaaaacagggcagactttggatataggccgtctgaaaaccgatttggtagatgcgggctacaaccatgtttcccatgttgttgcggcgggcgagtttgccgtgcgcggcggcattgtcgatttgttccccatgggcagcgaaatgccctaccgcatcgatttgtttgacgatgaaatcgacagcatcaaaacctttgatacggacacgcagcgcaccatctcccccgtttccgaaatccgcctgctgtcggcgcacgaattccccaccgacagcgaggcgcaaaaaatcttccgcagccgcttccgcgaggaagtcgatggtaatccgaacgatgcggctgtatacaaagcagtaagcaacggccacttcggtgcgggcgtggaatattacctgccgctgttttttgaaaacgagctggaaacgctgtttgactatatcggcgaagacgcgctgtttgtctctttgggcgatgttcacgccgaggcaaaccgcttttggagcgacgtcaaatcgcgttacgccatggcgcagggcgacgaaacctatccgcctttgcttccacagcatttgtatctctcctcagatgtttttgcaggccgtctgaaaaattatggtcaggtattgccggatatttttggtgttgaacatacgttgccaaacgtggccgtcaaccgccaagcggatgaaccgttgcaggcattgaaagattttcagacggcctttaaaggacggattttgttgtgcgccgaaagtttgggacgacgcgaaaccatgctcggtttcttgcagcaaaacggtttgaaagccaaacccgtgtccgactggcagggctttttatcggcacacgagccgctgatgattacagtggcgccgttggcatacgggttcaaactgggcggactgcaatcgccgaaccaacagcaaactacttccgcctccgagggagaaggcgatgcggttaccgaccaaaccgaattttccgcagccgcaacaaaccctctccctagccctctcccacaggagagggaacaaagtgcagccgccgtttcaaccgaaagcagcctgccccccggtaaaagtaatctgcacgggcaaatccaacagcaacctgccccctcccccgtgggggagggttggggagagggcaaagcagttgccgctcaaaccgaatttcccgcatccgcaacaaaccctctccctaaccctctcccgcaggagagggaacaaagtgcagccgtcgtttcagacagtctgaaagcagccgccgtttcaaccgaaagcagcctgccccccggtaaaagtaatctgcacgggcaaatccaacagcaacctgccccctcccccgtgggggagggttggggagagggcaaagcagttgccgctcaaaccgaattttccgcatccgcaacaaaccctctccctagccctctccctcaggagagggaacaaagtgcagccgtcgtttcagacagtctgaaagcagccgccgtttcaaccgaaagcagcctgccccccggtaaaagtaatctgcacgggcaaatccaacagcaacctgccccctcccccgtgggggagggttggggagagggcaaagcagttgccgctcaaagtgccatcgccgtcatcaccgaatccgatctctaccaatacgtcgcccgttcgcgcgtccacaaccgccgcaagaaacacgccgccgtttcagacggtctgttgcgcgaccttgccgaaatcaacatcggcgaccccgtcgttcacgaagaacacggcatcgggcggtatatgggcttggtaacgatggacttgggcggcgaaaccaacgaaatgatgttgctcgaatacgcaggagaagcgcagctttatgtgcctgtttcacaactgcatttaatcagccgctactccggtcaggcgcatgaaaacattgccctgcacaagctcggcagtggcgcgtggaacaaggcgaagcgcaaagccgccgaaaaggcgcgcgataccgccgccgagttgcttaacctttacgcccgacgcgctgcccaatcgggacacaagtttgaaatcaacgagttggattatcaggcgtttgctgacggcttcggctacgaggaaaccgaagaccaggccgccgccatcgccgccgtgattaaagatttgacgcaagcgaagccgatggatcgccttgtgtgcggcgatgtcggcttcggcaaaaccgaagttgccctgcgcgccgcgtttgtggcggtgatgggcggcaaacaggtcgccgtactcgccccgaccacgcttctggtcgagcagcacgcgcaaaactttgccgaccgtttcgccgatttccctgtgaaagtcgccagcctttcgcgtttcaacaacagcaaagccactaaagccgcgctggaaggcatggcggacggcacggtcgacatcgttatcggcacgcacaaactggtgcaggacgacatcaaattcaaaaacttaggtttagtgattatcgacgaagaacaccgcttcggtgtgcgccaaaaagagcagctcaaacgcctgcgtgccaatgtcgacatcctcaccatgaccgccacgccgattccgcgtactttaagtatggcgttggaaggactgcgcgacttctcgctgattaccaccgcgcccagccgccgcctcgccgtcaaaacctttgtcaaaccctttagcgaaggcagcgtgcgcgaagccgtgttgcgcgaactcaaacgcggaggacaggtatttttcctgcacaatgaagtagatacgattgaaaatatgcgcgagcggctggaaaccctgctgcccgaagcccgcatcggcgtggcgcacggacaactgcgcgagcgcgagctggaacaagtcatgcgcgactttttacagcaacgattcaacgtgttgctctgttccaccatcatcgaaaccggtatcgacattcccaacgccaacaccatcatcatcaaccgcgccgacaaattcggactggcgcaactgcaccagcttcgcgggcgcgtcggacgcagccaccaccaagcctacgcctacctgctcacgcccgaatacatcaccaaagacgcagaaaaacgcctcgacgccatcgcggcagcagacgaactcggcgcaggtttcaccctcgccatgcaggatttggaaatccgcggcgcaggcgaaatcctcggcgaagggcagtccggcgaaatgatacaggtcggcttcacgctctacaccgaaatgctcaaacaagccgtgcgcgatctcaaaaaaggccgccaacccgacctcgacgcgccgctgggcatcaccaccgaaatcaaactgcacagccccgccctactgcccgaaagctactgccccgacatccacgagcgtctcgtcctctacaaacgcctcgccgtctgcgaaaccgtgcagcaaatcaacgccatacacgaagaactcgtcgaccgcttcggcctgcccgaacaacccgtcaaaacccttatcgaaagccaccacctgcggcttatggcaaaagaattgggtatcgatgccattgatgcggccggcgaagcggtaacggtaaccttcggtaaaaacaataatgtcgatccaaccgaaatcatcctgctgattcagaacgacaaaaaataccgccttgccggcgccgataagctgcggtttaccgcagagatggaaaatatcgaggtcagaatcaacaccgtaaaaaacgttttaaaaaccttgcaaaacagatgcctgcccaaataa

SEQ ID NO: 37021 - DNA, 498 bp, Neisseria meningitidis
ttgaaagcgggaagccggctgttatccgaaagcggcaaaacccaaaccgtccgcaacatcgttgtcaaaccaaaaccgctcaaagcctacaatctgaccgttgccgattggcatacctactttgtcaaaggcgataaggcggaaacggaaggggtttgggttcataatgattgtccgtatggcggttcaaataatttagagaaagcaaaacttcgcgcagaacggcttagtaaaaacgatcgggcaggaaaagactttactaaagcaggaaaagaagccgttattgatttgaataggattcaaaataatggtcaagttaagtgcgctaattgcggtattgaaacaattccagccaaacaatctataaaaaatatttctcctacttcaaatgaaagacaagtagatcatgtcatccctaaatctaagggtggtcaaggtacacctaaaaacgggcaggtattatgcagaggctgcaacattaagaagagtaacaaatga

SEQ ID NO: 37022 - DNA, 348 bp, Neisseria meningitidis
atgcagactatagacggggaaatggctgggggaaacaaatcattaaaaatagggacacaatctgttgaaaaatcaaccggtcgtacaatacctaataatttaaaggaacaattagcaatggaagaagttaaggcaaacccacagggcaaaactcctgcgagaatacctcctatgtccgatactaaaaatggttggttagcaaaagacggttgggttaagcgtgttcaaaacgtaaacaaaattgaaatacattacattgaaaacacaagaaccggtgaaaaaacagattttaagtttattgaaaacacaagaaccggtgaaaaaacagattttaagtttaaggattag

SEQ ID NO: 37023 - DNA, 195 bp, Neisseria meningitidis
ttggcaaagcgtagaaaatggcgtacatttcgctacatggaattacacgacaggcaggaaatgctgtttgaaaggattttccggtcagtcttgcgattggtcggggtttcatcggaaacggtgaaacaaaagtttgccggcgtagagttgagctacgcgggtaaagccgcaggcgaaagcctgtattgtttgtga

SEQ ID NO: 37024 - DNA, 1248 bp, Neisseria meningitidis
atgagtcagagaagagtagtcattacaggcttaggtcaggtttcccctgtcggcaacactgtcgcagaggcttgggacaccctgctcgccggcaaaagcggcatcggcgcgattacccgctttgacgcatccgacatcaacagccgtgtcgccggcgaagtgcgcggtttcgacatcggacaatacatcagcgcgaaagaagcgcgccggatggacgtattcatccactacggcattgccgccgcattgcaggcaatcgccgattcgggcttggacgatgtggaaaacctcgacaaagaccgcatcggcgtgaacatcggttccggcatcggcggactgcccagcatcgaggtcaccggcaaagccgtaatcgaaggcggcgcgcgcaaaatcaaccctttctttatccccggttcgctgatcaacctgatttccggacacgttaccatcctcaaaggctaccgcggcccgagctacgggatggtttccgcctgtaccaccggcgcgcacgccatcggcaattccgcccgactgatcaaatacggcgacgcggacataatggttgccggcggcgcggaaggcgcaatcagcactttgggcgtgggcggttttgccgcgatgaaagccctctccacccgcaacgacgaccccgccaccgcttcccgtccgtgggacaaaggccgcgacggcttcgttatcggcgaaggcgcgggcatattggtgttggaagaattggaacacgccaaaaaacgcggcgcgaaaatctacgccgaaatcgtcggcttcggcatgagttccgatgcttaccatatcaccgcgccgaacgaagaaggccccgcccttgccgttacccgcgcgctgaaagatgccggcatcaatcccgaagacgtggattacgtcaacgcgcacggcacgtccacccccttgggcgatgccaacgaaaccaaagccctcaaacgcgcattcggcgaacacgcctacaaaaccgtcgtcagctcgaccaaatccatgaccggccacctgctcggcgcggcgggcggcgtggaggccgtgtacagcattttggcgatacacgacggcaaaatcccgccgaccatcaacatttttgaacaagacgttgaagccggctgcgatttggactactgcgccaacgaagcgcgcgacgcggaaatcgacgttgccatttccaactccttcggcttcggcggcaccaacggcacgctggtgttcaaacgcttcaaaggctga

SEQ ID NO: 37025 - DNA, 366 bp, Neisseria meningitidis
atgaaaaaattattgattgccgcaatgatggcggctgccttggcagcttgttcgcaagaagccaaacaggaggttaaggaagcggttcaagccgttgagtccgatgttaaagacactgcggcttctgccgccgagtctgccgcttctgccgtcgaagaagcgaaagaccaagtcaaagatgctgcggctgatgcaaaggcaagtgccgaggaagctgtaactgaagccaaagaagctgtaactgaagccaaagaagctgtaactgaagccaaagaagctgtaactgaagcagctaaagatactttgaacaaagctgccgacgcgactcaggaagcggcagacaaaatgaaagatgccgccaaataa

SEQ ID NO: 37026 - DNA, 369 bp, Neisseria meningitidis
atgattcaaatgcagaccatcttagatgtggctgataactctggtgcgcgtcgcgtaatgtgtatcaaggtattgggcggatctaagcgtcgctacgcttctgttggcgatattattaaagtggcagttaaagatgcggctccgcgtggccgtgtcaaaaaaggcgatgtatataatgcggtagttgttcgtactgctaagggtgtacgtcgtcctgatggtgcgttaattaaattcgataacaatgccgccgtgttactgaataataaacttgaacctttgggtactcgtatctttggtccggtaacccgtgaattgcgtactgagcgatttatgaaaatcgtttcattggcacctgaagtattataa

SEQ ID NO: 37027 - DNA, 1116 bp, Neisseria meningitidis
atgcgcttgtttaaaagcttgaaaaaccctaaaaaaacagatgccaagctccctaaaaaatcttcgggactcaataaccgcgcggcaatcggcatcgatatcgaccagcattccatcaaaatggtccaattgtcaggacgtagtttaaaccaaattcaattggaaaaatacgtcattgccaaattaccaaagaatatcattcaaggcaataaagtccaaaattacgatcaacttgttacatatttgcaacaagcctatgccaaactgggtacttcgtgcaaaaacatcatcgcgtccgtcccgcaaaatctggcaaccatcgaacaattgacctacacagacaaagatgcagaattagacctgcaggggttcgtggagtcctccatctccgaagtcagctcgatatcgctcgaagaagccaattacgactatcaggtcttgtcccaatcggccgccggcgaagctgtgttggccgtcgcatcgagaaaggatgaaatcgaacccctgattgacgcattcaacgccgccggtatgaaattatccgcgcttgatgtggacattttcggacaatacaacgcctacgcgctatggataaaccatttcgcccccgagcttgcagccgaaaaagtcgccattttcggcgtatatgccgcacagacctacgccttggtcatccaagacggaaaaatcctatacaaacaggaaacctccgtcagcgaagaacagctcaaccaactcatccagcgcacctatcaggtaacagaagaaaaagcggaagaaatcatcaactccccgcaaaaaccttccgattaccaagaaagcgtggcaaactatttcaaccagcagattacccaagaaatacaaagggtcttgcagttttattacaccacgcagaccgcagacgatatgaccgacatcaagcatatcctgctgaccggggaagcggcgcgccaggaaggcatcgcccaaaccgtcgcctcacaaaccaatgcagatgtacaatgcgtccatcccgcgcgttattttgcggacaacctcaaaacagacaaacaacaattcgaacttgatgcgccgacactgaccagggcgttcggtttggcggtacggggattataa

SEQ ID NO: 37028 - DNA, 1743 bp, Neisseria meningitidis
atgaacaaaatataccgcatcatttggaatagtgccctcaatgcctgggtcgtcgtatccgagctcacacgcaaccacaccaaacgcgcctccgcaaccgtggagaccgccgtattggcgacgctgttgtttgcaacggttcaggcgaatgctaccgataccgatgaagatgacgagttagaacccgtagtacgctctgctctggtgttgcaattcatgatcgataaagaaggcaatggagaaatcgaatctacaggagatataggttggagtatatattacgacgatcacaacactctacacggcgcaaccgttaccctcaaagccggcgacaacctgaaaatcaaacaaagcggcaaagacttcacctactcgctgaaaaaagagctgaaagacctgaccagtgttgaaactgaaaaattatcgtttggcgcaaacggtaataaagtcaacatcacaagcgacaccaaaggcttgaattttgcgaaagaaacggctgggacgaacggcgaccccacggttcatctgaacggtatcggttcgactttgaccgatacgcttgcgggttcttctgcttctcacgttgatgcgggtaaccaaagtacacattacactcgtgcagcaagtattaaggatgtgttgaatgcgggttggaatattaagggtgttaaaactggctcaacaactggtcaatcagaaaatgtcgatttcgtccgcacttacgacacagtcgagttcttgagcgcagatacgaaaacaacgactgttaatgtggaaagcaaagacaacggcaagagaaccgaagttaaaatcggtgcgaaaacctctgttatcgctgaagaaaacggtaagttagttactggcaaaggcgatgagggcaaaggcttagttactgcaaaaactgtaattgacgctgtgaacaaaagcggctggagggtgaaaacaactgacaacaatcaaacaggtcaagctgacaagtttgaaaccgttacatcaggcacaaatgtaacctttgctagtggtaaaggtacaactgcgactgtaagtaaagatgatcaaggcaacatcactgttaagtatgatgtaaatgtcggcgatgccctaaacgtcaatcagctgcaaaacagcggttggaatttggattccaaagcggttgcaggttcttcgggcaaagtcatcagcggcaatgtttcgccgagcaagggaaagatggatgaaaccgtcaacattaatgccggcaacaacatcgagattacccgcaacggtaaaaatatcgacatcgccacttcgatggcgccgcagttttccagcgtttcgctcggtgcgggggcggatgcgcccactttgagcgtggatgacgagggcgcgttgaatgtcggcagcaaggataccaacaaacccgtccgcattaccaatgtcgccccgggcgttaaagagggggatgttacaaacgtcgcacaacttaaaggcgtggcgcaaaacttgaacaaccgcatcgacaatgtggacggcaacgcgcgtgcgggcatcgcccaagcgattgcaaccgcaggtctagttcaggcgtatctgcccggcaagagtatgatggcgatcggcggcggcacttatcgcggcgaagccggttacgccatcggctactccagtatttccgacggcggaaattggattatcaaaggcacggcttccggcaattcgcgcggccatttcggtgcttccgcatctgtcggttatcagtggtaa

SEQ ID NO: 37029 - DNA, 312 bp, Neisseria meningitidis
atgaagcagcttactctcaaagaggcgcaagaattttatgcggttcataaagaccgccccttctacgccggattggttgaatttatgaccggcggtccggttatgattcaggtattagagggtgaaaacgccgtcctgaaaaaccgcgaactgatgggtgcaactaatccttccgaagccgccgaaggcacgatacgcgcggactttgccacttcggtcagcattaatgccgtacacggttccgacagcgtggaaaatgccgctttggaaattgcctactttttcagccaaaccgaaatctgcccccgttga

SEQ ID NO: 37030 - DNA, 1113 bp, Neisseria meningitidis
atgcaaaccgccgcccgccgctcgttcgactacgatatgccactcatccaaacgccgacttccgcctgccaaatccgtcaggcgtgggcgaaggttgccgacacgcccgaccgcgagacggcagatcgtctgaaagacgaaatcaaggctttgctgaaggagaaaaacgcggtcttggtggcgcattattatgttgatccgctgattcaggatttggctttggaaacgggcggatgcgtgggcgattctctggaaatggcacgcttcggcgcggaacacgaagccggtacgctggtggtggcgggcgtgcgtttcatgggagagagcgcgaaaatcctctgccctgaaaaaacggtgctgatgcctgatttggaagcggaatgttctttggatttgggttgcccggaagaggcgttttcggcgttttgcgaccaacaccccgaccgcacggtggtggtgtacgccaacacttccgccgccgtgaaagcgcgtgccgattgggtggtaacgtcttcggtggcgttggaaatcgtgtcgtatctgaaatcgcgcggcgagaagctgatttgggggcccgaccgccacctcggcgactacatccgccgcgaaacgggcgcggatatgctgttgtggcagggttcgtgcatcgtccacaacgaatttaaagggcaggagctggcggcgttgaaggcggaacaccccgatgcggtggtgctggttcatcccgaatcgccacaaagcgtcatcgaactgggcgacgtggtcggctcgaccagcaaactgctgaaagctgccgtatcacgccccgaaaaaaaattcatcgtggcgaccgatttgggcatcctgcacgaaatgcaaaagcaggcgcccgacaaagaatttatcgccgcgccgacggcgggcaacggcggaagttgcaaaagctgcgcgttctgcccgtggatggcgatgaattcgctgggcggcatcaaatacgccctgacaagcggacgtaacgaaatcctgttggacaggaagctgggcgaagccgccaaactgcctttgcagcgtatgctcgacttcgcggcaggactcaaacgcggggatgtgttcaacggcatggggcccgcctga

SEQ ID NO: 37031 - DNA, 321 bp, Neisseria meningitidis
atgaattttcaagactatctcgccacatttccttcaatcgaccatctgggcggtttggacgttcaggatgcagatggcaaaacggttcaccacattcctgccgttcagggtaagctcggttcgctcaagttgtacaacgctttggcagaacgttttgacggaaaattggacaaagaagcggcagaacagggtttgatatggtttgccgaacacgttgccgacgcgcgcgcccatcccggcaagcatcccaatatcgacctgcttgaaaaagttgtgcaaagcggcgaaaccttgctgctcaagccgcttgccgcgcaataa

SEQ ID NO: 37032 - DNA, 843 bp, Neisseria meningitidis
atggatattaaaatcaacgacttcaccctcggcaacaactcgcccttcgtcctattcggcggcatcaacgttttggaaagcttggattccaccctccaaacctgcgcgcattacgtcgaagtaacccgcaaactcggaattccctatatctttaaagcctctttcgacaaggcaaatcgttcctccatccattcttatcgcggcgtaggcttggaagaaggcttaaagatttttgaaaaagtcaaagcagagttcggcatccccgtcattaccgacgtacacgaaccccatcagtgccaacccgtcgccgaagtgtgcgatgtcatccagcttcccgcctttcttgcgcggcagaccgatttagtggttgccatggcaaaaactggcaacgtcgtcaacatcaaaaaacctcagttcctcagcccctctcaaatgaaaaacattgtggaaaaattccacgaagccggcaacgggaaactgattttatgcgaacgcggcagcagcttcggctacgacaacctcgttgtcgatatgctcggtttcggcgtgatgaaacagacttgcggcaacctgccggttattttcgacgttacccattccctgcaaacccgcgatgccggttctgccgcatccggcggtcgtcgcgcacaggctttggatttggcacttgcaggcatggcaacccgccttgccggtctgttcctcgaatcgcaccccgatccgaaactggcaaaatgcgacggccccagcgcgctgccgctgcaccttttagaagattttttaatccgcatcaaagcattggacgatttaatcaaatcacaaccgattttaacaatcgagtaa

SEQ ID NO: 37033 - DNA, 969 bp, Neisseria meningitidis
atgactgccaaacctttttccctcaacctgaccaacctcctgctgctggcggtgttgtttgccgtcagcctgtcggtcggcgttgccgatttccgctggtctgatgtgttttcgctgtcggacagccagcaagtgatgttcatcagccgcctgccgcgcacgtttgcgattgtgctgacgggcgcgtcgatggcggtggcggggatgattatgcagattctgatgcgcaaccgttttgtcgagccttctatggcgggcgcgggtcaaagcgcggctttgggtttgcttctgatgtccctgctgctgcctgccgcgccgctgccggtcaaaatgtcggttgccgccgttgccgcgctaatcggaatgctggtgtttatgctgctgatccgccgtctgccgccgacggcgcaactgatggtgccgctggtggggattattttcggcggcgtgattgaggcggtagccacctttatcgcgtatgaaaacgaaatgctgcaaatgctcggcgtgtggcaacagggcgatttttccggcgtgttgctcgggcggtatgagctgttgtgggcaacggggattttggctttgtttgcctatttgattgccgaccagctgacgattttgggtttgggtgaggcagtaagcgtcaatctgggtctgaaccggacggcggtgttgtggtcgggtttgattattgtggcactgattacatcgctggttatcgttacggtcggcaatattccgtttatcggcttggtcgtgccgaacatcatcagccgcctgatgggcgacaagctgcgccaaagcctgcctgcggtggccttactgggcgcgtctttggtgttgctgtgcgatattgtcggacgcgtgattgtgtttccgtttgaaattccggtctctacggtttttggcgtgatggggacggctttgtttttgtggcttttattaaggaaacctgctcatgccgtctga

SEQ ID NO: 37034 - DNA, 738 bp, Neisseria meningitidis
atgctgaccgcttacgaatccagttttgccgcactgatggacgatgccggcgtggaaatgctgctggtcggcgattctttggggatggcggttcaggggcggaaatcgacgctgcccgtcagcctgcgcgatatgtgctatcacaccgaatgtgtagcacgcagtgcaaaaaatgcgatgattgtcagcgatttgccgtttggtgcatatcagcagagtaaggagcaggcgtttgccgccgccgccgaactgatggcggccggcgcgcatatggtcaaactcgaaggcggcgtgtggatggcggaaacgactgaatttctgcaaatgcgcggtattccggtctgtgcccacatcggtctgacgccgcaatccgtgtttgcctttggcggatataaggttcaggggcgcggcggcaaggcgcaggcgttgcttaacgatgccaaggcgcatgacgatgcgggggcggcggtcgtgctgatggagtgcgtaccggcggaactggcaaaaaaggtaactgaaactgtttcctgtccgaccatcggcatcggtgcgggcgcggattgcgacggtcaggttttggtgatgcacgatatgctgggcattttcccgggtaagacggcgaaattcgtcaaaaactttatgcacgggcaaagcagcattcaggcggcggttcgggcgtatgttgccgaagtcaaagccaaaaccttccctgctgcggaacatatttttgcagactga

SEQ ID NO: 37035 - DNA, 681 bp, Neisseria meningitidis
atgacttacaccatcgtccctatcgccaccgcccgatcgccctacaaacagaaattcggcatcgcccgccagcccggtttggtctctgccgcagaagtatgcatcgagctgaatcccgaatttaccgcagacagcgtacgcggactggaacacttcgactatgtgtggataagttttatttttcacggcgtattggatgaaggctgggcgcaaatggtgcgcccaccacggctcggcggcaaacaaaaaatgggcgtgttcgccacgcgcagcccccaccgccccaaccatctcggactctcgctcctgaaactcgaacgcatcgaaaccggcaaacccgtccgcctctattgcagcggtgcagacctgctggacggcacaccgattgtggacatcaaaccttatatcccctttgtcgaatccaaacccgatgccgcatctggtttcgtcagcggcaaacccgtagagttggaagtcgtttggcaggaaaacatcggcgcggaaaatttatctgcaaacaccaaaaaccttatcagccaaagcattgcccaagatccgcgcccagcctatcaggatattcccgaacggatttatgtgatgaatattgcggattacgaagtcagatttcaaatcgaggaaaaccgtgcaaccgttattgatctttccccaaccccgctttaa

SEQ ID NO: 37036 - DNA, 558 bp, Neisseria meningitidis
ttgggtttcggctgtcgggagggaaaggaattttgcaaaggtctcagcctgcccgaaatcatccgcgacctgctcgaaatgccgtctgaaaccgccgttgccgacatcgcgcgcacttattccgcgcattacctcaatcccaacaaccgcaatatgacgctctttcccgatgccctgccctgtctggacaagctcaaagcacaaggatactggcttgccgtcgccacgggcaaagggcgggcgggcttggacggtgccatcagccaaaccgccaccggcggctattggctcgccaccgcctgcgcgggggaatatccctccaaaccctcgcccgaaatggtgttcggaatctgccgcgaactgggactcgacccgaaagaggcattggtcgtcggcgatacggcgcacgacctgcatatggcggcaaacgcgggtgcggcggcagtcggcgttaccaccggcgcacattcgcgcgaacagctccttagcgcaccgcatctcgccgtattggacggtttgtccgaactgcccggttttcttgcacgacattacgcctga

SEQ ID NO: 37037 - DNA, 1251 bp, Neisseria meningitidis
atgttttcaaaaagcgttaccctcgcacaatacgaccccgatttggcagcagccattgcccaagaagaccaacgccagcaagaccacgtcgagctgattgcttccgaaaactacgttagctgcgccgtaatggacgcgcaaggttcgcaattgaccaacaaatacgccgaaggctatcctggcaaacgctactacggcggctgcgaatacgtcgatattgtcgaacaattggcgattgaccgcgtcaaaaaactgttcggcgcgcaatacgccaacgtccaaccgcactccggctcgcaagccaaccaagccgtgtacgcttccgttttaaaaccaggcgacaccattttgggtatgtctctggcgcacggcggccacctgacccacggcgcgagcgttaatatctcaggcaaactctacaatgccgttacttatggtttggatgaaaacgaagtgctcgattatgccgaagtcgaacgcctcgcgctcgaacacaaacccaaaatgattgtggcgggtgcgtctgcctacgcgttgcaaatcgactgggcaaaattccgcgaaatcgccgataaagtcggcgcatacctctttgtcgatatggcgcactatgccggtctggttgccggcggcgaatatcccaatcccgtgccgttctgcgacttcgttaccaccaccacccacaaaaccctgcgcggtcctcgcggcggcgtaattttgtgccgcgacaacacacacgaaaaagcactgaactcttccatcttcccaagcctgcaaggcggcccgctgatgcacgttatcgccgccaaagccgtggcgtttaaagaagcattgcaacccgagttcaaacaatacgcaaaacaagtgaaaatcaatgcagccgccatggcggaagagttggttaaacgcggtttgcgcatcgtttccggccgcaccgaaagccacgttttcctcgttgacctgcaaccgatgaaaattaccggcaaagccgccgaagctgctttgggcaaagcgcacatcactgtcaacaaaaacgccatcccgaatgatccggaaaaacccttcgttacctccggcatccgcatcggttccgccgccatgaccacacgcggttttaacgaagccgacgtgcgcgtattggcgaacttggttgccgacgtattgtctaaccccgaagacgaagccaacctcgccaaagtccgcgaacaagtaactgctttgtgcaataaataccccgtttacggcgcgtaa

SEQ ID NO: 37038 - DNA, 1065 bp, Neisseria meningitidis
atggcactcgtatccatgcgccaactgcttgatcatgctgccgaaaacagctacggcctgcccgcgttcaacgtcaacaacctcgaacaaatgcgcgccattatggaagccgccgaccaagtcggcgcgcccgtcatcgtacaggcgagtgcaggtgcgcgcaaatatgcgggcgcgccgtttttgcgccacctgattctggcggcagtcgaagaatttccgcacatccccgtcgtgatgcaccaagaccacggcgcatcgcccgacgtgtgccaacgctccatccaactgggcttctcctccgtgatgatggacggttcgctgatggaagacggcaaaaccccttcttcttacgaatacaacgtcaacgccacacgtaccgtggttaatttctcccacgcttgcggcgtatccgtcgaaggcgaaatcggcgtgttgggcaacctcgaaactggcgaagccggcgaagaagacggtgtaggcgcagtgggcaaactttcccacgaccaaatgctcaccagcgtcgaagatgccgtgcgtttcgttaaagataccggcgttgacgcattggcgattgccgtcggcaccagccacggcgcgtacaaattcacccgtccgcccacaggcgacgtgttgcgtatcgaccgcatcaaagaaatccaccaagccctgcccaatacacacatcgtgatgcacggctccagctccgttccgcaagaatggctgaaagtcatcaacgaatacggcggcaatatcggcgaaacctacggcgtgccggttgaagaaatcgtcgaaggcatcaaacacggcgtgcgtaaagtcaacatcgataccgacttgcgccttgcttccaccggcgcggtacgccgctaccttgccgaaaacccgtccgacttcgatccgcgcaaatatttgagcaaaactattgaagcgatgaagcaaatctgcctcgaccgctacctcgcgttcggttgcgaaggtcaggcaggcaaaatcaaacctgtttcgttggaaaaaatggcaagccgttatgccaagggcgaattgaaccaaatcgtcaaataa

SEQ ID NO: 37039 - DNA, 1635 bp, Neisseria meningitidis
atgaccaaattcattttcgtcaccggcggcgttgtctcctcactgggtaaaggtatcgccgccgcttctattgccgccatcctcgaatcgcgcggcttgaacgttaccatgctcaagctcgatccttatatcaacgtcgatcccggcacgatgagcccgttccaacacggcgaagtgttcgtaaccgacgacggcgcggaaaccgacctcgacttgggacactacgaacggtttatcgattccacgatgacccgccgcaacagcttcagcacggggcaggtgtacgaaaacgtcatcgccaaagaacgacggggcgactacctcggcggcacggttcaagtcatcccgcacattaccgacgaaatcaaacgccgcatccacgaaggcgcggcaggttacgatgtggcgattgtcgaaatcggcggcacggtcggcgacatcgaatcgctgccgtttttggaagccatccgccagatgcgaagccagttgggacgcaacaacaccctgttcgcccacttgagctacgtcccctacatcgccgctgcaggcgaaatcaaaaccaagccgacccagcacaccgttaaagaaatgttgagcatcggtttgcaacccgacatcctgatttgccgtatggacaggacaatgcctgcggacgaacgccgcaaaatcgccttgttctgcaacgtggaagaacgcgcgattgtcggcagctacgatgtggacagcatctacgaatgccccgaaatgctgcacgaccaaggcatcgacaacatcattaccgagcagttgcagcttaatgtgcaacaggcggatttgaccgcgtggaaaaaaatcgtccacgccatccaaaacccgaaacacaccgtcaaaatcgccatggtcggcaaatacgtcgatttgaccgagtcctacaaatcattgatcgaagccttgaaacacgcaggcattcacaccgaaaccgacgtacaaattacctttgtcgatagcgaaagcatcgagaaaaacaacggcgacgtttctatgctcaaagatatggatgccatcctcgttcccggcggtttcggttcgcgcggcgtggaaggcaaaatcgccgctgtgcgctatgcccgtgaaaacaacgtgccatacttgggtatctgcctcggtatgcagattgcgctgattgaatacgcccgcgacgtggcaggtttgaaaggtgcgaattccactgagttcgacctcaaatgcgccgcccccgtcgttgccctgattgacgaatggcaaactgccgacggcagcgtcgaaacccgcgatgaatccgccgatttgggcggcaccatgcgtttgggcgcgcaagaagtcgaattgaaagcaggcagcctcgccgccaaaatctacggcagcggacatatccgcgaacgccaccgccaccgctacgaagtcaacaacaactatgttcctcagttggaaaaagcaggcttggttatcggcggcgtatccgccggacgcgaacgcttggtcgaaaccatcgagctgccgaaccacccttggttcttcgcctgccagttccatcccgaattcacttccaacccgcgcaaagggcatcccttgttcaccgcgtttgtcaaagctgcgttgaacaataaaaaagcctga

SEQ ID NO: 37040 - DNA, 2121 bp, Neisseria meningitidis
atgttcgacaaacacgttaaaactttccaatacggcaaccacaccgttactttggaaaccggcgaaattgcccgccaagccgccgctgccgttaaagtctctatgggcgacaccgttgttttggttgccgttaccaccaacaaagaagtgaaagaaggtcaagacttcttccccctgaccgtcgattatttggaacgcacttacgccgcaggtaaaatccccggcggtttcttcaaacgcgaaggcaaacaaagcgaaaaagaaatcctgaccagccgtctgatcgaccgcccgattcgtccgctgttccccgaaggtttctaccacgacatccaaatcgtagcgatggtcgtgtccgtcgatcccgaaatcgattccgacattcctgcaatgttgggcgcgtctgccgcgctggtgttgagcggcgtaccgtttgccggtccgattggtgcggcacgcgtgggttatataaacggcgtgtacgttttgaacccgactaaagccgaattggctaaatcgcaattggacttggtggtcgccggtacgtccaaagccgtgttgatggtggaatccgaagccaaaatcctgcccgaagacgtgatgttgggcgcggtggtttacggccacgatcaaatgcaggcggcgattaacgccatcaatgaatttgccgacgaagtcaatccggaagtttgggattggaaagcacctgaaaccaatgaagaattagttgccaaagtccgcgggattgccggcgaaaccattaaagaagcgttcaaaatccgtcaaaaacaagcgcgttccgccaaattggacgaggcttggaatgcggtaaaagaagccttgattaccgaagaaaccgatactttggccgccaacgaaatcaaaggtattttcaaacacttggaagccgatgttgtccgcagccaaattttggacggtcaaccgcgcatcgacggccgcgacacccgcaccgtccgtcctttgaacatccaaaccggcgtattgccgcgtacacacggttccgcattgtttacccgtggcgaaacccaagctttggcggttgcaactttgggtacttcgcgcgacgagcaaatcattgacgcgctgtccggcgaatacaccgaccgcttcatgctgcactacaactttccgccgtactctaccggagaagtgggtcgcgtaggtgcgccgaaacgccgtgaaatcggtcacggccgtttggctaaacgtgcattgttggccgtattgccgaaacctgaagatttcagctacaccatgcgcgtggtctccgaaattaccgaatccaacggctcttcctctatggcttccgtctgcggcggctgcctgagcctgctgtctgccggcgtgcctttgaaagcacacgttgccggtatcgcgatgggtctgattctggaaggcaacaaatttgccgtcctgaccgacattttgggcgacgaagaccacttgggcgatatggactttaaagtggccggtacgaccgaaggcgttaccgcgctgcaaatggacatcaaaatccaaggcattaccaaagaaattatgcaaatcgctttggcacaggccaaagaagcgcgtctgcacatcttggatcagatgaaagccgccgttgcgggcccgcaagagttgtccgcacacgcgccgcgtttgtttacgatgaaaatcaaccaagacaaaatccgcgaagttatcggtaagggcggcgaaaccatccgttcgattaccgctgaaaccggtacggaaatcaatattgccgaagacggtacgattaccattgctgcgaccactcaagaagccggcgatgcggcgaaaaaacgtatcgagcagattactgccgaagtggaagtgggcaaagtgtatgaaggcactgtggtgaaaatcctcgacaacaacgtcggcgcgattgtcagcgtgatgccgggcaaagacggtttggtacacatcagccaaatcgcccacgagcgcgtacgcaatgtcggtgactacctgcaagtcggtcaggtggtgaacgtgaaagcattggaagtggatgacagaggccgtgtgcgcctgtccatcaaagccctgctggacgcgcctgcccgtgaggaaaatgccgccgagtaa

SEQ ID NO: 37041 - DNA, 2280 bp, Neisseria meningitidis
atgaatacaccgactgatttgaaagtaaccaaacgagacggaagattagaagccattgatttggataagattcaccgtgtcgtcacttgggcggcggacggattggaaaatgtttccgtatctcaggtcgagttgaaatcgcacatccagttctacaacggcatccgcaccgacgacatccacgaaaccatcatcaaagccgctgccgatttaatttcggaagataccccggactaccaataccttgccgcgcgtttggcgattttccatctgcgtaaaatagcctacggcgagtacgagccgccgcacctttacgaccacgttaaaaaacttaccgatgccgcaaaatacgacaggcatatccttgaggattacagccgcgaagaatttgacgagctgaacgcctatatcgaccacgaacgcgatatgtccttttcctatgccgctgtcaaacagctcgaaggcaaatatctggtacagaaccgcgttacccgccagatttatgaaacaccgcagttcttatatgttctggtggcgatgtgtcttttcagcaaatatcccaaagaaacacgcctcgattacgtcaaacggttttacgatgccgtttccacatttaaagtatcgctgccgaccccgattatgagcggcgtgcgtacgcctacgcgccagttctcaagctgcgtattgatcgaatgcgacgacagcctggattccatcaacgccaccaccagcgcgattgtgaaatacgtttcccagcgtgcgggcatcggcatcaatgccggacgtatccgcggactggacagcgaaatccggggcggcgaagcacggcataccggctgcattcccttctttaaaatgtttcaggcggcagtcaaatcctgttcgcaaggtggcgtgcgcggcggcgcggcaaccttgttctaccccttgtggcatatcgaagccgaaagcctgctggtgttgaaaaacaaccggggcgtggaagacaaccgtatccgtcagcttgattacggcgtgcaaatcaaccgcctgctgtacacccgcctgattaagggcggcaacattacgctgttttcgcccaacgaggttccgggattgtacgaagcgttttttgccgaccaagacgaatttgagcggctctatacgaaatacgagcaagaccctgatatccgcaagcgcatcattccggctgccgacctgttttccacgctgatgcaggagcgtgccggaaccgggcgcatctacattcaaaacgtcgatcactgcaatacgcacagcccgttcgatccgcgcgtcgcgcctgttcatcagtccaacttgtgtatggaaatcgccctgccgaccaaaccgctggacaatatcaacgatccgaacggcgaaatcgccctgtgtacactgtctgcctttaacttgggcgcattaaacagcttggacgaattggaagggcttgccgacttgaccgttcgtgcgctcgatgcacttttagattatcagggatatccggtagaagccgcgcgtacctctactatgggccgccgttcgctcggcatcggcgtgattaactatgcgtattatttggcgaaaaacggtgtccgctacagcgacggctccgcgctcggtctgacccaccgtacctttgaagccatacagtattacctgctcaaagcatcggcaaaccttgccaaagaatacggtgcgtgcacgctctttaaccaaaccgtttattcgcaaggcaacctgcccatcgacacctacaaaaaagacttggacgctgtgtgtaacgagcctttgcactacgattgggaaagcctgcgtgccgaaatcgtcaaatacggcctgcgcaactctactctgaccgcactcatgccgtctgaaaccagctctcaaatcgccaacgccaccaacggcatcgagccgccgcgcggattggtaacggtcaaagcatcgaaagacggcattttgaaacaagtcgtgccggagtttgaaaccctgaaaaatgcctatgaaaccctgtggcagcttcccggcaacgaaggctacctgaaacttgtcggcgtgatgcaaaaattcgtcgatcaatcgatttccgccaataccgcctacgacccgggcaaattcgaaggcggcaaagtttctatgaaacaaatgctcaaagacctgctgaccgcctacaaatacggcgtcaaaaccctgtactaccataacacccgcgacggtgcggacgatacgcagaccgatattcaggatgacggctgcgcgggcggggcttgtaagatttga

SEQ ID NO: 37042 - DNA, 306 bp, Neisseria meningitidis
gtgggaatccagctttttgagtttcagtcattcccgataaattgccttagcattgaatgtctggattcccgcctgcgcgggaatgacggcggagcggtttctgttttttccagtaaatacccacaagctgaaatcccgttattttcacaaaaacagaaaaccaaaaacagcaacctgaaattcgtcattcccgcgcaggcgggaatccaatgcgttgagtttcagctatttagaataaattttgaaactctaatcgcgtcattcccacgaaagtgggaatctagaaatttaatgttgcggcactag

SEQ ID NO: 37043 - DNA, 951 bp, Neisseria meningitidis
atgttttatgccatgtttgaaaaaggacaaaaggctggcggggcaagcctgatccgttgcgaccgttttgaagcggcttccgaagccgtcaaccgcctgatgccagaattgattgccgttgccgcccaatctgccgaactgagaaaccgttggtatgccgtcgaatttttgtctacgctcagcggggaaatgctggttaccatgatttaccacaaaaggcttgataatgagtggatgcaggcggcgcaagcgttacagcaacagttggatatttccgtcatcgggcggagcaggggacagaaaatagtcttaaaacaggactatgtaacggaaactttgaaggtcggcaaccgggatttccgttatcggcaaattgaaggcagttttacccaaccgaatgccgccgtgtgtcagaaaatgcttgaatgggcctgcggtgcagcagaaggattggatggggatttgctcgaactgtattgcggaaacggcaactttacgcttcctttatctgaaaagtttgaacgtgttttggcaaccgaaatctccaaaacctccgtcagcgcggcgcaatggaatatcgaagccaaccgcatcggcaacatcaaaatcgcccgtctgtctgctgaagaatttaccgaagcctataccggaaaacgtgagtttaaacgccttaaggatggcggtattgctttgacggattacgcattttccactattttcgtcgatccgccgcgtgccggtatcgatgaggaaactttgaagctggtgtcgcagtttgacaacatcatctacatttcctgcaatcccgaaacgctgcgtaccaatttggacaccttggcggaaacccatacggttgaacgtgccgccctgttcgatcaatttccgtttacgcaccatattgaaagcggtgtgctgttgaaaaagaaaatccttggaaaaagcaagaggtaa

SEQ ID NO: 37044 - DNA, 1602 bp, Neisseria meningitidis
atgaccgaacaacactttaccgaacaaaccaaatccctaatcgacagcttaaaaaccatttgcgccaactatggtttgggcaatgacggcaacgagttcaaaatcatcagtcaggcatttttgtataaattcctaaacgacaaatacgatttcgaagttaaacaaattcgcaaagaaaatcccgacgagccaatcgaattcatcaatatggatattgagggaaaaacagccgttttgaagcctgaacattccatcaagtatttatcagagcgacaaaacggcgcggactttgccaaactctttgacgatacgctgaccgatattgccgcacataatgcggaactgttttcggtaaaaaccgaaggcggggcgaaaatcgtgttgttcgagcgtatcagtcaatatattacggatgaaggccgccgcgacgatttttgccgtgcgctgatttccaaactggcgggttttagtttcgaggcgatttttgcccaaaaatttgatttttttgccacgatttttgaatacctgattaaagactacaacagtaattcgggcggcaaatacgccgaatactacacgccgcacgcagtagcgcggattatggcggatattttggtgccggaggaagtgcgcgggcaaatccgcagcgtggacgtttacgatccgtcggccggttcgggaacgctgttgatgaatgtcgcccatgccatcggcgaagataaatgcatgatttatacgcaggatatttcgcaaaaatcgtccaatctgctacggctgaatctgattttgaataatctggtgcattctttgaataatgtggtgcagggcaatacgattttgtcgcccgcccataaagacgcttcaggccgtctgaaaaaatttgatttcatcgtttcgaatccgccgtttaaattggatttcagcgatttccgcgaccaactagaaggcgaggaaaaccgcgaacgcttttttgccggtatcccgaaaatcaaggcgaaagatacggataagatggaaatctaccagctttttatccagcatatcttgttttccctgaaagaaaacggcaaagcggcgattgtgttgccgacgggctttatcactgcccaatcaggcatcgacaaaaaaatccgggaacatctggtagaaaacaaaatgctcgccggtgtggtttccatgccttccaatattttcgccaccacgggaaccaacgtttccatcctgtttatcgataaagccaataaagataaagtggtattaatcgacgcatcgggcttgggcgaaaaaatcaaagacggcaaaaaccaaaaaaccgtactttctcgcgaagaagaacaaaaaatctgcaataccttcacgcacaaacaggcagtggaagatttcagcgtggtggtcggctacgatgaaatcaaagccaagaattacagcctgtcggcggggcagtatttcgaggtgaagattgattatgtggatatttccgccgaggaatttaagcagagaatggcaggattttcggcagatttggacaaactctttgcggaatctgccaaattggaaaaggagattaaggatagattggcgatgttgaaattcaattcataa

SEQ ID NO: 37045 - DNA, 360 bp, Neisseria meningitidis
atgaatatcaaacacctgattaccgccgcactcattgcctcagccgcctttgccgcgcaggcagccccgcaaaaacccgtatccgccgcccaaaccgcgcaacattcagccgtttggatcgatgtccgcagcgaacaggaatttagcgaagggcatttgcacaacgcggtcaacatccccgtcgaccaaatcgtccgccgcatacacgaagccgcgcccgacaaagacacgccggtcaacctctactgccgcagcggacggcgtgccgaagccgcccttcaagagctgaaaaaagcaggttatacaaatgttgccaatcacggcggttatgaagacctgctcaaaaaagggatgaaatga

SEQ ID NO: 37046 - DNA, 369 bp, Neisseria meningitidis
atgcttcaggagtttttagaacttcaaaaacaggatattgcagtcaaacagaaggagttggaaagccgtaaggacgaaatccaatctcacgaacgcattgcactggctaccatcgaagcgcaaaaacagggtgaacagcaacatggtgagattttcaaagaggtacacaaacgccgtctgaatgccgtgattgctatttcttttctgattgccgccgtgctgattactgctttatggcgcgataaggacagcgtcgctattgaaattgtcaaaatcggcggggcggtagctttgggatattttgcaggaatcaacagaggtaaagcgcaaaccttggaaaagcaacggcgcgaaaaagacagtgattag

SEQ ID NO: 37047 - DNA, 1311 bp, Neisseria meningitidis
atgtacgctaaaaaaggcggtttgggactggttaaaagccgccgtttcgcacctcttttcgctacgcagtttctcggcgcgttcaacgacaatgtgttcaaaaccgcgctgtttgtgatgattgggttttacggtttggggcaaaacggcttcctgcctgccggacagatgttgaacttgggcgcgttgttgtttattttgccgtatttcctgttttcctcgctgtcggggcagttgggtaacaaattcgacaaggccgttttggcgcgttgggtcaaggtgctggaaatgatcattatggcggtggcggcatacgggttttatatccggtctgccccgctgcttttggcgtgtctgttttgcatgggcgcgcaatcgacgctgttcgggccgctgaaatacgccatcctgcccgattatctcgacgacaaagagttgatgatgggcaacagcctgattgaatcgggtacgtttgtcgccatcctgttcggtcagattttgggaacggcggtggcaggtgtaccgccttatattgtcgggatactggttttgctggtcgccgtcggaggcacggtcggcagcctgtttatgccgtctgtacccgccaaggctgccgatacccaaattgagtggaatattgtccgtggcacaaaatccctgctgcgtgaaacggtgcggcacaagcccgtttttaccgccattatcggtatttcgtggttttggtttgtcggcgcggtttataccacgcaactgccgacctttacccaaatccatctgggcggcaacgacaatgttttcaacctgatgcttgccctgttttccatcggtattgccgccggttcggtactgtgtgccaagttcagcagggaacggctgatgttggcttgggtaacggttggtgcgttgggtttgacggtttgcggtctggttttggtgtggctgacgcacggacaccgttttgaagggctgaacggcattttttggtttttatcgcaaggatgggcataccccgtgatggcggtgatgatgctgatcggctttttcggcggatttttctccgttccgctctatacctggctgcaaaccgccagcagcgaaactttccgcgcccgcgccgttgccgccaacaatatcgttaacggtatttttatggtttccgccgccgttttgagcgcggtgttgctgtttgtgtttgacagcatttccttgttgtatctgattgtcgctttgggcaatattccgttgtcggtatttttgattaagcgcgaaaggcggtttttaggcgcggcggcaatcaggaaaaaaccttga

SEQ ID NO: 37048 - DNA, 1467 bp, Neisseria meningitidis
atgatgaaattgggtttcaaaccgatacccctcgccattgccgcagtattgtgcgccctggttttggcactgcccgtacccgacggggtcaagcctcaggcttggacgctgctggccatgtttgtcggtgtgattgccgccattatcggcaaggccatgccgttgggcgcgctgtcgattattgccgtcgggttggtcgcagtaaccggcgtaaccgccgacaaaccgggcgcggcgatgagcgatgcgttgagtgcgttcgccaatccgttgatttggctgattgccatcgcagttatgatttcgcgcggtttgctcaaaacagggctggggatgcgtatcggatatttgtttatcgccgtttttggaagaaaaacgctgggcatcggttacagtctcgctctttccgaactgctgctggctcccgttaccccttccaataccgcgcgcggcggcggcattatacatccgattatgcagtcgattgccggcagttacggctccaatcccgcaaaaggcacagaaggcaagatgggtaaatatttggctttggtcaactatcattccaatcccatttcgtcggctatgtttattactgcaactgcccccaaccctttaatcgtcaacttgattgccgaaaatttaggcagtagtttccgtctttcttggggggcgtgggcgtgggcaatggctgttcccggcgttatcgcctttttcgttatgcctttgattttatattttttgtatccgcctgaaattaaagaaacgcccaatgccgttcaatttgccaaagaccgtctgagggagatgggtaaaatgtcggcagacgaaatcattatggcggtcattttcggtatcttgttgctgttgtgggcagatgttcccgcccttattaccggcaatcacgcttttagtatcaacgccaccgccaccgcatttatcggattaagcctgcttttgctttccggtgtattgacttgggacgatgttttgaaagaaaaaagtgcgtgggatacgattatttggtttggcgcattgattatgatggccgcatttttaaataaactcggactgattaaatggttctccggagtgttggcggaaagtgtcggcggtttgggcgttagcggcacggctgcgggcgtaatcctcgtgcttgcttatatgtatgcgcattatatgtttgccagtactactgcacatattaccgctatgttcggcgcatttctcgctgctgctgtttcactgaatgccccggcgatgccgaccgcgctgatgatggcggccgcatctaacattatgatgaccctcactcattatgcgaccggtacttcgcctgtgattttcggttcgggctacaccacaatgggagaatggtggaaggcgggttttatcatgagcgtggtcaattttctgatttttttcgttatcggcagcatttggtggaaagttctggggtattggtaa

SEQ ID NO: 37049 - DNA, 477 bp, Neisseria meningitidis
atgaacaccatcgcccccaacctcgacggcaaacacctccgcatcggcatcgtacaggcacgtttcaccaacgaaatcggcagcgaaatgctcaaagtctgctgccgcaccctccaagaattgggcgtggcagacgaaaacattaccgtcgccaccgtacccggcgcacttgaaatccccatcgcactgatgaactttgcctcttctgaaaaatttgacgcactgattgccatcggcgtcgttatccgtggcgaaacctaccatttcgagctggtttccaacgaatccggagcaggggtcagccgcgtcgcactcgactacaacatcccgattgccaatgccgtcctgaccaccgaaaacgacgcacaggcaatcgaacggattgaagaaaaagcctcggatgccgccaaagtcgccgtcgaatgcgccaacctcgtcaacctgctgctcgaagaacagtttgaagacgaagaataa

SEQ ID NO: 37050 - DNA, 1254 bp, Neisseria meningitidis
ttgcgaatcggacgagaatttatgccttctgcccattatcctgaaatgagcgaaaaactgatggcggttttgatggcgatgctggttacgctgatgccgttttccatcgatgcctacctgcccgcgattcccgaaatggcgcaatcgctgaacgcggatgttcaccgcatcgaacagagtttgagtttgtttatgttcggcacggcgttcggacaggtggtcggcggttcggtgtccgacatcaaagggcgcaaacccgtcgccctgaccggtttgattgtatattgccttgccgttgccgccatcgtatttgtttcgagtgccgaacagctcctcaacctgcgcgtcgtgcaggcattcggtgcgggcatgactgtggtcatcgtcggcgcaatggtgcgcgattattattccggacgcaaagccgcccagatgtttgcccttatcggcatcattttgatggttgtgccgctggtcgcacccatggtcggcgcattgttgcagggcttgggtggctggcaggcgatttttgtttttctggcggcgtattcgctggtgctgctcggtttggtacagtatttcctgcccaagcccgccgtcggcggcaaaatcggacgggacgtgttcgggctggtggcggggcggttcaagcgcgtattgaaaacccgtgccgcgatgggttatctgttttttcaggcattcagcttcggttcgatgttcgcctttctgaccgaatcttccttcgtgtaccagcagctttaccgtgttacgcctcatcaatacgcttgggcgtttgcactcaacatcatcacgatgatgtttttcaaccgcgttaccgcgtggcggctcaaaaccggcgtgcatccgcaaagcatcctgctatgggggattgtcgtccaatttgccgccaacctgtcccaactcgccgccgtgctgtttttcgggttgcccccgttttggctgctggttgcgtgcgtgatgttttccgtcggcacgcagggcttggtcggcgcgaacacgcaggcatgctttatgtcttatttcaaagaagagggcggcagcgcgaacgccgtgttgggcgtgttccagtccttaatcggcgcgggcgtgggtatggcggcgaccttcttgcacgacggttcggcaaccgtgatggcggcaacgatgaccgcgtccacctcttgcggcattgcgcttctgtggctgtgttcgcaccgggcgtggaaggaaaacgaacagagcgaatacctttaa

SEQ ID NO: 37051 - DNA, 336 bp, Neisseria meningitidis
ttgttgaaaacggatgatttttcatccgtttttgcattcagaaaccgccgcagccgcgacctgctgcaagtttcgcgttcaaacggcaacgggctggaccatccccgcatcggtctggtggtcggcaaaaaaaccgccaaacgcgccaacgaacgaaattatatgaagcgcgtcatccgcgactggttcagattgaacaaaaaccggctgccgccgcaggatttcgtcgtgcgcgtccaccgtaaattcgacaggtctaccgcaaaacaggcaagggcggaactggcacaactcatgttcggcaaccccgcaaccggatgcaggaaacaggcatga

SEQ ID NO: 37052 - DNA, 1977 bp, Neisseria meningitidis
atgcaccccatcgaaacccccgacaagaccttccacgacggcgacggcgtgtccgaattggacaccatcctgcccgcgtggtggctcaaccaagtgcaatccgagctgctggccgtgctgactgcggccggtatccagccggataagtcgcagcctaatcaattactggcagcactgaatagactggctgtagttaccaccggcaaccaagaaatcggcggccaaaaaacctttactgcccaaacccaattcccaagcggcatccatttatccgccaaccagacgaactggaacggcggccacaaagcctacatcggcgcggatgccgacaacgctcacatcgtcttcggcgacgacaccctccgcctgcacagcgcaaacaaccgcatttcctacaacaaccacgacatcttccacaaagccaacaaaccgcgttttgccgaagacatcgaaggcaaaccgaacacactgtccggatacggcatcggcaatttcaaagtcgaaacattccggggcgatttgaacaccctcaaaacagacggcatctattccctgccgacggcggtcggcagctccaacctgcccgttgaaaacactgcctgccatatccaagtcatcgccggtacgcaacccggctggtgcaggcagttgggttatcccgcctacacgtccgacgtgtacgaacgccaccaaacgagcagcgcaaacgacaactggtccgcatggaaaaaactcaattcagacggcatccccgtcggcgcgatcgtatcctttcccaaagccgtccgaaaccccgcaggctatttgcgggcagacggcacaacctttgcgcaaaacaccttccccgacctttaccgcgccttgggcaacagcaaccgcctgcccgatttaagccgtaccgacatcggcatcaccgcgtggtttccgtccgaccaaatcccgaccggctggctggcgtttgacgacatccgcacgcgcgtaaccgaaaccgcttatcccgagctgtaccgtctgctgaccggaaaatacggcagcatccaaaacgtcccgcaggcggaagaccgctttatccgcaacgcgggcaacagcttggcagtcggaacgaagcaggaagacgaaatcaaacggcacgtccacaaagtattttcacactggacaaaccacacagacgcggcagccctcggttacgaagaccgcaacgaaaggcagagaagcgcgctcgtatcgacttggacggacgaaaatttaaacgacaacggctttttaaccccgcgctcggacagcaaaatggcgacaggcggcgacgaaaaccgccccaaagccctggttttaaaactgtgcatcaaagccgccgacaccttgggcgaagccgtgttttggataaagtcccacggcgaaaccatcaacgcaggcgcgctggacgcgggcacgctggcgcaaaacctccaagacaaagccgaccgcgcccacacccacaccgccgcccaaatccaagggctggacgaaaaaatcagcaccgccgttgccgcgcaattcacacgccaaaccatcggcggcgtggatattgtcagattccccgacggcacaatgatacagaccggcagttacaggtttacaagaagcggcggccccatcgaaaacgaagtcgtcttccccgtcgcctttgccgacggcaacgtcaaatgcttcgtatccgaacgccattcgggacgcgttaccggcgatcgaaggcagcacaactggctgtttatccgcgcaaaaaaccacgccgccgccattattaccaactggtacgaaggcagttgcgactggatggccatcggcaaagccgcctcgggaaacgccgccagctccccgataggccccgaaatacctgaaaccaacgaagaaccgcaaagagagagtggaagaacatcaaccggaccccgaaaccgccgccgccgccgagacggcttgctcgaggcactgcaagactag

SEQ ID NO: 37053 - DNA, 324 bp, Neisseria meningitidis
atgaataaaatcattaaaggcgatagggttgtagtaattgctggtaaggataaaggtaagcagggtcaagtagttcgagtgttgggtgataaagttgttgttgagggcgttaatgttgtaaaacgccatcaaaaacctaatccaatgcgtggcattgagggcggtattattactaaagaaatgcctttggatatttctaatatcgcaatcctgaatccggaaactaataaagcggaccgtgttggtattaagctgattgaaaatgaaggcaaagttaaacgcgttcgtttcttcaaatcaaatggctctatcattggggcataa

SEQ ID NO: 37054 - DNA, 621 bp, Neisseria meningitidis
atggcacagtttttcgctattcatcccgacaacccccaagaacgcctcatcaagcaggcggtcgaaatcgtcaataaaggcggcgtggtcgtttatccgaccgattcctgttatgccttgggttgcaaactcggcgataaggcggcgatggaacgcatactctccatccgaaaaatcgatttgaaacaccacctgaccctgatgtgcgccgatttgagcgagttgggcacatacgccaaaattgacaacgtacagtttcgtcagcttaaagccgccacacccgggccttatacttttattttacaggcgacgaaggatgtgccggcgcgcacgctgcacccgaaacgcaaaaccatcgggctgcgtattcccgataatgccattgcacaagccctgctgggggaattgggcgagccgcttttaagctgcaccctgatgctgcccgaagacggcgaaccattgaccgatccttatgaaatccgcgagcgtttggaacacgccgtcgatttggtgattgacggcggctggtgcggaaccgagccgaccaccgtcatcgacatgaccgacggtacggaattggtgcgccaaggttgcggcgatacggcggtgttcggtttgtag

SEQ ID NO: 37055 - DNA, 612 bp, Neisseria meningitidis
atggccgcccccgccggtgtggccaccgaatgccgccttaccgtacaaggcggcaccgaccgagaaagcgatgcctcactgctggcgcgtctgttggaaatcatccgccgaccgcccgcaggcggcaaccgttacgactataaaaactgggcgttgagtgttgacggcgtaaccagcgcatatgtttatccgctgcgccgcggcttgggtacggtggatattgccattacctccgccgacggtgtgtcgtcggaagaaactgtgcgccgcgtacaggcttatatcgacgagatgcgcccggtaacggcaaaaaatgcgctggtactcaagccaaccgtaacggcggtgcctgttaccgtgcaagtcaagctcgacggtatcgacttggacgaggccaagcgccgcatacggacggccctaaaagaatatttcgacaccctgatccccggcgacggcctgactgtgtcgcaaatcgaggctgctatcagcaatgtggatggtgtgatcgaccgccgtctgactgcgccgacggccaaccgtgccgccgatacggttaaccgcatcgagtggtttaaagcgggcgcgattaatgtaacggagatgccgtcatga

SEQ ID NO: 37056 - DNA, 1251 bp, Neisseria meningitidis
atgaccaaactgacacgaagacaaatcatccgccgcaccgccggcacactgttcgccctaagccccatcgcatccgccgttgccaaaacggtacgcgccccgcagtttaccgccgtacggatatggccgtcgcacacctacacccgcctgacgctggaaagcaccgccgcgctcaaataccaacacttcacgctcgacaatccgggcaggctggtcgtcgatatacaaaacgcgaacatcaataccgtattgcacggactttcccaaaaagttatggcggacgacccctttatccgcagcatacgcgccggtcagaacacgcccgacaccgtccgcctcgtcatcgatttgaaacagccttcctacgcgcaagttttttccctcccacccgtcggcggctttaaaaaccgcctcgtcgtcgatctctatccgcaagggatggatgccgacgatccgatgatggcgctgctcaacggcagcctgaacaaaacccgtcgcggctcccctgaagccgacctcgctcaaaacactcccgcacaaaccgaacgcggcaaaaacgggcgcagacccgtcattatgatcgaccccggacacggcggcgaagaccccggcgccgtcagcccgggcggtttgcaggaaaaacacgtcgtcctctccatcgcccgcgaaaccaaaaaacaattggaagccttgggttacaacgtctttatgacgcgcaacgaagacgtgttcatcccattgggcgtgcgtgtcgccaaagggcgcgcacggcgggcggacgtattcgtctccatccacgccgacgctttcaccagcccctccgcgcgcggaacgggggtttatatgctgaacaccaaaggcgcgaccagctctgccgccaaattcttggaacaaacccaaaataatgccgacgcggtcggcggcgtaccgaccagcggcaaccgcaatgtcgataccgccctgctcgacatgacccaaaccgccacgctgcgcgacagccgcaaactcggcaaactggtgcttgaagaattgggcaggctcaaccacttgcacaaaggcagggtggacgaagccaatttcgccgttttgcgcgcgcccgatatgccgtctatcctggtcgaaaccgccttcctgtccaatcctgccgaagagaagctgctgggcagcgaatccttccgtcggcagtgcgcccaatccattgcctcgggtgtccaacgctacatcaatacatccgtattgaagcggggttga

SEQ ID NO: 37057 - DNA, 1020 bp, Neisseria meningitidis
atgaaaaaaattctcgttaccggcggcaccggttttatcggctcgcataccgttgtttctttgctgaaaagcggccatcaagtcgtgattttggataacctatgcaattccagcatcaatatcctgccacgcttgaaaacgattaccggccaagagattccgttttatcaaggcgatatccgcgatcgtgagattttgcgccgtatttttgcggaaaaccgcattgattcggtgattcattttgccggcttgaaagcggtgggtgaaagtgtggccgagccgatgaaatattatgataataatgtttccggcagcttggtgttggcggaagaaatggcgcgtgccggcgtatttaagattgtgttcagctcatcggctacggtttatggcgatccgggcaaagtgccttataccgaggatatgccactgggcgataccaccagcccttacggcacatcgaaatcaatggttgagcgcattctcactgatattcaaaaagccgatccgcgctggagcgtgattttgttgcgctatttcaacccgattggggcgcacgaaagcggcttgatcggcgaacagcccaacggtattcccaacaaccttttgccctatatctgccaagtggcttcgggcaggctgccgcaactgtcggtattcggcggcgattatccgacccccgacggtacgggaatgcgcgactacattcatgtgatggatttggcagaaggccatgtcgcggctatgcaggcaaaaagtaatgtagcaggcacgcatttgttgaacttaggttccggtcgcgcttcttcggtgttggaaatcatccgcgcatttgaagcggcttcgggtttgacgattccgtatgaagtcaaaccgcgccgtgccggtgatttggcgtgcttctatgccgacccttcctatacaaaggcgcaaatcggctggcaaacccagcgtgatttggcgcagatgatggaagactcatggcgttgggtcagcaacaacccaaatggctacgacgattaa

SEQ ID NO: 37058 - DNA, 450 bp, Neisseria meningitidis
atggacgtacaactccccatcgaagccaaagacatccaaaaactcatcccccaccgctatccgtttctccagctcgaccgcatcaccgccttcgagccgatgaaaaccctgaccgcgattaaaaacgtcaccataaacgaaccccagttccaaggccattttcccgacctgcccgtgatgcccggcgtactcatcatcgaagcgatggcgcaggcgtgcggcacgttggcgattttgagcgaaggcgggcgcaaagaaaacgaattcttcttcttcgccggcatagacgaagcccgtttcaaacgccaagtcatccccggcgaccaactcgtctttgaagtcgagctgctgaccagccggcgcggcatcggcaaattcaacgccgttgccaaagtggacgggcaagtcgccgtcgaagccgtgattatgtgcgccaaacgcgtggtttga

SEQ ID NO: 37059 - DNA, 1383 bp, Neisseria meningitidis
atgtcaatcaatacgtttgaaacctttatttacgaattataccaatcaactaatttcgcagaaattgctcgcattacgggatttagtaaccataaagcgctaaacttggaaaccatccgaatgatggcaattagctgctttaaaaccaaaaacaccacaaaatgcatcgagctaagtgaatatttcaatgaaaaatcagatattaaagatttttttatttttgaaattttggctgaatgctattttctgcaaaatgaccttgttaaatctttagagaactatgagaaagcattattattaaatccaaaactaatctcagcaagatttaaacatatgtgtctcaaatataggctttttaatgaactagatagtactactttctcaaaatatgaaattgaatctcaacaaaagaaaaagatttcaaacttacgcattattgcctatatccaattaaaagaaaaaaagtattttaaggcatataataacctgaaattactcatagagctaaacaaatctcctttctatcccgattatttatcaataatacacgctattgaaaatttagagtattctaaacaatcccaaaatactaaaaaagaactaacagaatatatcaaaatttccaaagcaattgcactaaaatcagaattcgtatgcaacgggagtaacaatttatttgttactttatcacctgctacaggtttcgttcttaagaaatataattaccctgctgataaactatgctttattgacaacacaaacacatattatacttttgcttatgaattgatcgcagagcatattattagcttagttaaaaaatataaatatgaaaatatttctattattggctcatcaaaaggaggaactgccacaattatacttctaaatttattgcagactgcattacctaatactacaatatgcgcagtatcttgctctcctcaaatacagatttttccattcaataagaacctaactattcctagttatcaaaaatttgcagaatatttctcttataactcaattctagaaagcaaatgtgctcaagctcaaaagttaataaattttgatattctctatagaaataaactaactattttttatggtgataaatttaaaatggacgcccaagaagtatctacaattagacctataaacaatactactattattcctttaaactattcaggacatggttctcttatcccattaacaattcctgaaaataaaagttttgacgaattaaagcagaaatattctaaacttgaaatcgacactgatttccaagccttaggtggcaataacctttcaagtattgtggatgagatttttgaaatctattccaatcctgatatgcgattacataaattcttatgttaa

SEQ ID NO: 37060 - DNA, 738 bp, Neisseria meningitidis
atgattattttggacaaggtttccaagcattaccaaacgcgcgacaagacccgttttgccgccgtcgagccgaccagcctcgaaatccgcgacggcgaaatcttcgggctgatgggttattcgggtgcaggcaaatccaccctgttgcgcctgattaacctgttggaacgccccgacagcggcaaggtcaacgtctgcggacaagagctgaccgcgctcgatgccgccgcattgcgtcaggctcggcagaatatcggcatggtgtttcagcagttcaacctgttgaacaaccgcaccgtcgccggcaacgtcgccttcccattggaaatcgccggatggccgtctgaaaaaatcaaagcgcgcgttgccgaatgcctcgaaatcgtcggattgaccgaacgcgccggccactatcccgcccagctttccggcggacaaaaacagcgcgtcggcatcgcccgcgcgctcgcatccaagccgcaagtcatcctcgccgacgaacccacttccgccctcgaccccgccaccacgcgcagcgtcttggaatgtttggaagacatcaacaaacgcttcaacgtaaccatcgtcatcgtaacccacgaaatgagcgtcatcagacgactgtgcgaccgcgccgccctgttggataaaggcaaagtcgtcgaaatcgtcgaagtacgcggcaaccaaatccacgcccgatccgacatcgggcgcgaactcatcagagaggactga

SEQ ID NO: 37061 - DNA, 1032 bp, Neisseria meningitidis
atgggcattaaagtcgccatcaacggctacggacgcatcggccgccaggttttgcgcgccatctacgattatcagattcaagaccaactccaaatcgtcgccgtcaacgccagcggcagccttgaaaccaacgcccacctcaccaaattcgacaccgtgcacggacgctttgaagccgacgtatcccacgacggcggcaacctcatcgtcaacggcgacaaaatccccttcttctcgacccgcaaccctgccgaactgccgtggaaagaactcggtgtcgatttggtcatggaatgcaccggcgcgttcaccagcaaagaaaaagccaaaatccacctcgaaagcggtgcgaaaaaagtcctcatttccgcaccgggcggcgacgatgtcgatgcaaccgtcgtgtacggcgtgaacgacagcatcctaaccgccgacatgaccgtcgtttccaacgcttcctgcaccaccaactgcctctcgccggttgccaaagtgttgagcgaaagcgtcggcatcgtcaaaggcgcgatgaccaccatccacgcgctgaccaacgaccaaaccgttaccgacgtgcgccacaaagacctgcgccgcgcccgcagcggcgtggaaaacatgattccgaccaaaaccggcgcggcaaaagccgtcggactggtactgcccgaattgaaaggcagactcgacgggcttgccatccgcgtgccgaccgtcaacgtatcattggtagatttgagcttccaagccgcgcgcgacacgacaatcgaagaaatcaacgcactgatgaaagccgcctcggaagcaggcgcgctcaaaggcgttttaggctacaacaccctgcccttggtttccatggacttcaaccacaccaccgaagccagccacttcgacgcaacgctgaccaaagttgttgacggcaacatggtcaaagtgttcgcttggtatgacaacgaatggggcttcagctgccaaatgctgaacaccgcacgccgtatgttcggacttgaagtgcgcccactcaaataa

SEQ ID NO: 37062 - DNA, 1311 bp, Neisseria meningitidis
atgaccgatttgtttgcccgagaacccgacgcgccgcttgccgaacgattgcgtccgcatacgcttgacgacgtggtggggcaggaacacctcatcggcgaaggtaaacctttgcgcgtggcggtagaaggcggcaagccgcattctatgttgctgtgggggccgccgggcgtgggcaagacgacgttggcgcggattttggcgcagagtttcaatgcccagtttttgcctgtttccgccgtgttttccggcgtgaaggacatccgcgaggcaatcgataaagccgaaatcgctttgcagcagggacgcgcgacgattttgtttgtcgatgaagtccaccgcttcaacaaggcgcagcaggacgcgtttttgccgcatgtcgaaagcggtttgctaacctttattggtgcgacgacggaaaatccgtcgtttgaagtcaatcccgcgctgttgagccgcgcgcaggtgtatgttttgcagcccttgtcttcagacggcctcaaaaagctggttgccaaagttttggctttgcccgaataccgggatttcacgattgaagccgacgcgcaggagctgttcgtcaataccgccgacggtgatgcgcgcagattgttgaatttgttggaacaacttttacgcgccgccgatacacgtcgtctgaaaaacttaaccgccgaatttctcgccgacagtctcggggcgcaaatccgccgtttcgacaaaggcggcgagagcttctacaaccaaatctccgccctgcacaaatccgtgcgcggttcgcatccgaacgccgcgctgtattggttctgccgtatgctcgacggcggcaccgacccgcgctacctcgcccgccgcatcgtgcgtatcgcttgggaagacatcgggcttgccgacccgcgcgccttccaaatcgccaacgatgccgccgccaccttcgaacgcttaggctcgcccgaaggcgaactggctttggcgcaagccgtgctgtaccttgccgccgctgccaaatccaacgcgggctacaaggcatacaaccaaatgcgccacttcgtcaaagaaaacgccagcgacgaagtgcccgtccacctgcgcaacgccccgaccaagctgatgaaggaattgggctacggacgcgaataccgctacgcccacgacgaaccgaacgcctactccgccggcgaaagctatatgcccgacggcttggacgaaccggacttctaccaacccgtcccgcgcgggttggaaatcaaaatcggcgaaaagctggcgtggctcaaatcgctggatgaagaggcattaaaggcaaaatga

SEQ ID NO: 37063 - DNA, 1266 bp, Neisseria meningitidis
atgttcagcttcttccgtcgcaagaaaaaacaggaaacgccggctctcgaggaggctcaaattcaggaaaccgcagcaaaagcagagtccgaaaccgatcaagtaattgaaaatattaaagaagatgctgaatctttagcagaaagcgtcaaagggcaggtcgaatctgccgttgaaaccgtcagcggtgcggttgaacaggtaaaggaaaccgttgccgagatgctgtctgaagcagaggaagcggcggaaaaagcagcggaacaagtcgaagcggcaaaagaagccgttgccgaaaccgtcggcgaggctgtcgggcaagttcaagaagccgttgcgacaactgaagaacacaagctcggttgggcggcgcgtttgaaacaaggtttgaccaaatcgcgcgacaaaatggcgaaatcgctggcgggcgtgttcggcggtggacaaatcgacgaagatttgtacgaagagctggaaaccgtgctgattaccagcgatatgggcatggaagccaccgaatacctgatgaaagacgtgcgcgaccgcgtcagcctcaaagggctgaaagacggcaacgaattgcgcggcgcgttgaaagaagccttgtacgacctgattaagcctctggagaaacctttggttttgcccgaaaccaaagagccgtttgtcatcatgcttgccggcatcaacggcgcgggcaaaaccacgtctatcggcaaactcgccaaatatttccaagcgcagggcaaatctgtgctgcttgccgccggcgatactttccgcgccgccgcccgtgagcagcttcaagcttggggcgaacgcaacaacgtaaccgtgatttcgcaaaccacgggcgattccgccgccgtgtgcttcgatgccgtccaagccgccaaagcgcgcggcatcgacatcgtgcttgccgacaccgccggccgcctgcccacgcagcttcatttgatggaagaaatcaaaaaagtgaaacgcgtgctgcaaaaagccatgcccgacgcgccgcacgaaatcatcgtcgtgcttgatgccaacatcgggcaaaacgccgtcaaccaagtcaaagcctttgacgacgcattagggctgaccggtttaatcgtgaccaaactcgacggcacggcaaaaggcggcatcctcgccgcgcttgcctccgaccgccccgtccccgtccgctatatcggcgtgggcgaaggcatagacgacctgcgcccgtttgacgcgcgcgcgtttgtggacgcactgctggattga

SEQ ID NO: 37064 - DNA, 861 bp, Neisseria meningitidis
atgaaaccctattccgccaatcccaacctgaccgaaccgcgctggctgcgcgtgttgctgattgccgccgcgctgggctttctgctgctgatgctggtcgtgccgctcgtcgccgtgttttacgaagccttaaaaggcggttgggatttgtacctgaaatccttaaacgatcccgaagcgtggtctgccatcaaattgacgctgattaccgcgctgattgtcgtccccgtcaatgccgtcttgggcgtggcgatggcgtggctgctgacccgttttgattttcgcggcaagcagttgctgactaccctgctcgatttgccgttttccgtatcgcccgtggtggccggtttaatgttcgtcttattgttcggcgcgcacacggcattgggtggctggctcgaagcgcaaggcatacagattatcttcgccatccccggcattattctggcgacgctgttcgttactttcccctttgtcgcacgcgaaatcatcccgctgatgcaggctcagggcgacagcgaagaacaggcggcattgatactcggcgcaagcggctggcagatgttttggcgcgttaccctgcccaacatcaaatgggcgttactctacggcatcatcctcaccaacgcccgcgcgatgggcgagttcggcgcggtcagcgtggtatcgggacacatacgcggcgaaaccaacaccgtcccgcttttggtcgaaatcttctacaacgaatacaacttcaccggcgcattcgccctctccggcgtattggcacttttagcactggcgacgctggcggtgcagaacatcatcaccaaattacaagacaaaaaactcgccgccgccgaaaggaacgcagcatga

SEQ ID NO: 37065 - DNA, 771 bp, Neisseria meningitidis
gtgcgccatatcgcgcaaaccgaaattatgccgcgttttttgaatacgccgtctcaccgcaaggaagacggttcgatgttgagcgaggcggacattgccgcgcagacggcttttgccgccgcgttgccgcttttaatcgacagtccgatgttgggtgaggaaatgtcgcggcaggaacagtcggctttgtgggaacaatattcgggggaaaaggggctgtggattgtcgatccgatagacgggacgaacaattttgtcaacgggctgccgcattttgcggtatcggtggcgtttgtccgcaacgggcgcgccgagttgggcgtaatctacaacccagtcagcggcgaatgtttttatgccgaacgcgggcagggggcgtttttaaacgggacgcgtctgcccctgcgcctcgtggataaaaaactcaatgaggcgattgcgggcgtggaaatcaaatatctgcgttcgggcaaactttccagccgtatgagtacgctcgcgccttttggaacgatacggagtatgggcagcagtacgttggattggtgttatctggcgtgcgggcgttatgatgtttatgttcacggcgggcagaagctgtgggattatgccgccggcgcgttgattttcgaggaggcgggcggcaggctgacgactttggaaggcgacgggttttggagtggtgaacacgtgttcaaacgctcggtcgttgccgcgctcgaaccgaagctgtttgaacgctgggtcgggtggatacgggaaaaccaatag

SEQ ID NO: 37066 - DNA, 1362 bp, Neisseria meningitidis
atgctgaaaaaatggttgaataagatgctgccttccggtcggagcagtaaaaaagcggaaagtaaaacgatcattcctgccgaaagacacaacatccgtgccgaaatgttgagctttgccgccgaaaacgtcatacgccgcctgaaaggggcggggtttcaggcttatgtggtcggcggcgcggtcagggacctgctgctcggcatcgaacccaaggatttcgatgtcgcaaccgatgccacgcccgaacaggtgcacaaactcttccgccgcagccgcatcatcggcaggcgttttcagattgtccatgtgatgaacggtgcggagattatcgaagtaacgacgtttcgcggcggtgcgaaggttcatcagaacgcgcacggcagaatcatgaaggacaacacctacggcagcatcgaagaagatgcgatgcggcgcgattttacctgcaatgccttgtattacgatcctgaaaaagaagagattttggatttccacaacgggattgccgatgttgccgcccgcaggctggttatgattggtgatgccgccgaacgctatcaggaagaccctgtcaggattttgcgcgccatccgcctgtcgagcaaattgggctttgatctgtcggaagaaaccgccgcaccgattgccgaatcgatatgccgtctgaagcacgaaccggtagcgcggctgttcgacgaaattatgaaactgctgttttcagggcacgcgcgcgagtgtctgaaacgtttgaacggatttgacataccggacgacatccatccgctgctcaatgccttgcgcgtttcagacggcatcgccggaaaaatgacggtgcttgccctgaaaaataccgatgagcggctgcgtgccgacaaatcggtttcggtcggtttcgtactggcgaccctgatgtggcccgagttggaacgccattggaaaagcaatctgcaacagggtttgaaacccgtgcccgccctgtccgatgcaatcaatacgatgcgcgaaaccgtcgaacgcggttggggcgtaccgcaacgcttttccgccacgatgcgcgaaatttggatgttccagccgcagtttgaaaaccgcaaaggcgcaaggccgcacaaactgtttgcacaggcgcgtttccgtgccgcctatgatttcctgctcttgcgcgccgaaaccggcaatgcggaccgcgcccttgccgagtggtggacggcgtttcagacggcatcgacggaacagcggtcggagatgaccaaaaacgaagccgccgcccgacacgaaaaaaacgaaggacaggcgaaaaaacgccgccgtcgcaggcgcaaacccaagccgaaggttgtgggaacggattgggaataa

SEQ ID NO: 37067 - DNA, 2298 bp, Neisseria meningitidis
atgcaaccgcacgctccacataccgattccaatacgctgatgctcggtcaatacgccgaacgcgcctatctcgaatacgccatgagcgtggtcaaaggccgcgcgctacctgaagtttcagacggccagaagcccgtgcagcggcgcattttgtttgccatgcgcgatatgggtttgacggcgggggcgaagccggtgaaatcggcgcgcgtggtcggcgagattttgggtaaataccacccgcacggcgacagttccgcctatgaggcgatggtgcggatggcgcaggattttaccttgcgctatcccttaatcgacggcatcggcaacttcggttcgcgcgacggcgacggtgcggcggcgatgcgttacaccgaagcacggctgacgccgattgcggaattgctgttgtccgaaatccatcaggggacggtggatttcgtgccgaactacgacggcgcgtttgacgaaccgctgcacctgcctgcacgtctgcctatggtgttgctcaacggcgcgtcaggcatcgcggtaggtatggcgaccgaaattccgccgcacaatttgaacgaagttacgcaggcagcgattgcgctgttgaaaaagccgacgctggaaaccgccgacctgatgcaatatattcctgcgcccgattttgccggcggcggtcaaatcatcacgccggcggacgaattgcgccggatttatgaaaccggcaagggcagcgtgcgcgtgcgtgcgcgttatgaaatcgaaaaattggcgcgcggacaatggcgcgtcatcgtaaccgagctaccgccgaacgccaattccgccaaaatccttgccgaaatcgaagagcagaccaacccgaaaccgaaagcgggcaaaaagcagctcaaccaagaccagctcaataccaaaaagctgatgctggatttaatcgaccgcgtgcgcgacgagtccgacggcgaacatcccgtgcgactggtgttcgaaccgaaatccagccgcatcgataccgataccttcatcaacacgctgatggcgcaaacttcgctggaaggcaatgtgtccatgaacttggtgatgatggggctggacaaccgccccgcgcagaaaaacctgaaaacgattttgcaggaatggctggatttccgcaccgtaaccgtaacacgccgtctgaaattccgtttgaaccaagtggaaaaacggctgcacatcctcgaaggccgtctgaaagtctttctgcacatcgacgaagtgattaaagtcatccgcgaatcagatgacccgaaagccgatttgatggcggcgttcgggctgaccgaaatccaagccgaagacattttggaaatccgcctgcgccagttggcacgtttggaaggtttcaaactcgaaaaagaattgaacgaattgcgcgaagaacaaggccgtctgaacatccttttgggcgatgaaaacgaaaagcgcaagctgattatcaaagagatgcaggcggatatgaaacaatacggcgatgcacgccgcacgctggtggaagaggccggacgcgccgtgctgacacaaaccaccgccgacgaacccatcacactgattctgtcggaaaaaggctggatacgcagccgtgccggacacaatctcgatttgagccaaaccgcgttcaaagaaggcgaccgcctcaaacaaacccttgaaggcagaacggttttacccgtcgtcatcctcgattcattgggcagaacctatacactcgatgccgccgaaattcccggcggacgcggcgacggcgtgccggtttcatccttgatcgagttgcaaaacggcgcgaaacccgttgcgatgttgacaggattgccggaacaacattatttattatcaagcagcggcggctacggcttcatcgccaagttggctgatatggtcggacgcgtaaaagcgggcaaagtggtgatgaccacagacagtggcgaaaccgtcctgccgccgattgccgtctatgcctcctcgttcatcaaccccgactgcaaaatcattgccgccaccagtcaaaaccgcgccctcgccttccccatcggcgaattgaaaattatggcgaaaggcaaagggctgcaaatcatcggattaaacgccggcgaatcgatgacgcataccgccgtttcttccgagccggaaatcctgattgaaagcgaaggcaggcgcggcgcagcgcacaaagaccgcatccccatctccctgcttgaggcaaaacgcggcaaaaaaggcaaactattacccatatcgggcagcctgaaacagctttcttccccgaaataa

SEQ ID NO: 37068 - DNA, 402 bp, Neisseria meningitidis
atgctgcaaattgccgccgcaacggatttttccgttataattaaaaattcaagcaatacgccccatcatacccgaacgacggtatctttaccatcagacaaggatgcttttcatggcactgacacttgccgacgtagacaaaatcgcccaactctcccgactgcacctgactgcggaagaaaaagaaaatcgcttcaagaattaaacgacattttcactatggtcgaacagatgcaaaccatcaacacagacggcatcgaaccgatggcgcatccgcacgaggccgccctgcgcctgcgcgaagacgaagtaaccgaaaccgaccgcgccgccgaatatcaggcggtcgctccggaagtacgcaaccgtctgtacatcgtaccgcaagttatcgaagaataa

SEQ ID NO: 37069 - DNA, 3006 bp, Neisseria meningitidis
atgtcccaaactcacaacgaaaattcccgcgtcaaaatccccgccgttttgcacctgatgcgcttgggctacgactacctctcgctcaaaaacgaaaattgggataaaccaaccaacatctttcccaaaatctttatagaaagcctctgccgcatcaatcccgatttgtcgccggacgatgcacgccgtttgctgaccgacatacgcttagaactggacaacgaagacttggggcaaaagttttacgaacgccttaccaatcaatccggcggcaagaaactgatcgacttccaaaattttgataacaacagcttccacgttgtaaccgaattgccctgtatcaacggcgatgaagaattccgccccgacattaccctgctggtaaacggcatgcctttggtttttatcgaagtcaaaaagcccaacaacaaaggcggaatcggcgaagagcgggagcgcatgggcaaacgtgcgaaaaattccaaatttcgccgtttcatcaacatcacccaattcatgattttttccaacaacatggaatacgacgacggcgcaaccgaaccggcacaaggcgcgttttacgcttcgtctgcttacggtaagcccgtgtttaactacttccgcgaagaacataaattaaatcttgccgaattattgaacacgctttcagacggcctcgaaaacaacgtcctgcaagacaacaacctgcccgttatcaaacacagccccgaatttatcagcaataaatcgcccgatacgccgaccaaccgcatcctgacttcgctgctttgccgcgaacgtctttcttttcttctgcaacacgggctgacttacgtcaaagcaagtcaaggcttggtgcaaaaacacatcatgcggtatccgcagctatttgccactctcgccattgaaaaacatttggcaaacggcggcaaaaaaggcgtgatttggcacacccaaggctctggcaaaaccgcgcttgcctattacaacacccgctacctgacccactattatgccaaacagggcatcgtgccgaaattctatttcatcgtggacaggcttgatttattgaaacaggcgcagcgcgaatttactgcccgcgatttagtcgtccataccatcgacagccgcgaagcctttgctgccgacatcaaatccgcccaaactttgcacaaccacgcaggcaaggcggaaatcactgtcgtcaacatccaaaaattccaagacgaccccgatgtcgtcgcccgtaacgactacgacctcgccatccagcgcgtttattttctcgacgaagtacaccgcagctacaaccccaaaggctcgtttcttgccaacctcaaccagtccgacgtaaacgccgtcaaaatcgggctgaccggcacgccgcttatcggcgtaaccgcaggcaacgtcaacacccgcgaactcttcggcgactacatccacaaatactattacaacgcctccattgccgacggctacaccctgcgcctgatacgcgaagaaatcggcagccgatacaaggcgcaattacaagaagcactggcgcaacttgaaatcgaaaaaggcagctttgaccgcaaagaaatctacgcccatccgcacttcgtccacccgatgcttgactacatcttggacgacttcgccaaattcagaaaaaccaaccaagacgacagcctcggcgctatggttgtttgcgacagcgcggaacaggcacgtcagctttttgagcattttcagatagcctcagaccataatttcaccgccgcgctgatattgcacgacgtcggcactaaggacgaacgcgaccaatgggttaaagatttcaaagcgggcaaaatcgacatcttgtttgtgtacaacatgcttttgaccggctttgacgcgccgcgcctgaaaaagctctatttgggcagactgataaaagcccataaccttttacaaaccctgacccgcgtcaaccgcacctacaaatcttaccgctacggctatgttgtcgattttgccgacatcgagcgcgaatttgacaaaaccaaccgcgcctattgggacgaactttccaacgaattgggcgacgaaatcggcagctacagccggcttttcaaaaccgccgaagaaatcgaacaggaaattgcagacattaaaaacgccctgtttgatttcgataccgaaaacgccgaagaattttgcagccaaattagccaaatagcagacaaaaaacagctgctcgccctaaaaaaagccctgcaaacttccaaaaagctgtacaacgtcctgcgcctgcaaggcagccacgaatttctcgcccatctcgattttgacaagctcaatcttttgtaccgcgaaaccgccgcgcgtttggagaccttaaaccttgccgaaaaactacagcaaggcgacaccgcccatttgctcaatgaagcgctggaagacgtttactttcaattcgttaaaatcggcgaagccgaactcaaacttgccgacgatttgaaagacatcatgcgcaaagtccgcgaagggctggcgggcaacttcgatcaagaagaccccgaatacatcagcctgcgcgaaggactggaacgcatcttcaagaaaaagaacctcgccgaagtcgggcaagaagaaatgcaggcaaacatcgccatactcgaaaccgtctatgccaaaatcaaagagctgaaccgccaaaacgacctcttgcggcacaaatacggcggcgacgccaaatatgcccgcatccacaaacgcctgcgcgaaaaccccgccctctacggcgataaactcaaagtctttaacgcgctgaatggtgtaaaaaccgacacggaccaaaaagtgctggatatggagcagattttggacaaccaaaattactttgaaaaacaaatgcagggcatcgtattaaaacgctttagaacggaacagcaatttcctgttcagcctgcagacatccaagccatcaaccgcttgctggtacgggaatatttaaaagaaagcgggcggatttga

SEQ ID NO: 37070 - DNA, 1371 bp, Neisseria meningitidis
atgttagacaatttaaccggccgcttcagcaatgttctcaaaaacatccgcgggcaggccaaactgaccgaagacaatattaaagaagccttgcgcgaagtccgcctcgccctgcttgaggcggatgtcgccctgcctgtcgtcaaagagttcgtcaacaacgtcaaagaaaaggccctcggtcaggaagtagcgggcagcctgacgccggatcaggcatttatcggcgtggtcaacaaagccctgaccgagctgatgggcagggaaaacaaaacgctggatttgtcggttgcgccgcccgccgtcgtgttgatggcaggtttgcagggcgcgggcaagacgacgaccgccggcaaactcgcccgcctgctgaaaaacgatcagaagaaaaaggttttggtcgtatctgccgacgtttaccgccctgccgcgattgaacaactgcgtctgttggccgaacaggtcggcgtggactttttcccatccgataccaaccaaaaaccggttgagattgcaactgccgccgtcgattacgccaaaaaacatttttacgatgtattgatggtcgataccgccggccgtttggcaatcgatgaggagatgatgaacgaaatcaaagcccttcacgcggcggttaacccggtggaaactttgttcgtcatcgatgcgatgctgggtcaggatgcggtgaacactgctcaggcatttaatgaagccctgccgctgaccggtgtcgtattgaccaagatggacggcgattcgcgcggcggcgcagctttgtccgtgcgccacgtaaccggcaagccgattaaatttatcggtgtcggcgaaaaaatcaacggcctcgaacctttccaccccgaccgtcttgccagccgtatcctcggcatgggcgacgtattgaccctgattgaagacgtccaaaaaggtattgatgaagaagccgccgccaaaatggcgaaaaagctacaaaaaggcaaaggcttcgacctcaacgactttaaagaacaaatccagcaaatgcgcaatatgggcggtttggaaaacctgatgtcgaaaatgccgggcgaactgggtcaaatatcgaaacaaatccccgaaggaacggctgaaaaagcgatgggcaaagtggaagccatcatcaactcgatgactccaaaagaacgcgccaaccctgccctgctcaaagccagccgcaaacgccgtattgcaatgggtgcgggcacgaccgtacaggaagtgaacaaattgctcaaacagtttgaacaaatgcaacaaatgatgaagatgttcagcggcaacggcttgggcaaactgatgcgtatggcgaaaggaatgaagggaatgaaaggaatgttcccgggtttgtaa

SEQ ID NO: 37071 - DNA, 183 bp, Neisseria meningitidis
atgttttggtatgtaatcggcttttgctcctttgtcgtcgcgctgctgtcgctgtgggtcaatgccggcgcattcggtatgcaggaagacgataccccgcaatcggattatgaaaaacgtttgggcttgggtgcgaagctgaaaaacaaaaatacgccggatacggaagaaaagcagcaataa

SEQ ID NO: 37072 - DNA, 864 bp, Neisseria meningitidis
atggaagaatatacggcaaacctgtcttcagacggcatcgtgtccgcgcaaatcctgctcagccgcgccgactttgccgacaaacgccgctaccaaaatgccggcggcgcactttccgtgctgctgcaacgccgcgccgtccccatcatcaatgaaaacgatacggtttcggttgaggaattgaaaatcggcgacaacgacacattgagtgcgcaagtggcggcgatgatacaggcagacctcttggtgctgctgaccgacatagacggtctttacacgggcaacccgaacagcaatcccgatgccgtacggctggacaaaatcgaacacatcaaccatgaaatcatcgaaatggcgggcggatcgggttcggcaaacggcacgggcggtatgctgaccaaaatcaaagcggcaaccatcgccgccgaatccggcgtaccggtgtatatctgttcctcgctcaaacccgatgcacttgccgaagctgccgaacatcaggcggacggctcgtttttcgtcccccgtgccaaaggtttgcggacgcagaagcaatggctggcgttctattccgaaagccggggcagcgtttatgtggacgaaggtgcggaacacgctttgtccgaacaggggaaaagcctgctgatgtcgggcattgccggaatcgaagggcatttttcccgtatggacaccgtaaccgtgtacagcaaggcaaccaaacagcccctgggcaaagggcgcgtcctgttcggttctgccgccgccgaagacctgctcaaatcgcgtaaggcgaaaggcgtgttcatccatcgggacgactggatttccatcacgcccgaaatacgcctgcttctgaccgaattttag

SEQ ID NO: 37073 - DNA, 318 bp, Neisseria meningitidis
atgaacaagccgtttatcactcaggcgcagttggcactttataaatatcagccgtccagcaagtattttgggcaatcgatggcggttatagcgcaatctgaatttgttgaatttgcgaagattaataagtctgaaaatgttattgattgtttctcttttttctggaatagaagaattaaacatgatatttggctaatctcattttctgataattcagaaatggtaattaaagaatctctgaaagatggtcataaaatatacaaatttgaattttgcgaaattgtcgataattgcaattttgatgatgtattcgtttga

SEQ ID NO: 37074 - DNA, 486 bp, Neisseria meningitidis
atgagatttttcggtatcggttttttggtgctgctgtttttggagattatgtcgattgtgtgggttgccgattggttgggcggcggctggacgttgtttttgatggcggcaggttttgccgccggtgtgctgatgctcaggcatacggggctgtccggtcttttattggcgggcgcggcaatgagaagcggcgggagggtatccgtttatcagatgttgtggcctatccgttatacggtggcggcggtgtgtctgatgagtccgggattcgtatcctcggtgttggcggtattgctgctgctgccgtttaagggaggtgcagtgttgcaggcaggaggtgcggaaaattttttcaacatgaaccaatcgggcagaaaagagggcttttcccgcgatgacgatattatcgagggggaatatacggttgaagagccttacggcggcaatcgttcccgaaacgccatcgaacacaaaaaagacgaataa

SEQ ID NO: 37075 - DNA, 396 bp, Neisseria meningitidis; identical to SEQ ID NO: 36724

SEQ ID NO: 37076 - DNA, 222 bp, Neisseria meningitidis
atggctgtatggagagattatataactttggaatctcatgacttagcagaaggatatacttatttcttcaatgaaaatacggatgattgctatgttttgaaacaagattttattaataatgagcgatatgaaaaaacagaattatattcccaaaaagataaggtaattctatttccaaagtttggtgaatatgatttggtgttaaatccggacattatttaa

SEQ ID NO: 37077 - DNA, 330 bp, Neisseria meningitidis
atgagagtaaatgcacaacataaaaatgcccgtatctctgctcaaaaggctcgtttggtagctgatttgattcgtggtaaagacgttgcccaagctttgaatattttggctttcagtcctaaaaaaggtgccgagctgattaaaaaagtattggagtcagctattgctaatgccgagcacaataacggtgcggacattgatgaactgaaagtggtaactatctttgttgacaaaggcccaagcttgaaacgttttcaagctcgcgccaaaggtcgcggtaaccgcatcgaaaaacaaacttgtcatatcaatgtgacagtgggtaactaa

SEQ ID NO: 37078 - DNA, 492 bp, Neisseria meningitidis
atgagtaccgaaaccaaaaactacattacgcccgccggatggcaggcattgaaagacgagctttaccggctggtcaacaaagaacgccccgaaatcgtccaaatcgtcaactgggcggcaggcaacggcgaccgcagcgaaaacggcgactatctttacggcaaacgccgtatgcgcgaaatcgaccgccgcatccgtttcctgaccaaacgtttggagtctgccgtcgtcgtcgatcccgaattgcgcgaagcgaccgaccaagtgtttttcggcgcgacggtcgggctgttgcgcggcgacgggcgcgagcaaaccgtcaaaattgtcggcatcgatgaaatcgataccgcgcaaaacaaaatttcttggatttcgccgttggcgcgttgcctgattaaagcgcgcgaaggcgacgaagtggttttgaacacgccggaagggcgtgaggaaattgaaatcctttctgtcgaatacatcaaaatcgactga

SEQ ID NO: 37079 - DNA, 2259 bp, Neisseria meningitidis
atgtacacaagaattatggaaatcagcccttggacgctgcgttcggcaaagctggaaaaagaacacaaacggctgcaagagagcctgaccagtttgggcaacggctatatgggtatgcgcggcagctttgaggaaacctattccgccgacagccacttgggtacctacatcgccggtgtgtggtttcccgacaaaacccgcgtcggctggtggaaaaacggctaccccaaatatttcggtaaagccatcaacgcgctcaatttcagcaaagtcaaaatctttgtcgacgggcaggaagtggacttggcgaaaaacgatgttgccggcttctccgtcgaacttgatatgcagcacggcgtgttgcgccgctcgttcaccgtattcggtgtgcgtttcaatgtgtgcaaattcctgtccgtcgcgcaaaaagagctggcggttatccgctgggaagccgtatccgttgacggcaaaacccaccaagtccgcatcgattccatcatcgatgccgacgtgaaaaacgaagactccaactacgaagaaaaattctggcaggtattggacaaaggcgtttcagacagtctctcctacattgccgcccaaaccgttgccaaccctttcggcgtggaacaatttatcgtcaacgccgagcaaaccttcgccggcagctttaaagccctcggcggcagacaaaccgactggcaggtctccaattcttttgaagccgaagtcggcggcacacccgaaacctttgaaaaacgggttattgttaccaccagccgcgattatcagggcttggaagcagtgaaagccgcaggccgcgctttgtcggaaaaagtcgcaggcgttgcgtttgaaaccttgctggacgcgcacaaagcaggctggctgcaccgttgggaaatcgccgacgtggtcatcgaaggcaacgacgaagcgcagcaaggcatccgtttcaatctgttccaactgttctccacctactacggcgaagacgcgcgcctgaacatcggcccgaaaggctttaccggagaaaaatacggcggcgcaacctattgggatactgaagcctacgccgtaccgctctacctcgcgctggcggaacccgaagttacccgcaacctgctgcaataccgccgcaaccaactgccgcaggcgcagcacaatgcgcgcgaacagggcttggcgggcgcactctatccgatggtaacgtttaccggcatcgagtgccacaacgaatgggaaatcaccttcgaggaaatccaccgcaatggcgcgattccttacgccatctacaactacaccaactacaccggcgacgaaagctatcttgccaaagaaggcttggaagtcttggtcgaagtgtcccgcttctgggcggaccgcgtccacttctccaaacgcagcggcaaatacatgattcacggcgtaaccggcccgaacgaatacgaaaacaacatcaacaacaactggtacaccaacaccctcgccgcatgggtattggactacacccgcgaagccctggcgaaatacccgcgtccggatttgaacgtgagcgccgccgagttggaaaaatgggcggacatcagcgcgaatatgtaccgtcctcatgacgaagaactcggcgtattcgtacaacacgacggattcctcgacaaagacatccgccccgtgtccgcgctttcgcccgacgatttgccgctcaaccagaaatggtcgtgggacaaaatcctgcgttcgcccttcatcaaacaggcggatgtcttgcaaggcatctatttcttcggcgaccgtttcaatatcgacgaaaaacgccgcaatttcgacttctacgaaccgatgaccgtgcacgaaagctcgttgtcgccgtgtatccactctattctcgccgccgaactgggcaaagaagaaaaagccgtggaaatgtaccggcgcacagcccgcctggacttggacaactacaacaacgacaccgaagacggcctgcacattacttctatgaccggctcgtggctcgccatcgtccaaggtttcgcccaaatgaaaacttggggcggtaaactcagcttcgcaccgttcctgccgagcgcgtggacaggctacaccttccatatcaactaccgaggccgtctgattaaagtcgccgtcggcaaagaaaacgtcgtcttcaccctgctcaaaggcgagccgctcgatttgcaggtgtacggcaaagacatcacactcaacggcagccataccgccgcgttggaaaaataa

SEQ ID NO: 37080 - DNA, 696 bp, Neisseria meningitidis
atgtttgtttggcacgaatacgaaaatgcggcagaagcggcgcagtctttgactgacgcagtggcggatgctttgcagggcgcactggacgagaagggcggtgcggtgttggcagtttccggcggacgttcgccgattgcatttttcaacgccctgtcgcaaaaagatttggattggaaaaacgtcggcatcaccttggcagatgaacgcatcgtgccgaccgtccacgccgacagcaataccggtttggtgcgcgaatacctgttgaagaacaaagcggaagcggcaatgtggattcctatggtggaagacggaaaaactgaaaccgaattacatcccgatgctgttgtcgattatgcactgaaacattacaagcagcccgatgttttggttttgggtatgggaaacgacgggcatacggcttcgattttcccgaaagctccgcagtttcagacggcaatcgacggttcggcaggtgtcgcgctggtgcataccacgcccgttaccgcgccgcacgagcgcgtcagcatgaccttggatgcgattgcccatacggggcatgtatttttggcgatacagggcgaagagaaaaaagccgtgttcgaacaagccgcacaaggcgaaaaccgcgaatatccgatcaacctcgttttgaaccatcaaggagtgaactgccatgtcttctacgccgaataa

SEQ ID NO: 37081 - DNA, 177 bp, Neisseria meningitidis
atgaaaagtcgacgtttttttaaagccttattgttgattgccgcgctggtcggcgcgttttatgccggaatgcagacgcaggcgtatctttatgaagatttatgtttagacttgggcggcggcaaaaatccggggagttacccgatttgcgtgattgagaaagtccctgcacgttaa

SEQ ID NO: 37082 - DNA, 954 bp, Neisseria meningitidis
ttggcacggcaaacgacccgaatgaagcagaaccgcacctttaccttccccgattttcgcaccgtttacagctatgcgcctttatatcggctgcaacatttaaaatacacattgcgaaaatttttcggaaaaaaagaaatttacgccttcgagcagtttgtcaacgcctcccctatccgtcaggggctgttcctccactgcccgcaaaatgcctatccgctgctgcgcgaatttgttgacaggcgttttaactgcaaacgccgtttagatgcgatgacggcagattttctcatggcggaaaaactgttcggcacagacattctgcaccaaatggaagactaccgcttccatttggtcttggcgcacctttcagacggcatcagcttgtggctcaaccgcaacgacaactgcgtcgaagaaggcgcgtggtctttatctttgcgcgatgaagcaggcaaccggctgtatatggcgactttcgcctttgtcggcacacacctgctgacagcctccgtacaagggcctgcgggtgaagaagccaaagacactgtccgccgcatcaccaaacaacttcacggcttgcgtccccaacaactgatggtaaccgcactgcaatatttcgccgccgtactcggcttggacggcgcgatgggcattgcacaaaaacatcaggtcaaactgcgctggaaacttaaaaaacgtgtcaaaatgaattacgacacattctggcaggaatacggcgcaagtttggaacgggacggctactggcatctcccccaaacccccgcccgcaaagaccttgccgacatcgaaagcaaaaaacgctcgatgtaccgcaagcgttatgaaatgctggacaacatggttgcagagatgaaggacggtctgaaaacagaagcacgcggcatttcagacggcatccaaacggaaaaaccgctccgccggacagcctga

SEQ ID NO: 37083 - DNA, 195 bp, Neisseria meningitidis
atgaacatcatcttaaacggcggacccgccgaacttcacggcacaagcgttgccgacctcatcgcccaaaccgcgccgcaaaagccctttgccgtggcggtcaacaccgttttcgtccccaaaggcgcgtatgcggaaacggttttaaacgaaaacgacaaaatcgatatcgtgcggccggtggtcggcggctag

SEQ ID NO: 37084 - DNA, 1257 bp, Neisseria meningitidis
gtggccaataaattaagaaactacaccatcaacttcggcccgcaacaccctgcggcgcacggcgtattgcgtatgattttggagttggaaggcgaaaccatcgtccgtgccgacccgcatatcggtctcctgcatcgcggcaccgaaaaactggcggaaaccaaaacctatctgcaagccctgccttatatggacaggctggactacgtttccatgatggtcaacgagcaggcatactgcttggcggtagaaaaactcgccggaattgatgtacctatccgcgcccaatacatccgcgtgatgttcgccgaagtaacgcgcatcctcaatcacttgatgggcatcggttcgcacgcattcgacatcggcgcgatgaccgccatcctctacgccttccgcgaccgcgaagagctgatggacttgtacgaagccgtgtccggcgcgcgtatgcacgccgcctacttccgtcccggcggcgtttaccgcgacctgcccgacttcatgcccaaatacgagagcagcaaattccgcaatgccaaagtattgaagcagctcaacgaatcccgcgaaggcaccatgctcgactttatcgatgccttctgcgaacgcttccccaaaaatatcgacacactcgaaaccctcctgaccgacaaccgtatttggaaacagcgtaccgtcggcatcggcgttgtcactcctgagcgcgccatgcaaaaaggctttaccggcgtgatgttgcgcggttcgggtgtggaatgggacgtgcgtaagaaacagccttacgaaatgtacgacaaaatggatttcgacatccctgtcggcgtgaacggcgactgctacgaccgctacctctgccgtatggaagaaatgcgtcaatccgtacgcatcatcaaacaatgttccgagtggttgcgtgtcaatccgggtccggtcattaccacaaaccacaaattcgctccgcccaaacgtaccgaaatgaaaacaggtatggaagacctgattcaccatttcaaactctttaccgagggtatgcacgttcccgagggcgagacctacaccgctgtcgaacacccgaaaggcgagttcggcgtttacatcatttcagacggcgcgaacaaaccctaccgcctgaaaatccgcgcacccggcttcgcccacctgcaaggtatggacgaaatggcaaaaggccacatgctggctgatgtggtggcgattatcggcacgcaggatattgtgtttggcgaagtagacagataa

SEQ ID NO: 37085 - DNA, 414 bp, Neisseria meningitidis
atgctggttttgcgtctgtttgccgcatatgaatttttggaatcgggtttgcaaaaatggaacggggagaattggttttccgaaatcaacgatcagtttccattcccgttcaacttgctgccggacgcgttaaactggaatctcgccatgtatgcggagcttttactgcccgtactgttgcttttgggtttggcaacgcgtctgtcggcattagggctgatggtcgttaccgccgtcgcttgggctgcggttcacgccggttcgggttacaatgtctgcgacaacggttataaaatggctttaatttatatcgtggtattaatcccgctgcttttccagggtgcgggcggatggtcgctggatacgctgctgaaaaaacggttttgcccccaatgccgtctgaagcaagattga

SEQ ID NO: 37086 - DNA, 2031 bp, Neisseria meningitidis
ttgactatattttccgtattacttccaaaaaaatgcataaaacgatatcttatgcctaaaattttacaacaaacaaccttacatcgcttttttcgcgcaaacacgcaccatccgatcagcccgtccgttttgcagcaggctggcgatttgataagatggttatgtttttcagacggcatttcagatttccgtccatgccgtctgaagccgcaaaacccgattggaggaactgttatgaataccgtatcgaattacctgtccgcattgcgcgaagccatgaaggcgcaaggcttggatgcactcgtcatcccttccgccgacccccacctgtccgaatacctgcccgagcattggcaggcgcgccgcgaattatcgggctttaccggctcggtcggcacgtttgtcctgaccaccgatgaagcgggcgtatgggtggacagccgctattgggaacaagccgccaagcagcttgcgggcagcggcatcgaactgcaaaaaagcgggcaagtgccgccgtataacgaatggctcgcggcaaacctgcccgaaaacgccgccgtcggcatcccttccgatatggtctcgctcaccggcaaacgcactttggcgcaatccctgaccgccaaaaacatccgcatcgaacacccggacgatctgcttgaccaagtgtggacaagccgtcccgctatccccgccgaaaccgtgttcgtccacgaccccgcctacgtctccgaaaccgccgccgaaaaactcgcccgcgtgcgcgccgtgatggcggaaaaaggcgcggattaccacttggtttcctcgctcgacgacatcgcctggctgaccaacctgcgcggcagcgacgtgcctttcaatcccgttttcgtgtcctatctattgattggcaaagacaacgccgtcctgtttaccgaccgatgccgtctgaatgccgaagccgccgccgcgctgcaaaccgcaggcatcacggtcgagccttacgcccaagttgccgacaaactcgcgcaaatcggcggcgcgttgcttatcgaaccgaacaaaaccgccgtcagcacgcttgtgcgcctgcccgaaagcgtgcgccttatcgagggaatcaacccgtccacgctgttcaaatcctgcaaatccgaagccgacatcgcccgcatccgcgaagcgatggaacacgacggcgcggcgttgtgcggtttcttcgccgagtttgaagacatcatcggcaacggcggcagcctgaccgaaatcgacgtggacaccatgctttatcgccaccgcagcgtgcgcccaggcttcatttcattgagtttcgacaccatcgcaggcttcaacgccaacggcgcactgccgcattacagcgcaacgcccgaaagccacagcaccatcagcggcaacgggcttttgctcatcgactccggcgcgcaatacaaaggcggcacgaccgacatcacccgcgtcgtccctgtcggcacacccaccgccgaacaaaaacgcgacaacaccctcgttctcaaagcccatatcgcgcttgccgaagccgtgttccccgaaaacatcccctcgccgctgattgatgcgatttgccgcaaacccctgtggcaggcgcaatgcgactacggccacggcaccggacacggcgtaggctatttcctcaacgtccacgaaggcccgcagcgcatcgccttcgccgcccccgccacgcccgaaaccgccatgaaaaaaggcatggttacctccatcgaacccggactctaccgcccgggaaaatggggcatccgcattgaaaaccttgccgccaaccaagccgtcgccacccctcaagaaaccgaattcggcagcttcctctgttttgaaaccctgaccctctgccccatcgatacacgcctgatggacaccgccctcatgaccgacggcgaaatcgactgggtcaaccgctaccacgccgaagtccgccgccgcctcgagccgctgaccgaaggcgcggcaaaagcgtggctgatcaaacgcaccgaaccgctggcgcgttaa

SEQ ID NO: 37087 - DNA, 645 bp, Neisseria meningitidis
atggaatcaacactttcactacaagcaaatttatatccccgcctgactcctgccggtgcattttatgccgtatccagcgatgcccccagtgccggtaaaactttgttgcacagcctgttgaaagcggatgcggacgaaatggtcagcagtgagaagctgcttacctgggcggacaccgccgacatcgataccgctttgaacctgttgtaccgtttgcaaaaactcgaattcctctatggcgatgaaaacggtcattcagacggcatcaatttgtcggatgagcaattgccgttgctgatggaacaattgtccggcagcggtaaggcgttattggtcgatcggaacggtctgtatcttgccaacgccaatttccatcatgaggcggcggaagagttggggttgttggcggcagaagtcgcacagatggaaaagaaataccggctgctgattaagaacaacctgtatatcaacaataacgcttggggcgtttgcgatccttccggtcagagcgaattgacatttttcccattgtatatcggttcaaccaaatttattttggttatcggcggcattcccgatttgggcaaagaggcatttgttactttggtaaggattttataccgccgttacagcaaccgcgtgtaa

SEQ ID NO: 37088 - DNA, 294 bp, Neisseria meningitidis
atgtcgaacattaaaattgtcgcactggttaccgtcaaaccggaatacacagaaacactggcagcacagtttaaagaactggtcaaagccagccgtgcagaagagggcaacatcagctacgatctccatcaggaaatcggcaaaccgaaccgttttgttttcgtggaaaattggaaatctcaagcagctattgacgaacataacgccagcgcgcatttccaagccttcgtccagtccgtcgacggcaaaaccgaagcgttggaaatcgtattgatgaatgaagttgccgattaa

SEQ ID NO: 37089 - DNA, 489 bp, Neisseria meningitidis
atgaaaaaaatactcaccgccgccgtcgtcgcactgatcggcatcctccttgccatcgtcctcatccccgacagcaaaaccgcgcccgccttctccctgcccgacctgcacggaaaaaccgtttccaacgccgacctgcaaggcaaagttaccctgattaatttttggtttccctcctgtccgggttgtgtgagcgaaatgcccaaaatcattaaaacggcaaatgactataaaaacaaaaacttccaagtacttgccgtcgcccagcccatcgatccgatagaaagcgtccgccaatatgtcaaagactacggtttgccgtttaccgtcatgtatgatgcggacaaagctgtcggacaggcgttcggcacacaggtttatccgacttccgtccttatcggcaaaaaaggcgaaatcctcaaaacttatgtcggcgaacccgatttcggcaaactctaccaagaaatcgataccgcgctggcgcaatag

SEQ ID NO: 37090 - DNA, 1311 bp, Neisseria meningitidis
atgatcgtgcccgacctctttgtcgcccacttccgcgaagccgccccctacatccgccaaatgcgcggcaaaacgctggtcgccggcatagacgaccgcctgctcgaaggcgataccttaaacaagctcgccgccgacatcgggctgttgtcgcaactgggcatcaggctcgtcctcatccacggcgcgcgccacttcctcgaccgccacgccgccgcgcaaggccgcacgccgcattattgccggggcttgcgcgttaccgacgaaacctcgctcgaacaggcgcagcagtttgccggcaccgtccgcagccgttttgaagccgcattgtgcggcagcgtttccgggttcgcgcgcgcgccttccgtcccgctcgtatcgggcaacttcctgaccgcccgtccgataggtgtgattgacggaaccgatatggaatacgcgggcgttatccgcaaaaccgacaccgccgccctccgtttccaactcgacgcgggcaatatcgtctggctgccgccgctcggacattcctacggcggcaagaccttacatctcgatatgcttcaaaccgccgcctccgccgccgtctcgcttcaggccgaaaaactcgtttacctgaccctttcagacggcattgcccgccccgacggcacgctcgccgaaaccctctcggcgcaggaagcgcaatcgctggcggaacacgccggcggcgaaacgcgacggctgatttcgtccgccgttgccgcgctcgaaggcggcgtgcatcgcgtccaaatcctcaacggagccgccgacggcagcctgctgcaagaactcttcacccgcaacggcatcggcacgtccattgccaaagaagccttcgtctccatccggcaggcgcacagcggcgacatcccgcacattgccgccctcatccgcccgctggaagaacagggcatcctgctgcaccgcagccgcgaatacctcgaaaaccacatttccgaattttccatcctcgaacacgacggcaacctgtacggttgcgccgccctgaaaacctttgccgaagccgattgcggcgaaatcgcctgccttgccgtctcgccgcaggcacaggacggcggctacggcgaacgcctgcttgcccacattatcgataaggcgcgcggcataggcataagcaggctgttcgccctctccacaaataccggcgaatggtttgccgaacgcggctttcagacggcatcggaagccgagttgcccgaagcgcggcgcaaagcctaccgcaacaacggacggaactcgcatattctggtgcgtcgcctgcaccgctga

SEQ ID NO: 37091 - DNA, 963 bp, Neisseria meningitidis
atgcagtatgccaaaatttccggcacgggcagctatcttcccgccaaccgcgtcagcaatgacgaccttgcccaaaaagtggatacctcggacgagtggattaccgcgcgcacgggcatcaaattccgccatattgcagccgaaaatgagaaaaccagcgatcttgccgccgaagcagcccgccgcgcactggatgcagccggattagacagcggcgaaatcgatttaattattgtggcgacggcaacgccggatatgcagtttccttctaccgccaccatcgtccaacaaaaactgggcatcaccaacggctgccccgcgtttgacgtacaggcggtgtgtgcgggctttatgtacgcgctgaccacggcaaacgcctacatcaaaagcggcatggcaaaaaacgcgctggtcatcggcgcggaaactttcagccgcatcgtcgattggaacgaccgcacaacctgcgtattgttcggcgacggcgcgggcgcggtggttttgagcgcggcggacaaaccgggcatcatccacagcaaactcaaagccgacggcaattatctgaaactcttaaacgtccccgggcaaatcgcctgcggcaaagtttccggttcgccgtacatttcgatggacggtcccggcgtgttcaagtttgccgtcaaaatgctgtccaaaatcgccgatgacgttatcgaagaagccggttataccgccgctcaaatcgactggatcgtgccgcatcaggcaaaccgccgcattatcgaatcgaccgcgaaacatttaggtttgagtatggacaaagtcgtcctgaccgtccaagaccacggcaacacatccgccgcatcgattccgctggctttggatacgggcatccgcagcggacaaatcaaacgcggtcaaaacctgctgctcgaaggcatcggcggcggtttcgcgtggggcgcggtattgctgcaatattga

SEQ ID NO: 37092 - DNA, 507 bp, Neisseria meningitidis
atggctcacccgcaagaaatccgtgaaaagttacgccggctctatgtgagcggcgagcaaactttggaaacggcggccttgatgtgcgaaatcccgcaggccactgcgcgtgcgtggaaacgttcggataaggaaaaaggcgacgactgggataagatgcgcgccgcttacactttggccggcggcggtattgaggacttgagccgtgcgatgttggccggttttatggtgcagtacaacagcacgatgacgatgctgcaggattcgagtaccgaagatttgccgccgtccgaccgtgcgaagctgttggccagcctggccgatgcgtttacgaaaaccgtatccgccaatgcccgtgtgatgccggaaacgtcaaaactggcgacggctttggaattgattgagttcttgatggcgtttgtgcaagaaaaacatcccaaacatttgcctgcctttgtggaggtattggagccgtttggggtggaagtggagaagaagtttggttaa

SEQ ID NO: 37093 - DNA, 1560 bp, Neisseria meningitidis
ttggcatcagtaaatgctccgggtaaatttgatagggttgaagtttatgatgatggcagatatttaggtattcgaggttcagatgacaaaagaagaagaatttggaaaggtgtatttgatagagaatcgggaagatatttaacttcagaagctcaagatttaaaagttaggcatgtatctactggagcatcaagtacgggtaaagttagttcggttgtatcttcatcagtttcccgcgctggcgtattggcgggggtcggcaaacttgcccgcttaggcgcgaaattaagcacaagggcggttccctatgtcggaacagcccttttagcccatgacgtatacgaaactttcaaagaagacatacaggcacgaggctaccaatacgacaccgaaaccgacaaatttgtaaaaggctacgaatatagtaattgcctttggtacgaagacgaaagacgtattaatagaacctatggctgctacggcgttgacagttcgattatgcgccttatgtccgattacagcagattccccgaagttaaagaattgatggaaagccaaatgtataggctggcacgtccgttttggaattggcataaagaagaactgaataaattaagttctttggattggaataattttgttttaaatagttgcacatttgattggaacggcggagattgttcggtcaataaaggtgatgatttcagaaatggggctaatttttcccttatccgcaatccgaaatacaaagaagaaatggatgccaaaaagctggaagagattttatcgttgaaagtcgatgccaatcccgacaaatacataaaggcaaccggttatcccggttattccgaaaaagtagaagtcgcacccggaacaaaagtgaatatgggtcccgtcacggacaggaacgggaatcccgttcaggttgtcgcaacattcggcagggattcgcaaggcaacaccacggtggatgttcaagtaatcccgcgtcccgacttgacccccggaagcgcggaagcaccgaacgcacagccgctgcccgaagtatcgcccgccgaaaaccccgcaaacaacccgaaccccaatgagaaccccggcacgagccccaatcccgaacccgaccccgatttgaatcccgatgcaaatcccgatacggacggacagcccggcacaagacccgattcccccgccgttccgggacgcacaaacggcagggacggcaaagacggaaaggacggcaaagatggcggccttttgtgcaaattcttccccgacattctcgcttgcgacaggctgcccgagtccaatccggcagaagatttaaatctgccgtctgaaaccgtcaatgtagagtttcagaaatcaggaatctttcaagattccgcacagtgtcccgcacctgtcactttcacagtgactgtgcttgattcaagcaggcagttcgcgttcagctttgagaacgcatgtaccatagccgaacggctaaggtacatgcttctcgcccttgcttgggcggttgccgcctttttttgtatccgcacagtatctcgtgaagtctag

SEQ ID NO: 37094 - DNA, 1059 bp, Neisseria meningitidis
ttggaaaagcgcagcgaagacatccgagtttatatggattatcagggtaagaaagaccgattggaagaagttatcggtctttccgaagaccccgaactttggaacgacccgaaacgcgcccaagaaatcggcaaagagcgcaaaatcctcgaaggcatcgtgttgacgctcgacaacatcgcttcgggcatcgaagacaaccgcatgctgattgaaatgaccgtcgaagaaaacgacgaagaaggttttgccgccgtgcaggaagatgtggcggggctggaaaaacagatggcggatttggagttcaaacggatgttcaaccagcccgccgacccgaacaactgctttatcgacatcaccgcaggcgcgggcggtacggaagcggaagactgggcgggtatgctgttccgtatgtacagccgctacgccgagcgcaaaggcttcaaaatcgaaatcctcgaagaagacgacggcgaaatcgcgggcatcaaccgcgcgactatccgagtggaaggcgaatacgcctatggtttgctgcgtaccgaaaccggcgttcaccgcttggtgcgctattcaccgtttgactcgaacaacaaacgccatacttcgtttgcctccgtgttcgtttaccctgaaatcgatgattccattgaaatcgaaatcaaccccgccgatttgcgtatcgacacctatcgcgcatcgggcgcgggcggtcagcacatcaataaaaccgactccgccgtgcgcattacccacgagccgacggggattgtggtgcaatgtcaaaacgaccgttcgcaacacgccaacaaagccgccgcgatggaaatgttgaagtccaaactgtatgaattggaaatgcgcaaacgcaatgaagagaaacaggcgttggaagaaggtaaatccgatgtaggttggggtagccaaatccgttcgtatgttttggattcctcacgtatcaaagacttgcgtacaggctacgaagtcggcaacaccaaagccgtattggatggcgatttggacggctttatcgaagccagcctgaaacagggcgtgtag

SEQ ID NO: 37095 - DNA, 573 bp, Neisseria meningitidis
atgacttatgaaattcaagcctctgttcgtgaagcacaaggcactggtgcgagccgccgcctgcgtcgagaaggccaaatccccggcattttgtacggtgaaggccaagagcccgttgcaatcgctgtggatcacaaaactgtattctacgcattggaaaaagaatctttccatactgcgttgattaaattgtctctgaacggcgaaaccaaagacgttatcgtccgcgatttccaaatgcacccgttccgccgcgaagtccaacacatcgacttccaagctgtgaaagccgatcaacttgtacgtatccgtgttcccctgcacatcgttaacgctgaaaattcccaagcggtcaaactgcaaggcggccgcgtatctctgttaaacacttctgttgaagtagttgctttgcctgccaacatccctgctttcttggatttggattgtgccgaagtggttgccggcgacattctgcacttgtcagacatcaaactgcctgaaggtgtagaaagcgtttccctgaaacgtaacgaaaatctggctgttgccactgttaccggtaaaaaacgctaa

SEQ ID NO: 37096 - DNA, 2394 bp, Neisseria meningitidis
atgaaactgaaacagattgcttccgcactgatggtcttgggcatatcgcctttggcatttgccgactttaccatccaagacatccgtatcgaaggcttgcagcgtaccgaaccgagtaccgtattcaactacctgcccgtaaaaatcggcgatgcctacaacgacggccgcggtggggaaatcatcaaaagcctgtacgcgaccgggttcttcgacgacgtacgcgttgaatccgcggacggacagctcctgctgaccgtcatcgaacgtcccaccatcggctcgctcaacatcaccggcgcaaaaatgctgcaaaacgacgccattaagaaaaatctcgaatcgttcgggctggcgcagtcgcaatactttaatcaggcgacactcaatcaggcagtcgccggcctgaaagaagaatacctcgggcgcggcaaactcaatatccaaatcacgcccaaagtaaccaaactcgcccgcaaccgcgtcgacatcgacatcacgattgacgagggcaaatccgccaaaatcaccgacatcgaatttgaaggcaaccaagtctattccgaccgcaaactgatgcggcagatgtcgctgaccgaaggcggcatttggacatggctgacacgaagcaaccaattcaacgagcagaaatttgcccaagacatggaaaaagtaaccgacttctaccagaacaacggctacttcgatttccgcatcctcgataccgacatccaaaccaacgaagacaaaaccaagcagaccatcaaaatcaccgtccacgaaggcgaacgtttccgttggggcaaagtctccatcgaaggcgacaccaacgaagtccccaaagccgaactggaaaaactgctgaccatgaagcccggcaaatggtacgaacgccagcagatgaccgccgttttgggtgagattcagaaccgcatgggctcggcaggctacgcatacagcgaaatcagcgtacagccgctgccaaacgccgaaaccaaaaccgtcgatttcgtcctgcacatcgaaccgggccggaaaatctacgtcaacgaaatccacatcaccggcaacaacaaaacccgcgacgaagtcgtgcgccgcgaattgcgccaaatggaatccgcgccttacgacacctccaagctgcaacgctccaaagagcgcgtcgagcttttgggctacttcgacaacgtacagtttgatgccgtcccgcttgccggcacacccgacaaagtcgatttgaacatgagcctgaccgaacgttccaccggctcgctcgacttgagcgcgggctgggtacaggataccggcctggtcatgtccgcaggcgtttcccaagacaacctgttcggtacgggcaagtcggccgccctgcgcgcctcacgaagcaaaaccacgctcaacggctcgctgtcgtttaccgacccgtacttcacggcagacggggtcagcctgggctacgatgtttacggaaaagccttcgacccgcgcaaagcatcgaccagcatcaaacaatataaaaccaccacggcaggcgcaggcatccgcatgagcgtgcctgttaccgaatacgaccgcgtgaatttcggtttggtggcagaacacctgaccgtcaacacctacaacaaagcgcccaaacactatgccgactttatcaagaaatacggcaaaaccgacggcacagacggcagcttcaaaggctggctgtacaaaggtaccgtcggctgggggcgcaacaaaaccgacagcgcgttatggccgacgcgcggctacctgacgggcgtgaacgccgaaatcgccctgcccggcagcaaactgcaatactactccgccacccacaaccaaacctggttcttccccctgagcaaaaccttcacactgatgcttggcggcgaaatcggctatgccaacggctacggcaaaaccaaagaaatccccttctttgaaaacttctacggcggcggcctgggttcggtacgaggttacgaaagcggcacgctcggtccgaaagtgtatgacgaatacggcgaaaaaatcagctacggcggcaacaaaaaagccaacgtctccgccgagctgctcttcccgatgcccggcgcgaaagacgcgcgcaccgtccgcctgagcctgtttgccgacgcaggcagcgtgtgggacggcaaaacctacgacgacaacagcagttccgcgaccggcggcagggttcaaaacatttacggcgccggcaatacccataaatccacctttaccaacgaattgcgctattccgccggcggcgcggttacctggctctcgcctttaggcccgatgaaattcagctacgcctacccgctgaagaaaaaaccggaagacgaaatccaacgcttccaattccaactcggcacgacgttctaa

SEQ ID NO: 37097 - DNA, 687 bp, Neisseria meningitidis
atgacggtgttgcaagaacgttattgtgaggtgtccgaccgtatcggaaaattggttctgcaggcgggaaggaagccgcattccgtcagcctgattgccgtcggtaagactttcccttcagacggcatccgcgaagtttacgccgccggacagcgtgatttcggcgagaactatattcaggagtggtacggcaaaacggaagagttggcggatttgaccgacatcgtgtggcacgtcatcggcgatgtgcagtccaacaaaaccaagtttgtcgccgaacgcgcgcattgggtgcataccgtatgccgtctgaaaaccgctgtccggttgagcgaacagcgtccttcctcaatgccgcctttgcaggtgtgtatcgaggtgaatattgcgggcgaggcggcaaagcacggtgttgcgcccgaagaagcagtcgcgcttgctgtggaagtggcgaagctgccgaatatcgtcgtacgcggcttgatgtgtgttgccaaagccaacagcagtgaaacggagttgaaggtgcaatttcaaacgatgcggaaactgctttccgacctcaatacggctggcgttaaggcggacgtgctgtctatggggatgtcggacgatatgcctgccgccattgagtgcggtgcgacacacgtccgtatcggcagcgcgattttcgggaaaaggggctga

SEQ ID NO: 37098 - DNA, 1308 bp, Neisseria meningitidis
atgaagccagtaaacatcggtcttttaggtttgggtacggtcggcggcggtacggctgccgtgttgcgggacaatgcggcggaaatcagccgccgtttgggacgcgaaatccgtatttctgccgtatgcgacttgagcgaagaaaaagcccgccaaacctgcccgtccgcagccttcgtcaaagacccgttcgaactggttgcgcgcgaagacgtggatgtcgtcgtcgaattgttcggcggcacgggcatcgccaaagacgcggtgttgaaagccattgaaaacggcaaacacatcgttaccgccaacaaaaaactgctcgccgaatacggcaacgaaatcttcccgctggcggaaaaacaaaacgtcatcgtccaatttgaagcggcagtcgccggcggcatcccgattatcaaagccctgcgcgaaggtttggcagcaaacaggattaaatccatcgccggcatcatcaacggtaccagcaacttcatcctctccgaaatgcgcgaaaaaggcagcgcgtttgccgacgtattgaaagaagcacaggcattgggctacgccgaggccgaccccaccttcgacatcgaaggacatgacgcgggccataaaatcaccatcatgagcgcgctggcattcggcacgccgatgaacttctccgcctgctacctcgaaggcatcagcaaactcgacagccgcgacatcaaatacgccgaagaacttggctatcgcatcaaactgttgggcattacccgcaaaaccggcaaaggcatcgaattgcgcgtccaccctaccctgattcccgaaagccgcctcttggcaaacgtcaacggcgtgatgaacgccgtgcgcgtcaacgccgatatggtcggcgaaaccttatattacggcgcgggcgcgggcgcattgccgaccgcttccgccgtggttgccgatatcatcgacatcgcccgcctgatcgaagccgatacaggccaccgcgtaccgcatctggcgttccaacccgcccaagtccaagcgcaaaccatcctgcctatggacgaaattaccagcagctactacctgcgcgtccaagccaaagatgaaccgggcacgctggggcaaatcgccgcgcttttggcacaagaaaacgtgtctatcgaagccttaatccaaaaaggcgtgattgatcagagcactgccgaaatcgtgattctgacccacagcacggtcgaaaaatacatcaagtcggcaatcgcagccatcgaagcactggattgcgtggaaaaaccgattaccatgatccgcatggaaagcctgcatgactga

SEQ ID NO: 37099 - DNA, 420 bp, Neisseria meningitidis
atggacaataagaccaaactgcgcttgggcggcctgattttactgaccaccgccgttttaagcctcattatcgtattgattgtcgattcctggccgcttgccatcctgcttgcagccgtcattgtcgctgccgctgcgggcggttttgtttggacatcccgccgacagcaacgccagtttatcgaacgcctgaaaaaattcgacatcgatcccgaaaaaggcagaatcaacgaggcaaacctgcgccgtatgtaccacagcggcggacaacaccagaaagatgcgattaccctgatctgcctgtcgcaaaaatgttcggtggacgaggcgcacgctatgttcaaaaaacgcccgacacgtcaggaaatcaatcaaatggcggcaaaacagtcgcgcggtcagaaacgtccgcaccgttaa

SEQ ID NO: 37100 - DNA, 1269 bp, Neisseria meningitidis
ttgtttattattgattttaatggtttggatgctgataaggaaagacaattatatcaggaaaacacaagcctcctttccctatggcaaacccaacctcacctccggagagtaaggttctttaatattttaaaagccttgccgttggattataattccctaattgatttcttaattttgctaataaacacttgtttggtaaggaatgaatttatgcgccctttgaacgtgcagatcaggttgggcaaccttaggcacaattatcagattttaaaggaaatgcacggaggcaaactgttggcggtagtgaaggccgacgcatacggacacggtgcggtcagatgtgctttcgcgctggcagacttggcagacggttttgccgtggcgacaatcgatgaaggaatcaggctgcgggagagcggcattacccatccgattgtccttttggaaggcgtatttgaagcatcagagtacgaagcggtcgaacaatactcgctctggccggcagtcggaaaccaatggcaacttgaggctttgctttcccgccattggaaaaaacctgtcaaggtctggttgaaaatggattcgggaatgcaccgtaccggttttttccctcatgattacgcttcggcatatgcggcattgaagcagtcggaatatgtggacagtattgtcaagttttcgcatttttcctgtgcggacgaacccgaaagcggtatgacggaaatacagatggaagcattcgatttgggtacggaagggctggaaggcgaagaaagccttgccaactccgccgctattttgaatgttcccgaagcacgcagggactgggggcgcgccggtctggcgttatacggcatttccccgttcggaggaggcgatgacaggctgaagcccgtgatgaggctttccacccgtattttcggcgaacgcgttttacagccgcactcccctatcggttatggcgcaacattttataccagcaaatctacgcgcgtcggtctgattgcctgcggttatgcggacggttatccgcgccgcgccccaagcaattcccccgtcgccgtcgacggcaaattgacccgggtcatcggcagggtctctatggatatgatgaccatcgagctggacgcttcgcaagaaggtttgggacacgaggtcgaactgtggggcgatacgatcaacatcaataccgttgccgaagcggccggaaccatcccttacgaattgatgtgcaatatcaaacgtgcaaaattcacttatatcgagtaa

SEQ ID NO: 37101 - DNA, 1671 bp, Neisseria meningitidis
atgaaaaaaatttggttagacagctacgagaagggcgtcagtgccgaaatcgacatcacgcaatacaattccgtcagcgacgtattccgccaaagcgtggaaaaatttgccgaccaacctgcttttcaaaacatgggtaagacgctgacttatgccgaaaccggcaaactggcaactgatttcgcctcttatctgcaaaacgtcctcaagctgccgcgcggcgaacgtgttgccattatgctgcccaacgtattgcaatacccgattgcccttttcggtattttgcaggcaggtttggtggcggtgaacaccaatccgctctataccccgcgcgagttggagcatcagttgaaagacagcggtgcgaccgccatcatcgttttggaaaatttcgccaacacgctggagctggtgctgccgcgcacgcagatcaaacacgtcatcgtcgcctccgtcggcgaaatgttcgggctgcttaaaggttcgctgatcaatttcatcatccggaaaatcaagaaaatggtgcccgaataccgtattcgggaaaccgtttcctttcagacggcattgaaagaaggggcgaagcacgttttccaacctgtcgcattaaaccgcgaagataccgcgctgttgcaatacacgggcggcacgacaggtgttgccaaaggggcggtgctgagtcacggcaacatctgcgccaatatgcttcaggcaaaagaatggattaaaaaccagttgcgcgagggcaaagaaaccgttatcgccgccttgccgctgtaccatattttcgccttaaccgtgaatctgatgatttttgccaatgccggctcgaaaatcatcctgattaccaacccgcgcgatatgaaaggctttatcggacaactgaaaaaacagcgggttaatgtatgtatcggcgtgaacacactgtttaacgcaatggttaaccgtcctgattttgccgaagtcgatttttcaggattgcggttgactttgggcggcggtatggcgacccaaaaagccgttgccgaaaaatggaaaaaaatcaccggcacgcccatcgtcgaagcctacggtctgaccgaagccagccccggcgtgtgctgcaaccccttaaacatcgaatcatacagcggcagcatcggtttgcccgtctcgtccaccgaagtcgaactgcgcgacgcaaacggcaaagaagtccccgttgggcagccgggcgaattgtgggtaaaaggccctcaagtgatgcaaggctactggaaacgccccgaagaaaccgccaaagccatagacgcgcgcggctttttggaaaccggcgatattgccgtgatggacgaaaaaggctggttgaagctggtcgatcgtaagaaagacctcgtcgttgtttccggattcaatgtttatccgaacgaaatcgaggaagtcatcgcgcatcacggcaaagtcatggaagtcgcctgtatcggcgttcccgacgaaaaaaccggagaagccctaaaagtattcgtcgtcaaaaaagacccgtcattgaccaaagaagaacttatcgccttttgccgcaccgaattaaccgcatataaagtaccgaaaaatatcgaattccgcgacgagttgcccaagtccaacgtcggcaaaattctgcgtcgcgagttgcgccaaagtactgggaaataa

SEQ ID NO: 37102 - DNA, 1917 bp, Neisseria meningitidis
atgtacctaccctctatgaagcattccctgccgctgctggcggctctggtgcttgccgcgtgttcttcgacaaacacactgccagccggcaagaccccggcagacaatatagaaactgccgacctttcggcaagcgttcccacccgccctgccgaaccggaaggaaaaacgctggcagattacggcggctacccgtccgcactggatgcagtgaaacagaaaaacgatgccgccgtcgccgcctatttggaaaacgccggcgacagtgcgatggcggaaaatgtccgcaacgagtggctgaagtctttgggcgcacgcaaacagtggacgctgtttgcacaggaatatgccaaactcgaaccggcagggcgcgcccaagaagtcgaatgctacgccgattcgagccgcaacgactatacgcgtgccgccgaactggtcaaaaatacgggcaaactgccttcgggctgcaccaaactgttggaacaggcagccgcatccggcttgttggacggcaacgacgcctggaggcgcgtgcgcggactgctggccggccgccaaaccacagacgcacgcaaccttgccgccgcattgggcagcccgtttgacggcggtacacaaggttcgcgcgaatatgctctgttgaacgtcatcggcaaagaagcacgcaaatcgccgaatgccgccgccctgctgtccgaaatggaaagcggtttaagcctcgaacaacgcagtttcgcgtggggcgtattggggcattatcagtcgcaaaacctcaatgtgcctgccgccttggactattacggcaaggttgccgaccgccgccaactgaccgacgaccaaatcgagtggtacgcccgcgccgccttgcgcgcccgacgttgggacgagctggcctccgttatctcgcatatgcccgaaaaactgcaaaaaagcccgacctggctctactggctggcacgcagccgcgccgcaacgggcaacacgcaagaggcggaaaaactttacaaacaggcggcagcgacgggcaggaatttttatgcggtgctggcaggggaagagttggggcgcaaaatcgatacgcgcaacaatgttcccgatgccgacgcaaacagcgtcctccgtatggcggaagacggcgcgattaagcgtgcgctggtactgttccaaaacagccggaccgccggcgatgcgaaaatgcgccgtcaggctcaggcggaatggcgttttgccacacgcgggttcgacgaagacaagctgctgaccgccgcacaaaccgcgttcgaccacggtttttacgatatggcggtcaacagcgcggaacgcaccgaccgcaaactcaactacaccttgcgctatatttcgccgtttaaagacacggtaatccgccacgcgcaaaatgttaatgtcgatccggcttgggtttacggcctgattcgtcaggaaagccgcttcgttataggcgcgcaatcccgcgtaggcgcgcaggggctgatgcaggttatgcctgccaccgcgcgcgaaatcgccggcaaaatcggtatggatgccgcacaactttacaccgccgacggcaatatccgtatggggacgtggtatatggcggacaccaaacgccgcctgcaaaacaacgaagtcctcgccaccgcaggctataacgccggtcccggcagggcgcgccgatggcaggcggacacgccccctcgaaggcgcggtatatgccgaaaccatcccgttttccgaaacgcgcgactatgtcaaaaaagtgatgaccaatgccgcctactacgccgccctcttcggcgcgccgcacatcccgctcaaacagcgtatgggcattgttcctgcacgctgacgtaccgatgccgtctgaaacccgcccggtctttcagacggcatttttatcccgaacggcattga

SEQ ID NO: 37103 - DNA, 252 bp, Neisseria meningitidis
atgaagacattagaaaaacggatgaaagctctagacaaacagatgatgaagttcggaaaatcccttgaaggcaggcttgatgcccgtctgattgaatccgcattggattatattcattattcggaacgttttttggcttttgaaatcctgtgtacttatatcgaagatttcgatgtccggctgacggaacaagaatcccgggaaatttcttttatcaacaaggaatttgagatagaaagcacgtccgattaa

SEQ ID NO: 37104 - DNA, 198 bp, Neisseria meningitidis
atgaaatggaccgatacccggcgcatcgccgaagaactctacgacctgcacggcgaaaccatcgatcccagaaccgtgcgctttacccaactgcgcgacctgattatggcattgcccgaatttgacgacgaccccgcccgttgcggcgaacgcatcctcgaagccgtgcagcaggcatggatagacgaggcggaataa

SEQ ID NO: 37105 - DNA, 936 bp, Neisseria meningitidis
atggaactctttaaaatcaaacgcgatattccgtttatgagctacggcaaactgacgaccttcatttcgttggttacgtttatcgctgccgtgttcttcttggtgaccaaaggcctgaatttctctgtcgaatttaccggcggtacggtaatggaagtccaatatcagcagggtgcggatgtcaataagatgcgcgaacgcctcgatacgctgaaaataggtgatgtacaggttcaggcattgggtacgaacaaacacatcatgatccgcctgccgaacaaagaaggtgttacttccgcacagttgtccaatcaggttatggatttgctgaaaaaagacagtcccgacgttaccttgcgccaagtcgaatttatcggcccgcaagtcggtgaggaattggtaagtaatggattgatggctttaggttttgtcgttatcggcatcattatttacctgtcgatgcgttttgaatggcgttttgccgtatctgccattatcgccaatatgcacgacatcgtgattattctcggctgctttgccttcttccaatgggaattttcgctgaccgtcttggcgggtatccttgccgtattgggctattctgtgaacgaatccgtcgtcgtcttcgaccgtatccgtgaaaacttccgcaagccggcgatgcgcggacatgccgtgccggaagtcatcgacaacgcgattaccgcaacgatgagccgcaccatcattacccacggttcgaccgaggcgatggtcgtatccatgctggtgttcggcggtacggccttgcacggcttttctatggcgttgaccatcggcatcgtgttcggcatttattcttccgtattggttgccagcccgcttctgctaatgttcggtttgagccgcgacaatatcggtaaagaaccgaagaagaaagaagaaatcgtggtttga

SEQ ID NO: 37106 - DNA, 1053 bp, Neisseria meningitidis
atgtggaaagaaattttactgaattacggtattttcctgctcgaactgcttaccgtgttcggcgcaattgcgctgattgtgttggctatcgtacagagtaagaaacagtcggaaagcggcagtgtcgtactgacggatttttcggaaaattataaaaaacagcggcaatcgtttgaagcattctttttaagcggggaagaggcaaaacatcaggaaaaagaggaaaagaaaaaggaaaaggcggaagccaaagcagagaaaaagcgtttgaaggagggtggggagaaatctgccgaaacgcaaaaatcccgcctttttgtgttggattttgacggcgatttgtatgcacacgccgtagaatccttgcgtcatgagattacggcggtgcttttgattgccaagcctgaagatgaggttctgctcagattggaaagtccgggcggcgtggttcacggttacggtttggcggcttcgcagcttaggcgtttgcgcgaacgcaatattccgctgaccgtcgccgtcgataaggtggcggcgagcggcggttatatgatggcgtgtgtggcggataaaattgcttccgctccgtttgcgattgtcggttcggtgggtgttgtagcggaagtaccgaatatccaccgcctgttgaaaaaacatgatattgatgtggatgtgatgacggcgggcgaatttaagcgcacggttacttttatgggtgaaaatacggaaaagggcaaacagaaattccgacaggaactggaggaaacgcatcagttgttcaagcagtttgtcagcgagaaccgccctcaattggatattgaggaagtggcaacgggcgagcattggttcggtcggcaggcgttggcgttgaacttgattgacgagatttcgaccagtgatgatttgttgttgaaagcgtttgaaaacaaacaggttatcgaagtgaaatatcaggagaagcaaagcctgatccagcgcattggtttgcaggcggaagcttctgttgaaaagttgtttgccaaacttgtcaaccggcgggcggatgtgatgtag

SEQ ID NO: 37107 - DNA, 480 bp, Neisseria meningitidis
atggctaacttagtaaaaacctttctgcttggcgaattggtaaaaggtatgggcgtaacgctcaaaaactttttcgcccgcaaagacacgatttattttcctgaagagaaaacgccgcaatccgtgcgtttccgcggcctgcacgcgcagcggcggtatccgaacggtgaggaacgctgcattgcgtgtaagttgtgcgaggcggtgtgtccggcaatggcgatcaatatcgaatcggaagaacgcgaagacggcacccgccgcaccaagcgttacgacatcgacctgaccaagtgcatcttctgcggtttctgcgaagaggcttgcccgaccgatgcgattgtggaaacgcacatttttgaataccacggcgagaaaaaaggcgacttgcacatgaccaagccgattcttttggccattggcgacaaatacgaagctgaaatcgccaaacgcaaagccgctgacgcgccgtatcgttaa

SEQ ID NO: 37108 - DNA, 834 bp, Neisseria meningitidis
atgccgcacgccctcgtcctccaatttccctccgccgaagccctgccttccgacttcccctcccgcctgcccgaacctgattgcgccgatgaaaagcgtatgcgttttatcgttgaagaagggttttctttaagcggggcggacgcggcgttgcttggcagccgtcaaatcgaccacgccgtgttgccggatatggattttggcgaactcggtttgattgtcagcgatatggattcgacgctgattaccatcgaatgcgtcgatgaaattgcggcaggcgtgggtttaaaagacaaggtagcggaaattaccgagcgttcgatgcgcggcgaactcgatttcgaacagtctttacgcagccgcgtcgcgctgttggcgggattggacgaacagattttggcggacgtttatgaaaacgttttgaagctctcgcccggtgcggaatttttgttggacgaatgcaaaaggcacgatgtgaaattcctgctggtgtcgggcggcttcacgttttttaccgaaaggctgcaacaacgcctcggcttcgaataccagcacgccaatgttttggaaattgaaaacggcaggctgaccggccgtctgaaaggtagaatcatcgacgcgcaggcaaaggcagatttattgctcgaataccgcagccgcctcggattgcagccacatcaggtgttggcgatgggcgacggtgcgaacgatattccgatgctcaaagaaacgggcataggcgtggcttaccgtgccaaaccgaaagtgcgggcagccgccgatgcctgtatcaatttcggcggtttggagcgtgtacgcggcctgttcaggtag

SEQ ID NO: 37109 - DNA, 936 bp, Neisseria meningitidis
atgggcacgacctataccgtcaaatacctttcaaataatcgggacaaactcccctcacctgccgaaatacaaaagcgcatcgatgacgcgcttaaagaagtcaaccggcagatgtccacctatcagcccgactccgaaatcagccggttcaaccaacacacagccggcaagcccctccgcatttcaagcgacttcgcacacgttactgccgaagccgtccgcctgaaccgcctgacacacggcgcgctggacgtaaccgtcggccccttggtcaacctttggggattcggccccgacaaatccgttacccgtgaaccgtcgccggaacaaatcaaacaagcagcatcttatacgggcatagacaaaatcattttgaaacaaggcaaagattacgcttccttgagcaaaacccaccccaaggcctatttggatttatcttcgattgccaaaggcttcggcgttgataaagttgcgggcgaactggaaaaatacggcattcaaaattatctggtcgaaatcggcggcgagttgcacggcaaaggcaaaaacgcgcgcggcgaaccttggcgcatcggcatcgaacagcccaacatcgtccaaggcggcaatacgcagattatcgtcccgctgaacaaccgttcgcttgccacttccggcgattaccgtattttccacgtcgataaaagcggcaaacgcctctcccatatcattaatccgaacaacaaacgacccatcagccacaacctcgcctccatcagcgtggtcgcagacagtgcgatgacggcggacggcttgtccacaggattattcgtattgggcgaaaccgaagccttaaagctggcagagcgcgaaaaactcgctgttttcctgattgtcagggatacaggcggctaccgcaccgccatgtcttccgaatttgaaaaactgctccgctaa

SEQ ID NO: 37110 - DNA, 264 bp, Neisseria meningitidis
atgagcgaaactaaaaatgttcgtactttgcaaggcaaagtagtaagcgacaaaatggataaaaccgtaacagtattggttgagcgtaaagtaaaacatccgctttatggtaagattattcggttatctactaaaatccatgcccatgatgaaaataatcaatatggaattggtgatgtggttgttatatcggaatcccgtccattgtcaaaaactaaatcttgggttgtcagtgagctggttgagaaagcacgttctatttaa

SEQ ID NO: 37111 - DNA, 876 bp, Neisseria meningitidis
atggaagaaggtttgatcgacaggctgcttgaaacgctgtggttggacaggcggctcaatcagaatactttaaacggttaccggcgcgatttggaaaaaatcgcccgccgcctgtcccaatcgggcagaacgctgaaggatgcggacgaagcggatttggcggcggcggtttatgttgacggagagcaacggagttcgcaggcgcgcgcattatcggcgtgcaaacgcctgtatatatggatggagcgtgaaggcataaggacggacaatcccacccgtttgctgaaaccgcccaaaatcgacaagaatattccgaccctgatcaccgagcagcagatttcccgactgcttgccactccggatactgatacgccacacggtttgcgggacaaggcactgctcgaattgatgtacgcgaccggcttgcgcgtcagcgaggcggtcgggctgaacttcggcaatgtggatttggacaggggctgtattaccgcgctgggcaagggcgataagcagaggatggtcccgatggggcaggagtcggcgtattgggtggaacgctattatacggaggcacgcccacttctgctgaaaggcaggaattgcgacgcattgtttgtcagtcagaaaaagacgggcatttctcgtcagttggcatggatgattgtcaaagaatatgcaggtagggcgggcatcgggcacatcagcccgcacagcctgcgccacgcctttgccacgcacttggtgcagcacggattggatttgcgcgtggttcaggatatgttgggacatgccgatttgaatacgacgcagatttacacccatgttgccaatgtatggttgcagggtgtagtgaaggaacaccattcccgaaactga

SEQ ID NO: 37112 - DNA, 672 bp, Neisseria meningitidis
atgacgacacaagacgaactcaagcgcatcgccgccgaaaaagcagtcgaattcgtacccgaaaacgaatacatcggcatcggtaccggttcgaccatcaactttttcatcgaagccttgggtaagagcggcaaaaaaatcaaaggcgcggtatctacttccaaaaaatccagtgaactgcttgcccaatatgatattcccgtcgtttccctgaacgaagtatcggggttggcggtctatattgacggtgcggatgaagtgaaccacgccctgcaaatgattaaaggcggcggcggcgcacacctcaacgaaaaaatcgtcgccagcgcatccgaaaaattcgtctgcattgcggatgaaagcaaatatgtttcacgtttgggcaaattccctctgcctgtggaagtcgtcgaaagcgcgcgctctcttgtttcgcgcaaactgctcgctatgggcggacagcccgaactgcgtatcggctacaccacgttttacggcaaccaaatcgtcgatgtccacggcttgaatatcgatcagccgctgacgatggaagacgaaatcaacaaaatcaccggcgtgctcgaaaacggcatattcgcccgcgatgccgccgatgtgttgattttggggacggaagagggtgcgaaagtcatctatccctgccaagggtaa

SEQ ID NO: 37113 - DNA, 1344 bp, Neisseria meningitidis
atgagccaaaaccataccattctgcaatccctccccgtcggtcagaaagtcggcatcgccttctccggcggacttgatacctccgccgcgctgttgtggatgaaactcaaaggcgcgctgccttatgcctacactgccaacctcggccagcccgacgaagacgattacaacgccattcctaaaaaagcaatggaatacggtgcggaaaacgcccgcctgatcgactgccgcgcgcagttggcacacgaaggcatcgccgccatccaatgcggcgcgttccacgtttccaccggcggcatcgcctatttcaacaccacgcctctgggtcgcgccgtaaccggcacgatgcttgtttccgccatgaaagaagacgatgtgaatatttggggcgacggcagcacctacaaaggcaacgacatcgagcgtttctaccgctacggtttgctcaccaatcccgcgctgaaaatctacaaaccctggctcgatcagcaatttatcgacgaactcggcggccgtcacgaaatgagcgaatttctgattgccaacggcttcaactacaaaatgtcggtggaaaaagcctactccaccgattccaatatgttgggtgccacccacgaagccaaagacttggaatttttgaactcgggcatcaaaatcgtcaaacccattatgggcgttgccttttgggacgaaaacgtcgaagtcagccccgaagaagtcagcgtgcgctttgaagaaggcgtgccggttgcactgaacggcaaagaatacgccgatcccgtcgaactcttcctcgaagccaaccgcatcggcggccgccacggcttgggcatgagcgaccaaatcgaaaaccgcatcatcgaagccaaatcgcgcggcatctacgaagccccgggcatggcattgttccacatcgcctacgaacgcttggttaccggcatccacaacgaggacaccatcgaacaataccgcatcaacggcctgcgcctcggccgcctgctctaccaaggccgctggttcgacagccaagcactcatgttgcgcgaaaccgcccaacgctgggtcgccaaagccattaccggcgaagtaaccctcgaattgcgtcgcggcaacgactactcgattctgaacaccgaatcgcccaacctgacctaccaacccgaacgcctgagtatggaaaaagtcgaagacgcagcgttcacaccgctcgaccgtatcggacaactgactatgcgcaacctcgacatcaccgacacccgcgccaaactgggcatctactcgcaaagcggtttgctctcgctgggcgaaggttcggtattgccgcagttgggcaataagcaataa

SEQ ID NO: 37114 - DNA, 759 bp, Neisseria meningitidis
atgaattccaaaatttcctccgaccatacagaagatgccgtgcgcctctccaaacgcatggcgcaactggggctttgttcacgccgcgaagccgacggctacatcggacagggctgggtaacggtcaacggcaaaaccgccgtactcggtcagaaagtttcaccggcagaccgtatcgaactgaacaagaaagcccacgaacagcaggcggcacgcattaccatcctgctgaacaaacctgtcggctatgtcagcgcacaggcggaaaaaggctataaatccgccgccgaactgattacctctgaaaatcgctgggaaggtgacaccagccgcatccgtttcgatccgaaacacaaaatcggtcttgcccccgccggcaggctcgatatcgattcagtcggattactggtgttgacgcaggacggccgtatcgccaagcagcttatcggcgaaaacagcggcagtgaaaaagaatatttggtgcgcgtgcgcggcaaattggacgaaaaaggacttgccttactgaatcacggattgagtttggacggtgagaaactgcgtcccgccaaagtagaatggcaaaacgaagaccaactgcgtttcgtattgaaacaaggtaaaaagcggcaaatccgccgtatgtgcgaactggtcggactgcgcgtcgtcgggctgaaacgcatccgcatgggtaaggtcaagctcggcaggctgccgcccggcaaatggcgttatcttgctcccggcgaatcgttttaa

SEQ ID NO: 37115 - DNA, 417 bp, Neisseria meningitidis
atggcaaagctgacagaacaagatattttgaattggagcgggccggaagacgattatatgaatgacgaccatttggcttttttccgcgaattgctggtaaaaatgcaagacgaactcatcgaaaatgcttccgctacgacagggcatctccaagaacacgaatcagcccccgatcctgccgaccgtgccacacaggaagaagagtacgcattggaactccgtacccgcgatcgggaacgaaaacttctcagtaaaatacaggcgaccatccgcaatattgatgaaggggattatggattctgtgccgatacgggagagcctatcggtctgaagcggctgctggcacgcccgacagccactttatctgttgagtcccaagaacgccgagagaggatgaaaaaacagtttgccgactga

SEQ ID NO: 37116 - DNA, 558 bp, Neisseria meningitidis
atgaaacccaaattcaaaaccgttttaaccgcgctgcttttggcggtttccctgccgtctatggcggcaacccatgttttgatggaaaccgatatgggcaatatccgtttggttttggacgaatccaaagcacccaaaaccgttgccaatttcgtgcgctatgcccgaaaaggcttttacgacaatacgatttttcaccgcgtcatcggcggcttcgttatccaaggcggcggattgaccgaggacttggcacaaaaggcaagcgataaggccgttgccaacgaatccggcaacggcttgaaaaacactgtcggcaccatcgccatggcgcggacgacagaccccgattccgccaccagccaattctttatcaatctggcggacaatgattcactcaactacaaaaacggacaatacggctataccgttttcggcagggtcgaaagcggaatggacaccgtttccaaaatcgcccgcgtcaaaaccgccacgcgcggcttttatcaaaacgtacccgtacagcccgtcaaaatccgtcgcgttgttgtcgggcagtaa

SEQ ID NO: 37117 - DNA, 282 bp, Neisseria meningitidis
ttgcaaaactttcggaaacccaatatgcagaccgttaccatgtacacaggtccgttttgtccctactgcgcgatggcgaaaaggctgctgcacgcggcaggtgtcggacatatcgacgaaatccgtgtcgatgcaagccccgaagcctttgccgaaatgcagcagctttcgggacagcgcagcgtgccgcagattttcatcggcgaaacgcacgtcggcggatttaccgacctctaccgcctccagcaggaaggcgggctggacggactgctgaacccttaa

SEQ ID NO: 37118 - DNA, 720 bp, Neisseria meningitidis
atggagaacatcatttatttcggcgacacggcgcgcgtgccttacgggacgaaatctaaggcgaccatcgaaaatttctcgatgcagattgtcgattttctgctggaacacgatgtcaaggcgatggttatcgcgtgcaacacgattgcggcggtggcggggcagaaaatccgtcaaaagacgggcaatatgcctgtgttggacgtgatttccgccggcgcgaaagccgcgctggcaacgacgcgcaacaataaaatcggcattatcgccaccaataccacagttaacagcaatgcttatgcgcgcgccatccataggaacaaccctgatacgctcgtccgcacgcaggctgcaccgctgctcgtccctttggtggaggaaggttggttggaacatgaagttacccgcctgaccgtatgcgaatacctcaaaccattgcttgcagacggcatcgatacgctggtgttgggctgcacgcactttcccttgctcaagcccttaatcggcagggaggcgcacaatgtcgcgttggttgattctgcaattacgactgccgaagaaaccgcacgcgtccttgctcaggaaggattgctcaataccgacaacaacaatcccgactaccgtttttacgtcagcgatattcctttgaaattcagaaccatcggcgagcgttttctgggcaggacgatggagcagattgaaatggtgtctttgggttaa

SEQ ID NO: 37119 - DNA, 1497 bp, Neisseria meningitidis; identical to SEQ ID NO: 36391

SEQ ID NO: 37120 - DNA, 2397 bp, Neisseria meningitidis
ttggacacacaaatggccgacaactacgtaatttggtttgaaaacctgcgtatgacagatgttgaacgcgtgggcggtaaaaacgcctcgctgggcgaaatgatcagtcagctgaccgaaaaaggcgttcgcgtccccggcggctttgccaccacagccgatgcctaccgcgcattcctcgcacacaacggtctgagcgaacgcatttccgccgcactggcaaaattagatgtcgaagacgttgccgaactggcacgcgtcggcaaagaaatccgccaatggattttggacacgcccttccccgaacagctcgatgccgaaatcgaagcggcatggaacaaaatggttgccgatgccggcggcgcggacatttccgttgccgtacgctcttccgcaaccgccgaagacctgcccgacgcatcatttgccggccaacaggaaaccttcctgaatatcaacggcttggaaaacgttaaagaagcgatgcgccatgtattcgcctcccggtacaacgaccgcgccatttcttaccgcgtccacaaaggcttcgaacacgacatcgtcgccctttccgctggcgtgcagcgtatggtgcgttccgacagcggcgcgtccggcgtgatgttcaccctcgataccgaatccggttacgaccaagtcgtctttgtcacttcatcctacggtctgggcgaaaacgtcgtacaaggcgcagtcaatcccgacgaattctatgtgttcaaacccacgctgaaagcaggcaaacctgccatcctgcgcaaaaccatgggctcaaaacacatcaaaatgatttttaccgacaaagcagaagccggcaaatcggtaaccaacgtcgatgtccccgaagaagaccgcaaccgcttctccattaccgacgaagaaatcaccgagttggcgcattacgcactgaccatcgaaaaacactacggccgcccgatggacatcgaatggggacgcgacggcttggacggcaaactctacatcctgcaagcccgtcccgaaaccgtcaaatcccaggaagaaggcagccgcaacctgcgccgcttttctatcaacggcgaaaaaaccgtcttgtgcgaaggccgcgccatcggtcagaaagtcggtcagggcaaggtacgcctgattaaagatgcttccgagatggattccgtcgaagccggcgacgtactggttaccgacatgaccgacccagattgggaaccggtgatgaaacgcgcttccgccatcgtgaccaacaggggcggacgtacctgccacgccgccatcatcgcgcgcgaactgggtattcctgccgttgtcggctgcggcaatgcaaccgaattgctgaaaaacggtcaagaagttaccgtatcctgtgccgaaggcgataccggcttcatctactccggcctgctggacgtacaaattaccgatgttgctttggacaacatgcctaaagcacctgtaaaagtcatgatgaacgtcggcaatcccgaactcgcattcagcttcgccaacctgcccagcgaaggcatcggcttggcgcgtatggaatttatcatcaaccgccaaatcggtatccaccccaaagccttgttggaatttgacaaacaagacgacgaattaaaagcggaaattacccgccgtatcgccggttacgcgtcccctgtcgacttctacgtcgataaaatcgccgaaggcgtggcgacattggccgcatcggtttatccgcgtaaaaccatcgtccgtatgtccgacttcaaatccaacgaatacgccaacctggtcggcggcaacgtatacgaaccgcatgaagaaaacccgatgttgggcttccggggcgcggcgcgttatgtcgccgacaacttcaaagactgtttcgccttggaatgcaaagccttgaaacgcgtccgcgatgaaatggggttgaccaacgttgaaatcatgattccgttcgtccgcactttgggcgaagccgaagccgttgtcaaagccctgaaagaaaacggcttggaacgcggcaaaaacggcctgcgcctgattatgatgtgcgagctgccgagcaacgcggtattggcggaacaattcctgcaatacttcgacggcttctccatcggctcgaacgacatgacccaactgaccctcggtctcgaccgcgacagcggcttggtatccgaatcgtttgacgaacgcaaccctgccgtcaaagtgatgctgcaccttgccatctccgcctgccgcaagcagaacaaatatgtcggcatctgcggtcaaggcccgtccgaccatccggacttcgccaaatggctggttgaggaaggcattgaaagcgtttccctgaacccggataccgtcatcgaaacttggctatatttggcgaatgaattgaacaaataa

SEQ ID NO: 37121 - DNA, 1023 bp, Neisseria meningitidis
atgaaaattgaagcagtagatttattttgtggagcaggtgggttgacagcaggtttacttcgagcaggaattaaagtgaaagctggatatgatattgatgcagcttgtgcatatgcgtacgagtataacaataaaggtgcaaaatttatattacaagatgtggaaacagttactggagatcagattcaggcgcactattcaaaagatgcagttagattattagctggttgtgctccttgtcagccattttctacttacaatcaaggtcgtgatgttcgtaatgacaaaaaatggccattactatacgctttttctcgcttgattcatgaagtgcaaccagagcttgtgactatggagaatgtgccagatgttgtaaaacatgaggtataccaagattttgtaaataatttaaaacaacagggataccaagtttgggctgaaaaagtattatgtgcagattatggagtccctcaatcacgacgtagacacgtattacttgcatcacgtatcggtaatattcagatggttcctccaacgcattcaaattgccatgtaacagttcgtcaggctattggacacttgccgccactggcagcaggcaaacaagatactatagatgtattacatcggtgttcatcaatgtcagctcgtaatctagaacggattcgtgcttctcgtccaggaggaacatggatggattggccagaagatttacgagccgcatgtcatcgcaaaaaaaaaggacagtcttataaacgaatttatggtcgtatggaatgggacaagcccgccccaacaatgacaactttatgtattggcttcggcaatggacgctttgggcatccggaacaagaccgtgcaatttctttaagggaggcagccttattccaaagttttcctctagattaccagttcactcaagaaactgatactccaattcgccaaattagtcgaatgattggtaatgctgttcctgtattgctaggtgaggcaatcggaaatagttttaaactgttggtttga

SEQ ID NO: 37122 - DNA, 285 bp, Neisseria meningitidis
atgacggataccaaattgaacaccaaagaaattttggaactgaaagcgcgcgcgcaccatctccatcctgttgtgatggtcggtcagcagggtctgacggacgcggtcatcaaggaaaccgatgcggcattgacggcgcatgagctgattaaagtgcgcgtattcggcgacgaccgtgccgaacgtatcgaaatctgcactgccttatgtgaggcggttgacgcgcaacctgttcagcatatcgggaaacttttggtattgtggcgtaagaatatcgaaggctga

SEQ ID NO: 37123 - DNA, 717 bp, Neisseria meningitidis
gtgttcaataatttccttgcttcgctgccgtttatgacggaaacacgcgccgatatgattgtcagcgcgtttttgcctatggtcaaagccggcttcgcggtctctctgcctttggcggcagcttctttcgttatcggtatgatgattgcggtagccgtggctttggtgcggattatgcccgccggcggcatcgtgcggaaaatcctgctgaaattggtggaattttatatttccgtcattcgcggtacgccgctgttggttcagcttgtgattgtgttttacgggctgccttccgtcggcatctatatcgacccgattcctgccgccatcatcggcttttcgctcaatgtcggcgcatatgcttccgaaaccatacgcgcggcaattttgtccgtaccgaaaggccaatgggaagcaggtttctccatcggcatgacctatatgcagacgttccgccgcatcgtcgcgccgcaggcatttcgcgttgccgtgccgcctttgagcaacgagtttatcggtttgtttaaaaacacctcgctcgcggcagtcgtgacggtaacggaattgttccgcgtcgcgcaggaaacggcaaaccgcacttatgactttttgcccgtctatatcgaagccgctttggtttactggtgtttttgtaaagtgctgttcctgattcaggcgcgtttggaaaaacgtttcgaccgctacgtcgccaaataa

SEQ ID NO: 37124 - DNA, 261 bp, Neisseria meningitidis
atgagaagtgttatgtttcaagcaaatattcatcaggcaaaaaccaatttgagtcaattgattcaaagagcagaagcaggggaaattgttattattgcgaaggcaggtaagccttgcgtccaactaatcggtattgaaaaaccggcacgaaatgcaggaaggttgaaaaaattcagtcatatggaaaatacggatatttcacgtattcttgaggatgacaatgaaacggcagctttattttttgaggagtcggctctgtga

SEQ ID NO: 37125 - DNA, 462 bp, Neisseria meningitidis
atgtctgatttaccctctatctcccgattccttgccgacgaagccgccacactcgatttgggtgcggcgtggtcttcccgtttaaacgcgccgctggtcatttatctcgagggggatttgggtgcgggcaaaaccacgctgacacgcggcatcctgcgcggattgggtcatcagggcgcagtcaaaagcccgacttacgccatcgtcgaatcttatctgctggaacgcttcaccttgcaccatttcgacctctaccgcttctcgttccccgaagaatgggaagatgccggattggacgaactgtttgccgcaaacagcgtctgcctgatcgaatggccgcaacaaggtggggaatttaccccgcctgccgacatcaccgcaacattgacacacgacggcgacggcagaaaatgcctgctgaccgcccataccgaacgaggacgcgaaagcctgccgctatga

SEQ ID NO: 37126 - DNA, 4353 bp, Neisseria meningitidis
atgaaaacaaccgacaaacggacaaccgaaacacaccgcaaagccccgaaaaccggccgcatccgcttctcgcctgcttacttagccatatgcctgtcgttcggcatttttccccaagcctgggcgggacacacttatttcggcatcaactaccaatactatcgcgactttgccgaaaataaaggcaagtttgcagtcggggcgaaagatattgaggtttacaacaaaaaaggggagttggtcggcaaatcaatgacaaaagccccgatgattgatttttctgtggtatcgcgtaacggcgtggcggcattggtgggcgatcaatatattgtgagcgtggcacataacggcggctataacaacgttgattttggtgcggagggaagcaatcccgatcaacatcgttttacttataaaattgtgaaacggaataattataaagcagggactaacggccatccttatggcggcgattatcatatgccgcgtttacataaatttgtaaccgatgcagaacctgttgaaatgaccagttatatggatgggcggaaatatatcgatcaaaataattaccctgaccgtgttcgtattggggcaggcaggcaatattggcgatctgatgaagatgagcccaataaccgcgaaagttcatatcatattgcaagtgcgtattcttggctcgttggtggcaatacctttgcacaaaatggatcaggtggtggcacagtcaacttaggtagtgaaaaaattaaacatagcccatatggttttttaccaacaggaggctcatttggcgacagtggctcaccaatgtttatctatgatgcccaaaagcaaaagtggttaattaatggggtattgcaaacgggcaacccctatataggaaaaagcaatggcttccagctggttcgtaaagattggttctatgatgaaatctttgctggagatacccattcagtattctacgaaccacgtcaaaatgggaaatactcttttcacgacaataataatggcacaggaaaaatcgacgccaaacatgaacacaattctctgcctaatagattaaaaacacgaaccgttcaattgtttaatgtttctttatccgagacagcacaagaacctgtttatcatgctgcaggtggtgtcaacagttatcgacccagactgaataatggagaaaatatttcctttattgacgaaggaaaaggcgaattgatacttaccagtaacatcaaccaaggtgctggaggattatatttccaaggagattttacggtctcgcctgaaaacaacgaaacgtggcaaggcgcgggcgttcatatcagtgaagacagtaccgttacttggaaagtcaatggcgtggcaaacgaccgcctgtccaaaatcggcaaaggcacgctgcacgttcaagccaaaggggaaaaccaaggctcgatcagcgtgggcgacggtaaagttattttagatcaacaagcagatgaaaataataaaaaacaagcctttagtgaaatcggcttggtcagcggcaggggtacggtgcaactgaatgccgataatcagttcaaccccgacaaactctatttcggctttcgcggcggacgtttggatttgaacgggcattcactttcgttccaccgtattcaaaataccgatgaaggggcgatgattgtcaaccacaatcaagacaaagaatccaccgttaccattacaggcaataaagatattgctacaaccggcaataacaacagcttggatagcaaaaaagaaattgcctacaacggttggtttggcgagaaagatacgaccaaaacgaacgggcggctcaaccttgtttaccagcccgccgcagaagaccgcaccctgctgctttccggcggaacaaatttaaacggcaacatcacgcaaacaaacggcaaactgtttttcagcggcagaccaacaccgcacgcctacaatcatttaaacgaccattggtcgcaaaaagagggcattcctcgcggggaaatcgtgtgggacaacgactggatcaaccgcacatttaaagcggaaaacttccaaattaaaggcggacaggcggtggtttcccgcaatgttgccaaagtgaaaggcgattggcatttgagcaatcacgcccaagcagtttttggtgtcgcaccgcatcaaagccacacaatctgtacacgttcggactggacgggtctgacaaattgtgtcgaaaaaaccattaccgacgataaagtgattgcttcattgaccaataccgacatcagcggcaatgtcagccttgccgatcacgctcatttaaatctcacagggcttgccacactcaacggcaatcttagtgcaaatggcgatacacgttatacagtcagccacaacgccacccaaaacggcgaccttagcctcgtgggcaatgcccaagcaacatttaatcaagccacattaaacggcaacacatcggcttcgggcaatgcttcatttaatctaagcgaccacgccgtacaaaacggcagtctgacgctttccggcaacgctaaggcaaacgtaagccattccgcactcaacggtaatgtctccctagccgataaggcagtattccattttgaaagcagccgctttaccggacaaatcagcggcagcaaggatacggcattacacttaaaagacagcgaatggacgctgccgtcaggcacggaattaggcaatttaaaccttgacaacgccaccattacactcaattccgcctatcgccacgatgcggcaggggcgcaaaccggcagtgcgacagatgcgccgcgccgccgttcgcgccgttccctattatccgttacacctccggcttcggcagaatcccatttcaacacgctgacggtaaacggcaaattgaacggtcagggaacattccgctttatgtcggaactcttcggctaccgcagcgacaaattgaagctggcggaaagttccgaaggcacttacaccttggctgtcaacaataccggcaacgaacctgcaagcctcgaacaattgacggtagtggaaggaaaagacaacaaaccgctgtccgaaaaccttaattttaccctgcaaaacgaacacgtcgatgccggcgcgtggcgttaccaactcatccgcaaagacggcgagttccgcctgcataatccggtcaaagaacaagagctttccgacaaactcggcaaggcagaagccaaaaaacaggcggaaaaagacaacgcgcaaagccttgacgcgctgattgcggccgggcgcgatgccgtcgaaaagacagaaagcgttgccgaaccggcccggcaggcaggcggggaaaatgtcggcattatgcaggcggaggaagagaaaaaacgggtgcaggcggataaagacaccgccttggcgaaacagcgcgaagcggaaacccggccggctaccaccgctttcccccgcgcccgccgcgcccgccgggatttgccgcaaccgcagccccaaccgcagcgcgacctgatcagccgttataccaatagcggtttgagtgaattttccgccacgctcaacagcgttttcgccgtacaggacgaattagaccgcgtatttgccgaagaccgccgcaacgccgtttggacaagcggcatccgggacaccaaacactaccgttcgcaagatttccgcgcctaccgccaacaaaccgacctgcgccaaatcggtatgcagaaaaacctcggcagcgggcgcgtcggcatcctgttttcgcacaaccggaccgaaaacaccttcgacgacggcatcggcaactcggcacggcttgcccacggcgccgttttcgggcaatacggcatcgacaggttcgacatcggcatcagcgcgggcgcgggttttagcagcggcaacctttcagacggcatcggaggcaaaatccgccgccgcgtgctgcattacggcattcaggcacgataccgcgccggtttcggcggattcggcatcgaaccgcacatcggcgcaacgcgctatttcgtccaaaaagcggattaccgctacgaaaacgtcaatatcgccacccccggccttgcgttcaaccgctaccgcgcgggcattaaggcagattattcattcaaaccggcgcaacacatttccatcacgccttatttgagcctgtcctataccgatgccgcttcgggcaaagtccgaacgcgcgtcaataccgccgtattggctcaggatttcggcaaaacccgcagtgcggaatggggcgtaaacgccgaaatcaaaggtttcacgctgtccctccacgctgccgccgccaaaggcccgcaactggaagcgcaacacagcgcgggcatcaaattaggctaccgctggtaa

SEQ ID NO: 37127 - DNA, 1434 bp, Neisseria meningitidis
atgcctgcacgaaacagatggatgctgctgctgcctttattggcaagcgcggcatatgccgaagaaacaccgcgcgaaccggatttgagaagccgtcccgagttcaggcttcatgaagcggaggtcaaaccaatcgacagggagaaggtgccggggcaggtgcgggaaaaaggaaaagttttgcagattgacggagaaaccctgctgaaaaatcccgaattgttgtcccgcgcgatgtattccgcagtggtctcaaacaatattgccggtatccgcgttattttgccgatttacctacaacaggcgcagcaggataagatgttggcactttatgcacaagggattttggcgcaggcagacggtagggtgaaggaggcgatttcccattaccgggaattgattgccgcccaacccgacgcgcccgccgtccgtatgcgtttggcggcagcattgtttgaaaacaggcagaacgaggcggcggcagaccagttcgaccgcctgaaggcggaaaacctgccgccgcagctgatggagcaggtcgagctgtaccgcaaggcattgcgcgaacgcgatgcgtggaaggtaaatggcggcttcagcgtcacccgcgaacacaatatcaaccaagccccgaaacggcagcagtacggcaaatggactttcccgaaacaggtggacggcacggcggtcaattaccggctcggcgcggagaaaaaatggtcgctgaaaaacggctggtacacgacggcgggcggcgacgtgtccggcagggtttatccggggaataagaaattcaacgatatgacggcaggcgtttccggcggcatcggttttgccgaccggcgcaaagatgccgggctggcagtgttccacgaacgccgcacctacggcaacgacgcttattcttacaccaacggcgcacgcctttatttcaaccgttggcaaaccccgaaatggcaaacgttgtcttcggcggagtgggggcgtttgaagaatacgcgccgggcgcgttccgacaatacccatttgcaaatttccaattcgctggtgttttaccggaatgcgcgccaatattggatgggcggtttggatttttaccgcgagcgcaaccccgccgaccggggcgacaatttcaaccgttacggcctgcgctttgcctgggggcaggaatggggcggcagcggcctgtcttcgctgttgcgcctcggcgcggcgaaacggcattatgaaaaacccggctttttcagcggttttaaaggggaaaggcgcagggataaagaattgaacacatccttgagcctttggcaccgggcattgcatttcaaaggcatcacgccgcgcctgacgttgtcgcaccgcgaaacgcggagtaacgatgtgttcaacgaatacgagaaaaatcgggcgtttgtcgagtttaataaaacgttctga

SEQ ID NO: 37128 - DNA, 813 bp, Neisseria meningitidis
gtgacggaaagtactggcggtctcgaaatccccgccgccaaagccatccgccgagcaggcatagccgtgattatcgccaacccgcgtcagacgcatcagtttgcccaatcgcagccgctgaccaaaaccgacgccaaagatgccaaaatgcccgccttcttcgcacagatgaaggcacagaaagaagattcgcaaaccatgccctaccaaccgcccaccgaagcggaagaagtgttggaagccttggttaaccgccgcaaccaatcggcggatatgcggactgccgagaaaaaccgtctgcatcaggttcacgaaacgcaagtcggaagcgtcaaacaactgattgcccattttgaccggctgattgacgaattggacaaacaaatcgacgaccacacccacacgcattttgacggcaaagcccaagtggcggagcaaatcaaaggcatcggttcgataacgacggctacgctgatggcgatgctgcccgaattggggcggctgtcgcacaaacggatagcgagtttggccggcattgccccgcacccgagggagagcgaggaaaccaaattcaaaagccgctgctttggcggaaggtctgcggtgcgtaaggcactgtatatggctaccgtggcagcgacacgttttgaaccgcttattcgggatttctaccaacgcctgctgtccaagggtaagccgtataaggttgccgttacggcatgtatgcgcaaactgctgacgatatcgaatacccggatgcgtgattattttgccgaaaacgataccgccgaaaacggtatccaaacggcttga

SEQ ID NO: 37129 - DNA, 1518 bp, Neisseria meningitidis
atggtaatttccaatacccgcgaacttgagaaactcaaagaccggattcccaatctgatcaacatcgcccgcatcgccatcgtcttccccctgctgattatgcatatcttcgggttggaggtcagcggacatgaaaacctgcacgcttcgtggacggcgtgggcattttatgtttggctcgccatttcctgctggctgattttcttttccatcatccatccgcattggcaatggcagtcgctgaaaatgccgcgtttcagcgcggtggcggacatcacgatgatcggcgtgctgacctacctgttcggcggcatcgattccggcttcggcatcctgattctgcccttcgtcgtctgctcctgcctgctcagctacgggcgttaccccctgctctatgccagctacgccgccatcctgctgatattcaacgccattgccgacggcgatatcggcaaatatccgcacatatcggatgcccgaaccgcctcggcaaccttcatcctcgtcgccgcctcctatctttccgccatcttcacctcactgtcggtcagatacatcgacagcgccggccaactggcccgcgacaaccacctcgcctaccggcgcatcaaaggcttgagccaaaccgtactcgaacgcgttcaagaagccgtcgtcgtcatcaataccgaagggctggcggtgctgttcaaccggaaggcgaaagaccttttccccgcactcgaaatcggacggcgcgccgacctgtccgattctgccgccgaactgtgggaccaagcctctccgcacactttcgaatacgtcctcggcacactcggcctgaccgcccgcatccgcgccgtgccgatgaacaaagagccggacaagctgcttatcctctacatccgcccgcaaagcgaaattcaggcagaagccctgtccgtcaaacttgccgcgctcggacaactgaccgccaaccttgcccacgaaatccgcaacccgatgtccgccatccgccacgccaacgacctgctgcgcgaaaatatggaagcgggggcggcagatccgttcaacgccaaattgtgcaaaatcatcgacggcaacgtctgccgcatcgacaaaatgctcgaagacatttcctcactcaacaagcgcaacaaaaccgaacgcgaaaccatcggcctgataccgttttgggaagaattcaaacaagagttcctgctcggccatcccgatgccgccggctgcatccgcttggatatgcagggcaatcacccgaccgcctatttcgatcccgcccacctgcggcagattatgtggaatctcgccaacaacgcgtggcggcacagccgcaaacagcccggctcgatttccgtcaccatccgccccgcgcaaaaaaacaccgtctgcatcctctttgccgaccgcccgaagtgcaggaacacctgttcgaacccttttacaccacggcggaaaacggcaccggcctcgggctgtatgtcgcccgcgaactggcgcacgccaatttcggcgatttga

SEQ ID NO: 37130 - DNA, 159 bp, Neisseria meningitidis
atggtcgcgccggtacgcccaaatccgccgaaagacggcaagacggccacgctgttggaacacgccgccgagtttggcggctatgtggcggagttggaaaatcaaaatcaggcttggcgcgactgggcgggcaatcactcccgcaaagtcggaaactga

SEQ ID NO: 37131 - DNA, 1728 bp, Neisseria meningitidis
atgcagttatcaggcgcgcaaatcatagtgcagagtctcaaagccgaaggtgtcgagtacgttttcggttatcccggcggtgcggttatcgaaatctacgatgcccttttccaactcaataaattcaagcacattctgacccgtcacgagcaggcggcagtacacgcggcagatgcgtatgcgcgcgtcagcggtaaggtgggcgtggcattggttacatccggcccgggcgttaccaatgcactgaccggtattgctactgcctatacggattcgattccgatggtggtcatcagcgggcaggtaggcaattccctgattggtacggatgcgttccaagaagttgatacggtgggtattacccgtccgtgcgtcaaacacaatttcctggttacggacatcaatgagttggcggaaaccattaaaaaggcgttccaaattgccgcaagcggccgaccggggcccgtggtggttgatgtcccgaaagatgttacgcaggcgatggcgaaattcagctatcctcaggaagacatttttatccgttcgtatcaaccggttgttcaagggcatatcggtcagattaaaaaggccgtgcagatgttggcatctgccaaacgtccggtcgtctattttggcggcggcgtggtgttgggtaatgcttctgaagagctgacccgatttgtccgaatgacgggtgctccgtgcacgggtacgctgatgggcttgggcgcttatccttccggcgaccgccaattcctcggtatgctcggtatgcacggtacttacgaggcaaaccttgccatgcagaatgcggatgtcgttcttgccgtaggtgcgcgttttgacgaccgtgtggtttccgtaccgtccaaatttttcgagaaggcgaagaaggttatccatatcgatgtcgatccttccagcatcgccaaacgcgtgaaggcggacattccgattgtcggcgacgtgaaaaacgttttgtccgagatggttgcgctgtggcaaaaacaagagtccgtgccgtctgaagatactttgggcaaatggtggaaaaccatagaggaatggcgttcccgagattgcttgtggtttgacaacggcagcgaaattatcaagccccaatatgtgattcagaagcttgccgagattaccggcaattcggcaatcatcacatcggatgtagggcagcatcaaatgtttgcggctcaatattatcccttcgaacgtccgcgccaatggctcaattccggcggtttgggtacgatgggcgtgggtctgccttatgcgattggtgcaaaacttgccgccccggatcaagacgtattctgtattaccggcgacggctcgattcagatgaacatccaagagttgtccacctgtttccaatatcggattccggttaacgtcattacgctgaacaacggttatctcggtatggtacgccagtggcaggaaatatattacggcggccgagagtcggaaacttatttcgattctttgcccgatttcgtcaaacttgccgaggcatacggtcatatcggcatccgcgtggacaagaagtctgatgtggaaggtgcgttgttggaagcattgaaccaaaaagacaggctggtgtttatcgacttcctgaccgaccagaaacagaatgtgatgcccatggtcggcaacggcaaaggtttggacgaaatggtacttccgccgcatatgcgtgcggacgaaaaggcgtaa

SEQ ID NO: 37132 - DNA, 633 bp, Neisseria meningitidis
atgacggtatgggtcggactgaccggcggaatcggcagcggcaaatcggcagccgcgcaatgttttgccgatttgggcgtaccgcgtatcgatgcggatgcggcggcgcactcgctgacggcttcagacggcatcgccctgccggaaatcaggcggctgttcggcgacaccgttttcgacacacagggtttgttgcggcgcgacatattgcgtaaagaaatctttgcctccccatcgcgaaaagccttgctcgaatccgtgatgttgccgctgattttctcagaaatcaaaaaacagcaagaaacctttaccgatgcggcttacggcattgtcgaaattccgctgctgacggaaaagcgtcaatttatcagcctgatacggcgtgtcctgaccataagcgcacctttggaaaaacgtatcggcagggtgatggcccgcagcgggctgacgcgcggcgaggtggctgccgtcatcagccatcaggcatccgaatccgaacgcctgctgcttgcagacgatgtactgctcaatgacggcagcctcaaaagcctacgtgagaaaacaatgcgcctgcacgcgttttattcagggattttcgcctcaaaaccaacacaaggaaaacacaatggctga

SEQ ID NO: 37133 - DNA, 471 bp, Neisseria meningitidis
atgccaagacgtagagaagtccccaagcgcgacgtactgccagatcctaaattcggcagcgtcgagttgaccaaattcatgaacgtattgatgattgacggtaaaaaatccgttgccgagcgtatcgtttacggtgcgttggaacagattgagaaaaaaaccggcaaagtagcaatcgaagtatttaacgaagccattgcaaacgccaagcctatcgtggaagtgaaaagccgccgtgtaggtggtgcaaactaccaagttcctgttgaagttcgtccttcacgccgtttggctttggcaatgcgctgggttcgcgatgcggcccgcaaacgtggtgagaaatccatggacctgcgtttggcaggcgaattgattgatgcgtccgaaggtcgtggcggtgcgttgaaaaaacgtgaagaagtacaccgtatggctgaagccaacaaagcattctctcacttccgtttctaa

SEQ ID NO: 37134 - DNA, 354 bp, Neisseria meningitidis
atgattgaacttcaacttcatgaattgaagctggtttcagggggaggtcctgtaacagacaatatagctggaaatgtagctaatgctgccacaaccaaaggaggtcccacatggggggattttgttgcaatacctgctgctgcagcgacagttcatttcctgccgaaaaattttttcggtgctattggtgcaaatggtgtatacaatctgactcgtgattgggtaaatgatgccgttaatgcacctccttataacggaagaccaatctttgagattgaacatggattaactgctcccgcaacaaaagcagataaatcaggaaacggctacactgacggtacagattactgctga

SEQ ID NO: 37135 - DNA, 327 bp, Neisseria meningitidis
atgacctaccgtgaattagttgaacgtcagttggctgtgcgccatgccgatttggaattgggcttaagccgcgcacgcgagcaagagccgtttgtcattcatgtttccgatctgttggataaggcaggcattgagtacgcggtacgcatggataaggattttcagacgaccttttgtgtggagttttccgcgaccgcccctgctgatgtgattggtattttgcggaaatattactcagtcttttcagacggccaaaaggtcgaggcggcgagtcgtcatcccgaatgccacgcggtccgtatcgtatttggcgatgtgccggtttaa

SEQ ID NO: 37136 - DNA, 360 bp, Neisseria meningitidis
atgatacgttatcttttaattgcctgcggcggcatctccctgctgttggggataatcggcatttttttgccgctgttgccgaccacgccgttcgtactgctctccgccgcctgctgggcaaaggcatccccgcgctttcaccgctggctgcaccggcaccgctatttcggtccgatggttcataactgggaacaaaacggcgcagtgccgcgcaaagccaaaatattcgccatcagtatgatgaccgcatcctgcctgataatgttttggcagtttccccaacgctggtgggtcggggcggtttcatcggttttttgttcccttgtcgccatatggatgtggcgcaggcccgaatcttga

SEQ ID NO: 37137 - DNA, 303 bp, Neisseria meningitidis
atggattttttcctaccgaacactatgcatacagaactcaacaacggaacactgcacatcagcggcgacgtaaccgtcaaaaccctgaccgccgccgcctttacccgcttcagacagcaatgtcgtctgaaagacacccgcgcggttgatttgagcggcgtcggacgcgccgattccgcctgcgtgtcgctgctgctcgaagtgctgcgcggttgcaaaggcagcgtcaggctgaccggcattcccgaatccgtgcgcgcgctgtccgaactgtacgaaatcaaagactggctgaaatcatga

SEQ ID NO: 37138 - DNA, 1005 bp, Neisseria meningitidis
atgcaacggcaaatcaaactgaaaaattggcttcagaccgtttatcccgaacgggacttcgatctgacttttgcggcggcggatgctgatttccgccgctatttccgtgcaacgttttcagacggcggcagtgtcgtctgcatggatgcaccgcccgacaagatgagtgtcgcaccttatttgaaagtgcagaaactgtttgacatggtcaatgtaccgcaggtattgcacgcggacacggatttggggtttgtggtattgaacgacttgggcaatacgacgtttttgaccgcgatgcttcaggagcagggcgaagcggcgcacaaagccctgcttttggaggcaatcggcgagctggtcgaattgcagaaggcaagccgtgaaggggttttgcccgaatatgaccgtgaaacgatgctgcgcgaaatcaacctgttcccggaatggtttgtcgccaaagaattggggcgcgaattaacattcaaacaacgccaactttggcagcaaaccgtcgatacgctgctgccgcccctgttggcgcagcccaaagtctatgtgcaccgcgactttatcgtccgcaacctgatgctgacgcgcggcagaccgggcgttttagacttccaagacgcgctttacggcccgatttcctacgatttggtgtcgctgttgcgcgatgcctttatcgaatgggaagaagaatttgtcttggacttggttatccgctactgggaaaaggcgcgggctgacggcttgcccgtccccgaagcgtttgacgagttttaccgctggttcgaatggatgggcgtgcagcggcacttgaaggttgcaggcatcttcgcacgcctgtactaccgtgacggcaaagacaaataccgtcccgaaatcccgcgtttcctcaattacctgcgccgcgtatcgcgccgttatgccgaactcgccccgctctacgcgctcttggtcgaactggtcggcgatgaagaactggaaacgggctttacgttttaa

SEQ ID NO: 37139 - DNA, 375 bp, Neisseria meningitidis
atgattattcaaaatgaatttaatttatatcctagtaatatgcttcctgaaaggttttgttatcctgaaaagtatgttcgtatctctaacgatacatctttaataccttatattcagccacataattttcactggtggtttgagaattatggaacagaaggggcagaagtaacttatatatttagaaattctatcctgcctgatttaaatcttatcccattcgctagtaatggagaatgggaagcttattttgatggtaatgatgtaacaggaaatcctagggttattgtcattaatttagataatatagaaaaccatgaattttttaatagttttgaagagtggcttgaattagcaattaaggatacttggtaa

SEQ ID NO: 37140 - DNA, 336 bp, Neisseria meningitidis
atgtcccgatgttgtctgaagcggcttcagacggcatcggctgtttcggcgttctccggcggcgttttgggatgcggggtaaaactgtgctgccggcggctatccgtccttttcaatccgggcgtgatgctgtttgtgccggactgtcccgtcggcggcgcggccgggtttttccaatatgaaatgctttgcccgtttttctggcaggggcggttgcagaccggttcgaatcttgcttacgatgtttttatgtctgccggacgtttgaatggcgggcggaaacctcgcgccgccgccgttttcttgccctgctttgctccgttgccttataattaa

SEQ ID NO: 37141 - DNA, 1242 bp, Neisseria meningitidis
atgcccaccaaaaccccttcactgttcggcggcgcgatgattatcgccggcacggtcatcggcgcaggtatgctcgccaacccgaccgccacatccggcgtatggtttaccggctcgctggccgtgttgctgtacacctggttttccatgctctccagcggcctgatgattttggaagtcaacacccactacccccacggcgcgagcttcgacaccatggttaaagacctgctcggacggagctggaacatcatcaacggcatcgccgtcgccttcgttttatacctgcttacttacgcttatatcttcgtcggcggcgacctgaccgccaaaggcttaggcagcgcggcaggcggcaatgtttcactcaccgtcggacaactcgtcttcttcggcattctcgccttttgcgtatgggcatccgcacgcttggtcgaccgattcaccagcgtcctcatcggcggcatggtattaacctttatttgggcaaccggcggcctgattgccgatgccaaactgcccgtcctcttcgacacccaagcccctaccggcaccaactactggatttatgtcgccaccgccctgcccgtctgccttgcgtcattcggtttccacggcaacgtctccagcctgctcaaatactttaaaggcgacgcgcccaaagtggctaaatccatctggacgggcacactgattgcgctggtaatttacgtcctctggcaaaccgccatccaaggcaacctgccgcgcaacgagttcgcccccgtgattgccgccgaagggcaagtctccgtcctgattgaaaccctgtccaaattcgcccaaaccggcaatatggacaaaatattgtccctgttttcctatatggcgatcgccacctcgtttttaggcgtaacgctcggactcttcgactacatcgccgacatcttcaaatggaacgacagcgtgtccggccgcaccaaaaccgccgcgctgaccttcctgccgcctctaatttcctgcctgctcttccccaccggctttgttaccgccatcggctacgtcggcctggcggcaaccgtctggacaggcatcatccccgccatgctgctctaccgttcgcgcaaaaaattcggcgcaggcaaaacctataaagtttacggcggcttgtggctgatggtttgggtcttccttttcggcatcgtcaacatcgccgcacaggtattgagccaaatggaactcgtccccgtatttaaaggataa

SEQ ID NO: 37142 - DNA, 819 bp, Neisseria meningitidis
atgaaaaaaacagtttttacatgtgccatgattgccctgaccggtactgccgccgctgcacaagagcttcaaaccgctaatgagtttaccgtccacaccgacctctcttccatttcttcaactcgtgctttcctgaaagaaaaacacaaagctgccaaacacatcggcgtacgtgctgatattccttttgatgccaaccaaggcatccgcttggaagccggtttcgggcgcagcaaaaaaaatattattaatttggaaacagatgagaacaagctgggtaagactaaaaatgtaaaactgcccaccggcgttcctgaaaaccgtatcgatctttacacaggctacacctacacccaaacgttaagtgattctttaaatttccgtgtgggtgccggcttgggttttgaatcttcaaaagacagcattaaaaccaccaagcatacgcttcacagcagccgtcagtcgtggtcagccaaagttcacgcggatttgctttcccaactgggtaacggctggtatatcaacccttggtctgaagtgaaatttgacctcaattcccgctataaattaaacaccggcgttaccagtctcaaaaaagacatcaatcaaaaaaccaacggctggggctttggattgggtgcaaatattggtaaaaaactgggcgaatccgccagcatcgaggcggggccgttctacaaacaacgcacttacaaagaatccggcgagtttagtgtaacaaccaagagtggcgacgtatcgctcaccatcccgaaaaccagtattcgtgaatacggcttgcgcgtcggcataaaattctga

SEQ ID NO: 37143 - DNA, 186 bp, Neisseria meningitidis
atggctgaacaaaaaaagattagggttacattggttaaaagcctgattggtacaattgaatctcatcgtgcatgtgcacgcggtttaggtttgcgtcgtcgcgagcatacggtagaggttttagatacccctgaaaaccgtggtatgattaataaaatcagctacttgttgaaagtggagtcttga

SEQ ID NO: 37144 - DNA, 204 bp, Neisseria meningitidis
atggacaatctgaatctgcaggaaatttccgtgttgccggaaaatctgccgctgtattgctcgggacccgacaacgagcagtggaacgggcatccgagagtgtttttgcctttgtgcgaaggagaatcgggcagcgttgcctgcccgtattgcggcacgcgctaccgccttgacggcaagatgccgcatcatcattacgcctga

SEQ ID NO: 37145 - DNA, 657 bp, Neisseria meningitidis
atggattttgaaaaagcgcggttcaatatggtcgaacagcaaatccgtccttgggatgtattggattttgacgttttggacgctttggcggagattccgcgcgagctttttgtcgatgaggacttgcagggtttggcgtatgcggatatggcgctgccgcttgccaacggtcataagatgctcgagccgaaagtcgtggcgcggctggcgcagggcttgaagctgacgaaaaacgatacggttttggaaatcggcacgggttcgggctatgcgaccgcgctgttggcaaaattggctggtcgtgtggtgtcggacgacatcgatgccgaacagcaaaaccgcgccaaagcggtgttggacggcttgggtttggacaatatcgattatgtgcaaaacaacgggttgaccgaactttccgcaggtgcgccgtttgatgcggtttatgtcggcggtgcggtaaaccttgtgcctgaagtgttgaaagaacagttgaaagatggcggacgcatggcggttatcgtaggccgcaagcctgttcagcgcgcgcttttgattacgcgcaagggcgatgtgtttgaagagaaggtgctgttcgataccttggtggcgcatttggatgataaggatgccgatccgtttggcggttttcagttttga

SEQ ID NO: 37146 - DNA, 1569 bp, Neisseria meningitidis
atgaaacaccgtactttcttttccctttgcgccaagttcggctgcctgcttgcgctgggtgcttgttcgcccaaaatcgtcgatgccggagccgcgaccgtgccgcacactttatccactttgaaaactgcggacaaccgccccgccagtgtttacttgaaaaaagacaaaccgacgctgattaaattttgggcgagctggtgtcctttgtgtctgtccgaattgggacagaccgaaaaatgggcgcaagatgcaaaattcagctccgccaacctgattaccgtcgcgtctccgggctttttgcacgagaaaaaagacggcgacttccaaaaatggtatgccggtttgaattatcccaagctgcccgtcgtaaccgacaacggcggcacgatcgcccaaagcctgaatatcagcgtttacccttcgtgggcgttaatcggtaaagacggcgacgtgcagcgcatcgtcaaaggcagcatcaacgaagcgcaggcgttggcgttaatccgcgacccgaatgccgatttgggcagcttgaaacattcgttctacaaacccgacactcagaaaaaggattcaaaaatcatgaacacgcgcaccatctacctcgccggcggctgcttctggggcttggaagcctatttccaacgcatcgacggcgtggttgacgcggtatccggctacgccaacggcaacacgaaaaatccgagctatgaagacgtgtcctaccgccatacgggccacgccgaaaccgtcaaagtgacctacgatgccgacaaactcagcctagacgacatcctgcaatatttcttccgcgtcgttgatccgaccagcctcaacaaacagggcaacgacaccggtacgcaataccgcagcggcgtgtactacaccgaccccgccgaaaaagccgtcatcgccgccgccctcaaacgcgagcagcaaaaataccaactgcccctcgttgttgaaaacgagccgctgaaaaacttctacgatgccgaggaataccatcaggactacctgattaaaaaccccaacggctactgccacatcgatatccgcaaagccgacgaaccgctgccgggcaaaaccaagaccgccccgcaaggcaaaggcttcgatgcggcaacgtataaaaaaccgagtgacgccgaactcaaacgcaccctgaccgaagagcaataccaagttacccaaaacagcgcgaccgaatatgccttcagccacgaatacgaccatttgttcaaacccggcatttatgtggacgttgtcagcggcgaacctttgttcagctccgccgacaaatatgattccggctgcggctggccgagcttcacgcgcccgattgatgcaaaatccgttaccgaacacgatgatttcagctacaacatgcgccgcaccgaagtgcgcagccacgccgccgattcgcatttgggacacgtcttccccgacggcccgcgcgacaaaggcggactgcgctactgcatcaacggcgcgagcttgaaattcatcccgctggaacaaatggacgcggcaggctacggcgcgttgaagagtaaagtgaaataa

SEQ ID NO: 37147 - DNA, 483 bp, Neisseria meningitidis
atgagaaaaagtcgtctaagccagtataaacaaaacaaactcattgaactgtttgtcgcaggtgtaactgcaagaacggcagcagagttagtaggcgttaataaaaataccgcagcctattattttcatcgtttacgattacttatttatcaaaacagtccgcatttggaaatgtttgatggcgaagtagaagcagatgaaagttattttggcggacaacgcaaaggcaaacgcggtcgcggtgctgccggtaaagtcgccgtattcggtcttttgaagcgaaatggtaaggtttatacggttacagtaccgaatactcgaaccgctactttatttcctattatccgtgaacaagtgaaacctgacagcattgtttatacggattgttatcgtagctatgatgtattagatgtgagcgaatttagccattttagcttcgctgaaacttcgttttcgtatcaatcacagcacacattttgctga

SEQ ID NO: 37148 - DNA, 114 bp, Neisseria meningitidis
atgcgtgtacaaccatctgttaagaaaatttgccgaaattgcaagattattcgtcgaaatcgtgtagttcgtgtaatttgtactgatctccgtcacaaacagcgtcaaggttaa

SEQ ID NO: 37149 - DNA, 1419 bp, Neisseria meningitidis
gtgctgtcggatgcctatatgctcaaacgtttggcgtggacggtatttcaggcagcggcaacctgtgtgctggtgctgcctttgggcgtgcctgtcgcgtgggtgctggcgcggctggcgtttccggggcgggctttggtgctgcgcctgctgatgctgccttttgtgatgcccacgttggtggcgggcgtgggcgtgctggctctgtttggggcggacggcctgttgtggcgcggacggcaggatacgccgtatctgttgttgtacggcaatgtgtttttcaaccttcctgtgttggtcagggcggcgtatcaggggtttgtgcaagtgcctgcggcacggcttcagacggcacggacgttgggcgcgggggcgtggcggcggtttttggacattgaaatgcccgttttgcgcccgtggcttgccggcggcgtgtgccttgtctttctgtattgtttttccgggttcgggctggcgctgctgctgggcggcagccgttatgccacggtcgaagtggaaatttaccagttggtcatgttcgaactcgatatggcggttgcttcggtgctggtgtggctggtgttgggggtaacggcggcggcagggttgctgtatgcgtggttcggcaggcgcgcggtttcggataaggcggttgcccccgtgatgccgtcgccgccgcaatcggtggaggaatatgtgctgctggcattttcggcggtggtgttgtccgtgtgctgcctgtttcctttgttggcaattgttgtgaaagcgtggtcggccggcgaatcgtggcgtgtgttaatggaaagtgaaacgtggcaggcggtgtggaatactttgcgcttctcgacggcggcggtgtttgcggcggcggttttgggtgtggtgtatgcggcggcggcgcggcggtcagcgtggatgcgcgggctgatgtttttgccgtttatggtgtcgccggtttgtgtttcggcaggcgtgctgctgctttatccggggtggacggcttcgttgccgttgctgctggcgatgtatgcgctgctggcgtatccgtttgtggcaaaagatgttttatcagcctgggatgcactgccgccggattacggcagggcggcggcgggtttgggtgcaaacggctttcagacggcatgccgcatcacgttccccctcttgaaaccggcgttgcggcgcggtctgactttggcggcggcaacctgcgtgggcgaatttgcggcaaccttgttcctgtcgcgtcccgagtggcagacgctgacgactttgatttatgcctatttggggcgtgcgggtgaggataattatgcgcgggcaatggtgttgacattgctgttgtcggcgttcgcgctgggcattttcctgctgttggacaacggcgaaggcggaaaacagacggaaacgttataa

SEQ ID NO: 37150 - DNA, 1227 bp, Neisseria meningitidis
atgtcgggcaatgcctcctctccttcatcttccgccgccatcgggctgatttggttcggcgcggcggtatcgattgccgaaatcagcacgggtacactgcttgcgcctttgggctggcagcgcggtctggcggctctgcttttgggtcatgccgtcggcggcgcgctgttttttgcggcggcgtatatcggcgcactgaccggacgcagctcgatggaaagcgtgcgcctgtcgttcggcaaacgcggttcagtgctgttttccgtggcgaatatgctgcaactggccggctggacggcggtgatgatttacgccggcgcaacggtcagctccgctttgggcaaagtgttgtgggacggcgaatcttttgtctggtgggcattggcaaacggcgcgctgattgtgctgtggctggttttcggcgcacgcagaacgggcgggctgaaaaccgtttcgatgctgctgatgctgcttgccgtgttgtggttgagcgtcgaagtgttcgcttcgtccggcacaaacgcagcccccgccgtttcagacggcatgagcttcggaacggcagtcgaattgtccgccgtgatgccgctttcctggctgccgcttgccgccgactacacgcgccacgctcgccgtccgtttgcggcaaccctgacggcaacgctcgcctatacgctgacgagctgctggatgtatgccttgggtttggcagcggctctgtttaccggagaaaccgacgtggcaaaaatcctgctgggcgcaggtttgggtgcggcaggcattttggcggtcgtcctctccaccgttaccacaacgtttctcgatgcctattccgccggcgcgagtgcgaacaacatttccgcgcgttttgcggaaacacccgtcgctgtcggcgttaccctgatcggcacggtgcttgccgtcatgctgcccgttaccgaatatgaaaacttcctactgcttatcggctcggtatttgcgccgatggcggcggttttgattgccgactttttcgtcttgaaacggcgtgaggagattgaaggctttgactttgccggactggttctgtggctggcgggcttcatcctctaccgcttcctgctctcgtccggctgggaaagcagcatcggtctgaccgcccccgtaatgtctgccgttgccattgccaccgtactggtgcgccttttctttaaaaaaacccaatctttacaaaggaacccgtcatga

SEQ ID NO: 37151 - DNA, 285 bp, Neisseria meningitidis
atgaaattgttggccgcattgattccgcttttgatgagcgtggcaggccgtatattgactgcattaggcttgatggcggtaacctattcaggggtggatagattggtagcccattttcagcaggcgataaccaatagcataacgggcgcgcctcaagcgatgttgcagcttttttatataagcggcggtggaaccgttcttaatatcctgtttggtgcgatcgcctttattctgtcatttaaacaaatgacaaaactagcaacctcaatcgggaagaaaaaataa

SEQ ID NO: 37152 - DNA, 762 bp, Neisseria meningitidis
atgccttttaagccatccaaacgaatctctttattacttgtccttgccttgggcgcgtgcagcacttcctaccgcccctcgcgggcagaaaaagccaatcaggtttccaatatcaaaacccagttggcaatggaatatatgcgcggtcaggactaccgtcaggcgacggcaagtattgaagatgccttgaaatcagaccctaaaaacgagcttgcctggctggtccgtgccgaaatctatcaatacctgaaagttaatgacaaggcgcaggaaagtttccggcaagccctctccatcaaacccgacagtgccgaaatcaacaacaactacggttggtttctatgcggcaggctcaaccgccctgccgaatctatggcatatttcgacaaagctctggccgaccccacctacccgaccccttatattgccaacctgaataaaggcatatgcagcgcaaaacaggggcaattcggattggcggaagcctatttgaaacgttccctcgccgcccagccgcagttcccacccgcatttaaagaactggcgcgcaccaaaatgctggccgggcagttgggcgatgccgattactactttaaaaaataccaaagcagggtagaagtccttcaggccgatgatttgctgctaggctggaaaattgccaaagccctcggcaacgcacaggcggcatacgaatatgaagcacaattgcaggcgaatttcccctactcggaagaattgcaaaccgtcctcaccggtcaataa

SEQ ID NO: 37153 - DNA, 771 bp, Neisseria meningitidis
gtgtccgaaacacaaaacgaacaacccgtccaaccgcttgtcgagcatctcatcgagctgcgccgccgcctgatgtggacggttgtcggcatcttagtctgctttttcggcctaatgccgtttgcccaacaactctatacttttatcgccgacccgctgatggcaaacctgcccaaagacaccagcatgattgccaccgatgtcatcgcaccgtttttcgtgccggtcaaagttaccctgatggcggcatttttaatttcgctgccgcatacgctctaccaaatctgggcatttgtcgcgcccgcactctaccaaaacgaaaaacgcctgattacgccgctcgtcctctccagcgtcagcctgtttttcatcggcatggcatttgcctactttttggttttccccgtcattttcaaattccttgccagcgttacccctgtcggtgtcaatatggcgacagacatcgacaaatacctctccttcatcttggggatgtttgtcgcattcggtacaacgtttgaagtccccattgtcgttatcctgttaaccaaaattggtgtggtaacaaccgaacagctcaaacgcgcccgcccctatgtgattgtcggcgcgtttgtcattgccgccatcatcacgccgcccgatgtgatttcacaaaccctgcttgccattccgctgattctcttatacgaagcaggtatttggttcggacgctttttcacgccacgttcagaacaggatggcgacatacagccgcctgcaacaacctga

SEQ ID NO: 37154 - DNA, 1803 bp, Neisseria meningitidis
ttgggatgccgtgaaggactatcatttggaaaccttttgtctgaaataataaaacggatattttactataagtgtctgaaaatttgcccgtctgtttcagacggcggggcggttatgttacaatccgaaaattcgaaaaatttaatctcttgttcaataaaggctttaccaatcatgatttctaccaacggcattaccatgcagttcggcgcaaagccgctgtttgaaaacgtatccgtcaaattcggcgaaggcaaccgttacggcttgatcggcgcgaacggttcgggcaaatccaccttcatgaaaatcctcggcggcgatttggaacagacggccggcgaagtggcgattgaaaacggcgtgcgtttgggtaaattgcgccaagaccagtttgcctacgaagagatgcgcgtgctggacgtggtgatgatggggcataccgaaatgtgggcggcgatgaccgagcgtgatgcgatttacgccaatcccgaagccaccgaagacgactatatgaaagccgccgaactggaagccaagttcgccgaatacgacggttacaccgccgaagcgcacgctgccgaactgttgagcggcgtgggcatttccgaagatttgcacaatgcgaccatggcagaagttgccccgggcttcaaactgcgtgtattgctggcgcaagccctgttctccaagccggatgtgctgctgcttgacgaaccgaccaacaacttggacatcaacactatccgctggttggaaggcgtgttgaaccaatatgattctacgatgattattatttcgcacgaccgccactttttgaacgaagtctgcacccatatggcggatttggactacaacactatcaccatctatccgggcaactacgacgattacatgctcgcttctgcccaatcgcgtgagcgcgccctgaaagacaatgccaaggcgaaagaaaaattgcaggaattgcaagaatttgtggcgcggttcagtgccaacaaatccaaagcccgtcaggcgaccagccgtctgaaacaggcagacaaaatcaaatcggagatggtcgaagtcaaaccttccacccgccaaaacccgtatatccgttttgaagccgacgaaaaagccaagttgcaccgtcaggctgtggaagtggaaaaactggcgaaacgctttgaaacccagttgtttaaaaacctgaacttcatcctcgaagcgggacaacgccttgccatcatcggcccgaacggcgcaggtaaatctaccttgctgaaactcttggcaggcgcgtacaaccccgaatattcagacggcctgttaccggacgaaggcaccatcaaatgggcggaaaaagccagcgtcggctactatccgcaagatcacgaaaacgacttcgatgtcgatatggatttgagcgaatggatgcgccaatggggtcaggaaggcgatgacgaacaagtcatccgtggtactttggggcgtttgctcttcggcagcaacgacgtagtaaaaaaagtgaaagtcctctccggcggtgaaaaaggccgtatgctttacggcaaactgctgctgttgaaacccaatgttttggtgatggacgaaccgaccaaccacatggacatggaaagcatcgaatccttgaacatggcgctggaaaaatacaacggcacgctgattttcgtctcccacgaccgtcagttcgtttcttcccttgcaacccaaatcatcgaactggacggcaaaggcggatatgaacactacttgggcgattacgaaagttacttggagaaaaaaggcatagcataa

SEQ ID NO: 37155 - DNA, 549 bp, Neisseria meningitidis
atgaaaaaacaaattaccgcagcgatgatgattctgacaatgattgccgctccggcgatggcaaacagcatggacaatcagatatttgaaaaccaagtattccatacgcgggcagatgcgccgatgcagttggcggagctttctcagaaggagatgaaggagactgagggggcgtttcttccattggctatcttgggtggtgctgccattggtatgtggacacagcatggttttagttatgcaacgacaggcagaccagcttctgttagagatgttgctattgctggcggattaggcgcaattcctggtggtgtaggtgccgcaggaaaggttgtttcctttgctaaatatggacgtgagattaaaatcggcaataatatgcggatagcccctttcggtaatagaacaggtcatcctattggaaaatttccccattatcatcgtcgagttacggataatacgggcaagactttgcctggacagggaattggtcgtcatcgcccttgggaatcaaaatctacggacagatcatggaaaaaccgcttctaa

SEQ ID NO: 37156 - DNA, 894 bp, Neisseria meningitidis
atggtaacgttttcaaaaatcagaccgcttttggcaatcgccgccgccgcgttgcttgccgcctgcggcacggcgggaaataatgctgcccgcaagccggtgcaaaccgccaaacccgccgcagtggtcggtttggcactcggtggcggcgcatctaaaggatttgcccatgtaggtattattaaggttttgaaagaaaacggtattcctgtgaaggtggttaccggcacatcggcaggttcgatagtcggcagcctttttgcatcgggtatgtcgcccgaccgcctcgaattggaagccgaaattttaggtaaaaccgatttggtcgatttaaccttgtccaccagtggttttatcaaaggcgaaaagctgcaaaattacatcaaccgaaaagtcggcggcaggcggattcagcagtttcccatcaaatttgccgccgttgctactgattttgaaaccggcaaggccgtcgctttcaatcaagggaatgccgggcaggctgtgcgcgcttccgccgccattcccaatgtgttccaacccgttatcatcggcaggcatacatatgttgacggcggtctgtcgcagcccgtgcccgtcagtgccgcccggcggcagggggcgaatttcgtgattgccgtcgatatttccgcccgtccgagcaaaaacatcagccaaggcttcttctcttatctcgatcagacgctgaacgtaatgagcgtttccgcgttgcaaaatgagttggggcaggcggatgtggttatcaaaccgcaggttttggatttgggtgcagtcggcggattcgatcagaaaaaacgtgccatccagttgggtgaggaggcagcacgtgccgcattgcctgaaatcaaacgcaaactggcggcataccgttattga

SEQ ID NO: 37157 - DNA, 441 bp, Neisseria meningitidis
gtgatgcccgtgaaaaaagttgaaaaaaacatcttggtgctgcacggcgcggacaaaatgttcgagctggtcgacaaggttgaggattacccgcactttctgccgtggtacagcaagaccgaagtcatcgggcgtagcggcaacgaactgaaggcgcggctgtttatggattatatgcacgttcgccaatcgtttgccacgcacaaccgcaacattccgggcagggaaatccgtatggaactgctcgagggtccgttcaaaaccttacgtggaacgtggaaatttatcgatttgggcgacgatatgtgcaaaatcgaattcaatttggaatacgatttttccaatgccgttttgtccgccttaatttcccccgtcttcaaccacctttccgccacgctggtcgaagcgttcgtcaaagaggcagaccgccgttatgcttga

SEQ ID NO: 37158 - DNA, 192 bp, Neisseria meningitidis
atgaaagcaaatgaattgaaagacaaatccgttgagcagttgaatgcagatttgttggacttgttgaaagctcagtttggcttacgtatgcaaaacgctaccggtcaattaggcaaaccaagtgaattgaaacgtgtacgtcgcgatattgctcgtattaaaaccgttttaactgaaaaaggtgctaagtaa

SEQ ID NO: 37159 - DNA, 198 bp, Neisseria meningitidis
atgagcgacccgattttggaagccttggcgcgtattgaaaacaagactgatcaaacgctgaaaaatcagaaggaaatgcaggcggaaattgcgcaaatccgccaagacacgaaacgcacggccattacattcggcgcactgggcggcggcgtgattacggtcggctgggaattgcttaaagcgaaaatgggactgtaa

SEQ ID NO: 37160 - DNA, 1356 bp, Neisseria meningitidis
atgagtatccaatccggcgaaattttagaaaccgtcaaaatggttgccgaccagaattttgatgtccgcaccattaccatcggcattgatttgcacgactgcatcagcaccgacatcgacgtgttaaaccaaaacatttacaacaaaatcaccacggtcggcaaagacttggtggcgacggcaaaatatctgtctgccaaatacggcgtgccgattgtgaatcagcgcatttccgttacgccgattgcccaaatcgcggcggcgagcaaagccgattcttacgtcagcgtggcgcagactttggacaaggctgccaaagcgataggcgtgtcctttatcggcggcttttccgcgctggtgcaaaaaggcatgtcgccttcagacgaggtgttaatccgttccattcccgaagcgatgaagaccaccgacatcgtgtgcagctccatcaatgtcggcagtacgcgtgccggtatcaatatggatgcggtcaagctggcaggcgaaaccatcaaacgcacggcggaaatcacgcccgaaggtttcggctgcgcgaaaattgtcgtgttctgtaatgcggtggaagacaatccgtttatggcgggcgcgtttcacggatcgggcgaagcggatgctgtgattaatgtcggcgtatccggcccgggtgtcgtaaaagccgcgttggaaaattcggatgcaacgacattgaccgaagttgccgaagttgtgaagaaaaccgccttcaaaattacccgcgtgggcgaactcatcggccgcgaagcctcaaaaatgctgaatatcccgtttggtattctcgacttgtcgctggcgccgacccccgccgtcggcgactcagtggcacgcattcttgaagaaatgggcttgagcgtctgcggtacgcacggcacaacagcagctttggcattgctgaacgatgccgtgaaaaaaggcggtatgatggcttccggctcggtcggcggtttgagcggcgcgtttatccccgtttctgaagacgaaggcatgattgcggctgctgaagccggtgtgctgacgctggacaaactcgaagcgatgaccgccgtttgttcggtcggcttggatatgattgccgttcccggcgacacgcccgcgcacaccatttccggcatcattgccgacgaagccgccatcggcatgatcaacagcaaaaccactgccgtgcgcattattccggtaaccggaaaaaccgtcggcgacagcgtcgagttcggcggcctgttgggctacgcgcctgtaatgccggtcaaagaaggttcgtgcgaagtgttcgtcaaccggggcggcaggattcccgcaccggttcaatcgatgaaaaactga

SEQ ID NO: 37161 - DNA, 924 bp, Neisseria meningitidis
atgcaatacagcacactggcaggacaaaccgacaactccctcgtttccaataatttcgggtttttgcgcctgccgcttaattttatgccgtatgaaagtcatgccgattgggttattaccggcgtgccttatgatatggcggtttcagggcgttccggcgcgcgtttcggtcctgaagccatccggcgcgcctccgtcaacctcgcttgggagcaccgcaggtttccatggacatttgatgtgcgcgaacgcctgaacattattgattgcggcgacttggttttttcttttggcgacagcagggattttgtcgaaaaaatggaagcgcacgccggcaaattactttcttccggcaaacgctgtttgagtttgggcggcgaccatttcattaccctcccgttgttgcgcgcccacgcccgctatttcggcaaactcgcactgattcattttgacgcgcacaccgacacctacgacaacggcagcgaatacgaccacggtacgatgttctataccgcccccaaggaaggcctcatcgacccgtcccgttccgtacaaatcggcatacgtaccgaacacagtaaaaaattgccttttactgtgttgaccgccccccaagttaatgaagacagtgttgaagagaccgtccgtaaaatcaaagaaaccgtcggcaatatgcccgtttacctgactttcgacatagactgcctcgacccgtcgttcgcccccgggaccggtacgcccgtatgcggcggcttgagcagcgacagggcattaaaaatcctacgtgggctgacggatctcgacatcgtcggtatggatgttgtagaagttgccccctcttacgaccaatccgacattaccgctttggccggcgccacaattgccttggaaatgctttaccttcaaggtgcgaaaaaggactga

SEQ ID NO: 37162 - DNA, 216 bp, Neisseria meningitidis
atgaataccacctataccctgactttcgaccaagacagcctcaaagccctgaatctgctggtgttcacactcaaccatctgaaagttttggagatggacatggaaggaatcgaagacggtttgtctgccgtgattgaaaccgcctccgagaaagccgacaagctgtccgccgctttctacaacgccgtgtacgagcaggaagagaaagcagcctga

SEQ ID NO: 37163 - DNA, 468 bp, Neisseria meningitidis
ttgaaagcgggaagcaggctgttatccgaaagtggcaaaacccaaaccgtccgcaacatcgttgtcaaaccaacaccgctcaaagcctacaatctgaccgtcgccgactggcatacctacttcgtcaagggtaatcaggcggaaacggaaggggtttgggttcataatgattgtccgtatgataaaggcaaccaacgatataaagacgcttcttatcatggcaaaaatgataattctgtgaaaagtagagcaccaacaaacggacaagcagctcttgataattccgttcaagttaaatcaacttctcctcgaagagttggggttgataaagccaataatgaaatcgttgtattagacaaaactcaaacttttaataacggttctgcggaatatcacgggcatgtcagaagttggcaagatttgcataccgatcagaaaaatgctttaaaaaaagcaggattggattag

SEQ ID NO: 37164 - DNA, 843 bp, Neisseria meningitidis
atgttagtctgcaacccctacgaagtcgtcatccacggcacaacgagttccggcaagattttccgtcccagcgactgggcggaacgcctgtgcggcattctgtcctcgttcaccaaagaccacaggctttcctattcgaaatgggtgcgccccatgctggtggacaacatccgctgcgtcgccgtcgataaaaaactggaaaccgacaacccccaaatgttccgcttcctgatggactttgccgccgacaacgacctgcgcgtcatcgactgcaaagccctgctcgaagaacgcgaacagggcggacaaaacaaccctgccgacgaacacgtcatgctggcacaggcaatcgaagaaaaacacgccgccgagaaagcacaggaacagaccgcctcgggcgcatcctacgttttgcgcgaaatcggcgcggacgacaccgccaccgcctttgcagccttgagcgttttgcgttccgccctgaccgacatcaaccgctttaccgaacagatcaacaaagtccaacgcccccaaggctaccgcctgctgggtatttttgaagaaggcaaacacaatgccgtcgccgtctgcggcttccgcgaagcctgcaccctcgccagcggccgccacatccacatcgatgacatcgttaccctgccgcaaagccgccgcaaaggctacgcctcgcgccttttggaagaagtccgcaaaatcggcgcggaaacaggggtaaccaaaatccacctcaacgtccacgtcaaccacgaccgtgccgacgcgcaccgcctgtatttcaaaaacggttttgaaatctgcgcataccacttccgttgcgaccccaaatga

SEQ ID NO: 37165 - DNA, 501 bp, Neisseria meningitidis
atgacccgtttgacccgcgcgtttgccgcggctctgatcggtttgtgctgcaccgcaggcgcgcacgccgacaccttccaaaaaatcggctttatcaacaccgagcgcatctacctcgaatccaagcaggcgcgcaagattcaaaaaacgctggacagcgaattttccgctcgtcaggacgaattgcaaaaactgcaacgcgaaggtctggatttggaaaggcagcttgccgaaggcaaactcagaaacgcaaaaaaggcgcaagccgaagaaaaatggcgcgggctggtcgcagcgttccgcaaaaaacaggcgcagtttgaagaagactacaacctccgccgcaacgaagagtttgcctccctccagcaaaacgccaaccgcgtcatcgtcaaaatcgccaaacaggaaggttacgatgtcattttgcagaacgtgatttacgtcaacacccaatacgacgttaccgacagcgtcattaaagaaatgaacgcccgctga

SEQ ID NO: 37166 - DNA, 1701 bp, Neisseria meningitidis
atgtcagtcaaaatccaaacccgatccatcaataccgacgtttttaatcatttgctcaccgccggtgccgatcctttaatcgcccggctttgtgcttcgcgcggtgtgcaaagtcctgccgaattggacgacaaactcgcttccctcctgccttatcaatcgctgacgaattgcgaagccgccgccggccgtttggcggatgcggttgagcgtcaggaaaaaatcctgattgtcgccgactatgatgccgacggcgcgacggcgtgttccgtcggtatgagcggtttggcggcgatgggggcgaaagtggatttccttgtgcccaaccgctttgaacacggctacggtttaacgcccgagctggctgaaatcgcggcagagcaaggtgtagatttgctgattacggtcgataacggcattgccagcatcgcaggcgtggcgcgcgcgcaggctctgggtttggatgtcatcgttaccgaccaccatctgcctgccgagaccgtgcccgactgcatcatcgtcaatccgaaccaaaaaggctgcggcttccaaagcaaaagtttggcgggcgtgggcgtgattttttatgtattgacggcgttgcgtgccgaactgcgccgccgcgattatttttcagacggcatcaaagagccgaatctgggcgaccttttggatttggtcgcactcggcactgtcgccgatgtcgttactctagaccacaacaaccgtatcctcgtgtcgcaaggtttgaaacggatgcgttcgggcaaaatgcgccccggcatccgcgccttgtttgaagtagcacgacgggattggcgcaaggctcagccgtttgatatgggctttgcgttgggaccgcgcatcaacgccgccggacggctggacgatatgtcggtcggcattgactgtctgttggcgcgagatgatgtggaagcgcaggaactggcggcccagttaaacaacctcaatatcgaacgccgcgaaatcgagcaatccatgctgcaagacgcgctgagtgattttcccaaaaccctgccttcaggtcagacgactttggtggcgtatcgcgacgacttccatcaaggcgtggtcggtatcgttgccagtcgtctcaaagaccgtttttttcgtccgaccatcgtgtttgcgcctgccgacaacggcgaagtgcgtggttcgggacgctccattcccaatttgcacctgcgcgatgttttggacttggtgtccaaacgccatcccgatttgattttgaaattcggcggacacgcaatggcggcgggtttgagcatactcgaacacaatattcccgcgtttcagacagcctttgaagaagccgtgcgcgagatggtgtgcgaagacgatttgtcgcagacctatattaccgacggcagcctgaaagcctgcgacatcacgttggaacaggcgcaaaacctcgcccgccacgtttgggggcagggcttcgcgccgccgagttttaccgacgaatttcacgttgtccgccagcagcctttgggtgcggaaggcaaacataaaaaagtctggctgcaaaaagacggctacgaatttgaagccatgttttggcgttgtagcgaagacattcccgaatacatccgcacggtgtaccgccccgttgccaacgaatggcggaataatctcgaattgcagctttatatcgactactgggaagcggtgtag

SEQ ID NO: 37167 - DNA, 1155 bp, Neisseria meningitidis
atgactgaaactactcaaaccccgaccttcaaacctaagaaatccgttgcgctttcaggcgttgcggccggtaataccgctttgtgtaccgttggccgtaccggcaacgatttgagttatcgcggttacgacatcttggatttggcacaaaaatgtgagtttgaagaagttgcccacctgctgattcacggccatttacccaacaaattcgagctggccgcttataaagccaagctcaaatccatgcgcggcctgcctatccgtgtgattaaagttttggaaagcctgcctgcacatacccatccgatggacgtgatgcgtaccggcgtatccatgctgggctgtgttcatcctgaacgtgaaggccatccggaaagcgaagcgcgcgacattgccgacaaactgatcgccagcctcggcagtatcctcttgtactggtatcaatattcgcacaacggcaaacgcattgaagttgaaagcgaagaagagaccatcggcggtcatttcctgcacctgttgcacggcaaacgcccaagcgaatcacacatcaaagccatgcacgtttcactgattctgtatgccgaacacgagttcaacgcttctacctttaccgcccgcgtgatcgccggtacaggctctgatatgtactccagcattaccggagcaatcggcgcgttgaaaggtccgaaacacggcggcgcgaacgaagtggcttacgatattcaaaaacgctaccgcaatgccgacgaagctgaagccgacatccgcgaacgcatcggccgcaaagaaatcgtgatcggtttcggtcatccggtgtacaccatttccgaccctcgcaacgttgtcattaaagaagtggcacgcggtttgagcaaagaaaccggcgatatgcgcctctttgacattgccgaacgtttggaaagcgtgatgtgggaagagaaaaaaatgttcccgaatctggactggttctctgccgtttcctaccaaaaattgggcgtaccgaccgctatgttcacaccgctgttcgtaatttcccgtacaaccggttggagcgcacacgttcttgagcaacgcaaagacggcaaaatcatccgtccgagcgcaaactacacgggccctgaagatttggcgtttgtggagattgaagaacgctga

SEQ ID NO: 37168 - DNA, 1395 bp, Neisseria meningitidis
atgaacaaacaacccctttccctcgccgtcgtcgggcataccaataccggcaaaacctcgctcctgcgcaccctattgcgcgacagcggcttcggcgaagtcaaaaatgccccgtccactacgcgccatgtcgaagaagccgccatcagcgacggcgcggacatgctggttttcctgtatgacacgcccggactcgaagacgcgggcggtgttttggaatggctggaaacccatacggatacgcgttcagacggcatcgagcggctgcaacagtttctcggcagccacggtgcgcaccatgatttcaatcaggaagccaaagtcttacggcaagtcttgcaaagcgatatggcaatgtacgtcatcgacgcgcgcgaacccgtcctcgacaaatatcgggatgaattgaccatcctttcatggtgtgccaaaccggttatgcccgtgttcaactttaccggcggacagcttcccgaatcgtggacaaccatgctggcgaggagaaacctgcacgttttcgcagggttcgacaccgtcgcctttgattttgaaggcgaactacgcctgtgggaaaacctcgccaccatgttgcccgaacgcagcacacttgaccgcctgacagccatgcgccggcgcgaatggcagcggctggacggcgaagcgcgccgcgaaatcgccgatttcctgctcgatgccgccgccttcaggcaggaagtggacgaaaacgaggataccgccaccgtgctgcaaaccatgcaggcggaaatacgccaactcgaacggcagatgcagcagcggctgtttgccctctaccgtttctaccacagcgaaatcgacggcggcgactggatgccgcaagccttccgccaagacccgttcgacagcgaattgctcaaacaatacggcatccgcaccggcacgggcgcggcaaccggcgcgctcatcggcttggggctggacatcgccacactcggcggctcgctcggattgggtacggcaatcggcggctttttgggcggcatcctgcccaatacccgcaccatttccgacaaactctccggccgccaaaccttgcacaccgaccctgaaaccctgaccctgctcgccgcccgcgccctcgatttgctccacgtcctgcaaacgcgcggacacgcggcacagtcggatatcgagctgcacagccgcaaagccccgtgggacgccgccagactcccgcccgaactcaacaaagcccgcagtcattggaaatggtcgtcgctcaatacgcaccgccccgaaaccagccgcgccgaacgcgccggatatgtggagaaacttcaaatccgcctgtcgggaaaatatagtgaattaaatttaaatcaggacaaggcggcgagccgcagacagtacaaatag

SEQ ID NO: 37169 - DNA, 987 bp, Neisseria meningitidis
atgtcttctacgccgaataaacaagccggatatccccgactggtcgccgatatcggcgggacgaatgcacgctttgcgctggaaaccgcgccgcgcgtcattgaaaaagccgccgtgcttccgtgtaaagactacgatacggttaccgatgcggtgcgtgcctatctgaatcaaagcggtgcaacagccgtacggcacgcggcatttgccatcgccaacccgattttgggcgactgggtgcagatgaccaaccaccattgggcgttttccatcgaaaccacccgtcagactttggggctggacaccctcatccttttgaacgactttaccgcgcaggcattggcggtaacgcagacttcaagcaaagacctgatgcaggtaggcgggcaaaagcctgtcgaatttgcccccaaagccgttatcggccccggtaccggcctgggcgtgagcggattggtgcacagccacgcaggctgggtggctttggcgggcgagggcgggcataccagtttcccgccgtttgacgatatggaagtgctgatttggcagtacgccaaaaacaaatacggccatgtttccgccgaacgctttttgagcggcgcgggcttgagcttggtttacgaggctttggctgcaaaacagaaagccaaacccgccaaactgatgccgtctgaaatcacggaaaaggctttgagcggcgcgtcgcctttgtgccgtcagactttggacatcttctgcgccatgctcggcacggttgcttccaacctcgccctgacgctgggcgcgcgcggcggcgtgtacctgtgcggcggcattattccccgcgtgttggaatatttcaaaacttccccgttccgcagccgtttcgagaacaagggcaggtttgaagcatatcttgccgcgattcccgtgtatgtcgtcttgagcgagtttcccggaatttccggtgcggctgcggctctcgacaaccatttgagaaacgtttaa

SEQ ID NO: 37170 - DNA, 936 bp, Neisseria meningitidis
atggggcacaatatgatgaccacccaaaaatggtatgagcatattactaatgtaatcatgggcaatactgctaatttcaatagcggttgccctgaagctatagattatgtagatgaaagaaaaggcgttccgcttgcagcgatgaaatacattttaatgtacactgaagctgcggcttcccatgcgtatctatttgaacatgatcttaagaaattcaagcaatatgcttatgttgcaggaaagttgggtattttgcagagtgtagatgatgaagaccccgaacccttcttctttccctgcgacatgctcaacattcaagatccgatgtttctgatgctgatgagcgacagcccgcagctgcgcgagtttctggtgcgcaatatcgacaacatcgccaacgatacagaagcctttataaaccgctacgacctcaaccgtcatatgatttacaatactctgctgatggtggagggtaagcagcttgatcggttgaaacaacgtagcgagaaagtcttggcgcatcccacccccagcaaatggctgcaaaagcggttgtacgattaccgcttcttcctcgctttcgccgaacaggatgccgaggcaatgaaagccgccttagagccgcttttcgataaaaaaaccgcgcgtatggctgccaaagaaacattgtcctatttcgatttctacctgcagccgcaaatcgttacctacgccaaaatcgcatccatgcacggtttcgatttgggcatagaccacgaaatcgcaccgagggatttgattgtttacgatccgctgccggcagacgaatatcaagacatcttcgattttatgaaacagtatgacttgtcttacccgtatgaatatctgcaggattggatagattactatacgttcaaaaccgataagctggtatttggtaacgcgaagcgagagtga

SEQ ID NO: 37171 - DNA, 816 bp, Neisseria meningitidis
atggcaaattctgccgtaagccgcatcgtcaaacggctggaggaaaagttgggtgtgaacctgctcaaccgcaccacgcggcaactcagtctgacggaagaaggcgcgcaatatttccgccgcgcgcagagaatcctgcaagaaatggcagcggcggaaaccgaaatgctggcagtgcacgaaataccgcaaggcgtgttgcgcgtggattccgcgatgccgatggtgctgcatctgctggcgccgctggcaacaaaattcaacgaacgctatccgcatatccgactttcgctcgtttcttccgaaggctatatcaatctgattgaacgcaaagtcgatattgccttacgggccggagaattggacgattccgggctgcgtgcacgccatctgtttgacagccgcttccgcgtaatcgccagtcctgaatacctggcaaaacacggcacgccgcaatctacagaagagcttgccggtcaccaatgtttaggcttcaccgaacccggttctctaaatacatgggcggttttagatgcgcagggaaatccctataagatttcaccgcactttaccgccagcagcggtgaaatcttacgctcgttgtgcctttcaggttgcggtattgcttgcttatcagattttttggttgacaacgacatcgctgaaggaaagttaattcccctgctcgccgaacaaacctccgataaaacacacccctttaatgctgtttattacagcgataaagccgtcaacctccgcttgcgcgtatttttggattttttagtggaggaactgggaaacaatctctgtggataa

SEQ ID NO: 37172 - DNA, 1890 bp, Neisseria meningitidis
atgttgcgaacctacttgaatcaattaacccctcccgaattagctgactctgttgaaaatactgttaatggttttatggagaaattatcacaaaccgagccgaaaatcgcccaaaatgttttattactgggcaatgttcaaagtggcaaaacggcacaggttttgggtatattaagtgcgctggctgatgatggtgaccacaaagtttttttgtatcttactactgacagcgtagatttacaggatcaaacagtcaaacgagctaaagccaatctgaaaaactttatcgtattgtctgaagctgacgaccgaagttttatggaagtaatgaaggcagaaaatcccatcttggtcgtgattaaaaagaatgcccgtgtattgaaacgttggcgtaatttgtttgccagtcaaagtagcctaaaaggctatcctttagttattgtggatgatgaagccgatgctgccagtctaaatactaatactgataagccggataaagatgccagcactatcaataaactgctaaatgacattaagaattcctgttgtcaaagtctatttattcagttgaccgccacacctcaatcgcttttgttgcaaaacgaagcatctgattggcaacctgaatttatccacttctttgaagcaggcgaaaaatacatcggcggcaactttgtcttttctgatccaccaagctatatagttcgttttattgatagcgaattggatgatatgaaagacgagagtggtgaaattgccgaaggagcaaaacaggcattgcttagttttctaataacctgtgcagaattcgcgctatgtgataaggctaactgtaattttgcactacatccaagctataaaattcaagatcatcaagccttttcaaagaagatccaagcctttttaaatgatttagtgcaagcagtcaataatggggaagaccttgcaggtagctttaaagaaagttatttggatttgcaaaagaccaagcccgatattcatcactttgatgaaatatacgaaaaattgacagcacttttggagaataaacaaatctctactctcgtcgttaactcgcagacagaatcagattttgatttggaaagaggttttaatattattattggtggaaatgtgatcggacgaggtttaactattccgaaactgcaaacggtttattatagtcgcactgccaaaaaaccgaatgcagatactttctggcaacattcgcgtatttttggatatgaccgcgataaatcattattacggctttatattccgtttgatgtctattacttctttgtacaactcaatcaagcaaataatctgattattgggcaggcaaaaaattcaggcggcaatattcaggttatttatccgaaaaatatcaatccaactcgaaaaaatgtattgaaattcgatagtatcaatcaaattgtgggtggtgtgaattattttccacttcacccaaacgaagataatttatcggagattaacaaaattttgccttctattttgaaagatgaaattcaatctgatttatatcaaatagatatagaagatttattcttggttctagataaattgggtcgttatgttccagatgactggaataaggaaaaatttattgctggtgtagaagcattaaaagcacaacgtccaagttttaaaacctatgttttgatcaaaaccggacgtaaactttctcgagcaaccggcacaatgctttcggaagacgaccgtaaattaggagaaaaatatcccaatgatttattccttacgctttatcaagtagtaggaaataaagacaaaggttggcagggaaaagatttttggttacccaatatcaagctaccacacaatggcttggtgtaccaaagtgcaaaatga

SEQ ID NO: 37173 - DNA, 342 bp, Neisseria meningitidis
atgccgtccgaacctcttaaaggcttgccggaacaaaacgtcgtccggctgaccggcaagcatcccaacgacttggaagccgtcagcggcaaatgcatggaaaccgacgataagggcggtccggtaggctgggcggaaaacggcgtgtgccataccttgtttgccaaactggtgggcaatatcgccgaagacggcggcaaactgacggattacctgatttcgcattccgccctgcaaccctatcaggcaggcaaaagcggctatgccgccgtgcagaacggacgctatgtgctggaaatcgacagcgaaggggcgttttatttccgccgccgccattattga

SEQ ID NO: 37174 - DNA, 717 bp, Neisseria meningitidis
ttgttaatccactatactttatgccgctaccgcaactggctggcgcaagacgacaccctgtccgaattgctcaaactgattaactgccaactgaccgaaaaaaacctaaaagtagagaaagcatccgcctccgtcgttgacgccaccattattcagaccgccggcagcaaacagcgtcaggccatagaagtcgatgaagaaggacaagtcagcggccaaaccacaccgagtaaggacagcgatgcccgttggatcaagaaaaacggcctctacaaactcggttacaaacaacatactcgcaccgatgaggaaggctatatcgagaaactgcacatcacccccgccaatgcccatgagtgcaaccacctgttgcctttgctggaaggtatagccgaaggcacgaccgtctatgccgacaaaggctacgacagtaaggaaaaccggcagcatctgaaagaacatcagttactggacggcattatgcgcaaagcctgccgcaaccgtccgctgtcggaaacgcaaaccaaacgcaaccgatatttgtcgaagacccgttatgtggtcgaacaaagcttcggtacgctgcaccgtaaattccgctatgcgcgggcggcctatttcggactgattaaagtgagtgcgcaaagccatctgaaggcgatgtgtttgaacctgttgaaagccgccaacaggctaagtgcgcccgctgccgcctaa

SEQ ID NO: 37175 - DNA, 1134 bp, Neisseria meningitidis
atgagcacccccgccctcctcgtcctcgctgacggcagcgtatttcacggcacatcaatcggttatgaaggttcgacttccggcgaagtcgtgttcaatacttcgatgactggctatcaggaaatcctgaccgacccgtcctactgcaaacaaatcgttaccctcacctacccacacatcggcaacaccggcaccaacgccgaagatgaagaaagccgcagcgtttatgccgccggcctgattatccgcgacctgccgctcttgcacagcaacttccgcgcctccgaaagcctgcacgactatctggtacgcaacaaaaccgtcgccatcgccgacatcgatacccgccgcctgaccacgctgttgcgcgaaaaaggcgcgcaaggcggcgcgattctgaccggtgcggatgccacaatcgaaaaagcgcaagaactcatcgccgcgttcggcagtatggtcggcaaagacttggcaaaagaagtttcctgcacggaaacttacgaatggacggaaggcgaatgggaattgggcaagggtttcgttacccctgacgaacagccttaccacgtcgtcgcctacgatttcggcgtgaaaaccaacatcctgcgtatgctcgcctcgcgcggctgccgcctgaccgtcgtccccgcccaaacgagcgcacaagacgtgttggcactcaatcccgacggcgtgttcctgtccaacggccccggcgaccccgagccttgcacctacgccatcgaagccgtgcaaaaactgatggaaagcggcaaaccgattttcggcatctgcttgggacaccagctcatcagcctcgctatcggcgcgaaaaccctgaaaatgcgcttcagccaccacggtgcgaaccaccctgtgcaagatttggacagcggcaaagtcgtcatcaccagccaaaaccacggttttgccgttgatgccgacaccctgcccgctaacgcacgcattacccacaaatccttgtttgacaacactttgcaaggcatcgagctgaccgacaaacctgtgttctgcttccaaggccaccccgaagccagccccggtccgcaagatgtcggctatttgtttgacaaattcattggcaatatgaaagcggcaaaacgggcataa

SEQ ID NO: 37176 - DNA, 516 bp, Neisseria meningitidis
atgaaaatcaaacaaatcgtcaaaccgggcttggcagtattggcggcgggcatcctgtctgcctgcgcaaccaaaagcaacgtcaaagccgacggaacgaccgacaatccggttttcccgaaaccctattccgtaacgctcgacaacaagcgcggtacattcccgacctatgacgaattggacttgatgcgccccggtctgaccaaagacgacatctacaaaatcctgggccgcccgcattacgacgaaggtatgtacggcgtgcgcgaatgggattacctgttccacttccataccccgggcgtaggtaccgaccctgaaaacacttccggcgtggaagatgttactacctgccaatacaaagtgattttcgataaagacaaatttgcccgcagcttctactggaaccccgtcttcccgaaagatgccgcctgtccgccgccagcacccaaagccgagccgcaagtcatcatccgcgaaatcgtgcccgccaaacccaaacgcatccgccaataa

SEQ ID NO: 37177 - DNA, 672 bp, Neisseria meningitidis
atgactttttccacgattctgttctatatccttgccgccatcgttttgtacggtgcggttcgtaccgtcaccgctaaaaaccctgtccatgccgctttgcatctggtgctgaccttctgcgtgagcgcgatgatttggatgctgatgcaggcggagtttttgggcgtgacgctggtggtggtttacgtcggcgccgtgatggtgttgttcctgttcgtcgtgatgatgttgaatatcgacattgaagaaatgcgcgccggtttttggcgtcatgcgcctgttgccggtgtggtcggcacattgttggcggttgctctgatcctgattctggtcaatccgaaaaccaacctggccgcatttggtctgatgaaagacattccggccgattacaacaatatccgcgatttgggcagccgtatttataccgactacctgttgccgtttgaattggcggcggtattgctgctgttgggtatggtggccgcgattgcactggttcaccgcaaaacggttaatccgaaacgtatggatcctgcagaccaagtcaaagtacgcgccgatcaaggccgtatgcgtctggtgaaaatggaagcggtcaaaccgcaagtcgaatctgccgaagaaagcgaagtttcagacggcctcaagccggaaggggagggaaaagcatga

SEQ ID NO: 37178 - DNA, 1635 bp, Neisseria meningitidis
atggcagcaaaagacgtacaattcggcaatgaagtccgccaaaaaatggtaaacggcgtgaacattttggcaaacgccgtgcgcgtaaccttgggtcccaaaggccgcaacgtggtggttgaccgcgctttcggcggcccgcacatcaccaaagacggcgtaaccgtcgccaaagaaatcgaactgaaagacaagtttgaaaatatgggcgcgcaaatggtgaaagaagtcgcgtccaaaaccaacgacgtggcgggcgacggtacgactaccgccaccgtattggcgcaatccatcgttgccgaaggtatgaaatacgttaccgccggtatgaacccgaccgacctgaaacgcggtatcgacaaagccgttgccgctttggttgaagagctgaaaaacatcgccaaaccttgcgacacttccaaagaaatcgcccaagtcggctcgatttccgccaactctgacgaacaagtcggcgcgattatcgccgaagcgatggaaaaagtcggcaaagaaggcgtgattaccgttgaagacggcaaatctttggaaaacgagctggacgtggttgaaggtatgcagttcgaccgcggctacttgtctccttacttcatcaacgacgctgaaaaacaaatcgctgctttggacaatccgtttgtattgttgttcgacaaaaaaatcagcaacatccgcgacctgctgcctgttttggaacaagtggcaaaagccagccgtccgctgttgattatcgctgaagacgtagaaggcgaagccttggcgactttggtcgtgaacaacatccgaggcatcctgaaaaccgttgccgtcaaagcccctggcttcggcgaccgccgcaaagcgatgttgcaagacatcgccatcctgaccggcggcgtggtgatttccgaagaagtcggtctgtctttggaaaaagcgactttggacgacttgggtcaagccaaacgcatcgaaatcggtaaagaaaacaccaccatcatcgacggctttggcgacgcagcccaaatcgaagcgcgtgttgccgaaatccgccaacaaatcgaaaccgcaaccagcgattacgacaaagaaaaactgcaagagcgcgtggctaaattggcaggcggcgtggcagtgatcaaagtcggcgcggctaccgaagtcgaaatgaaagagaaaaaagaccgcgtggaagacgcgttgcacgccacccgcgctgccgttgaagaaggcgtggttgcaggcggcggcgtagccctgttgcgcgcccgtgccgctttggaaaacctgcacaccggcaatgccgaccaagacgcaggcgtacaaatcgtcttgcgtgccgttgagtctccgctgcgccaaatcgttgccaacgcaggcggcgaacctagcgtggtggtgaacaaagtgttggaaggcaaaggcaactacggttacaacgcaggctccggcgaatacggcgacatgatcgaaatgggcgtactcgaccccgccaaagtaacccgttccgcgctgcaacacgccgcatctatcgccggcttgatgctgaccactgattgcatgatcgctgaaatccccgaagacaaaccggctgtgcctgatatgggcggcatgggtggtatgggcggcatgatgtaa

SEQ ID NO: 37179 - DNA, 435 bp, Neisseria meningitidis
atgaaaaaacaaatcacctcagccgtaatgatgctgtctatgattgcccccgcaatggcaaacggcttggacaatcagacatttgaaaaccaagtgttccacacgcaggcagatgcgccgatgcagttggcggagctttctcaaaaggagatgaaggagactgagggggagtggattcctaatgctgttggaggcattatgggaggagttggagggcatttcagctatatggctagtgctattgctagtggctcgtataatcgagaggcacattggacagcaattggaggtggtgcgttaattggtgcgatgaaccctattaacggaggaagagcactgattaatggtatgcgaggtgtagcagtggggactgttgctggtggcataaatggttatgcaggttctacgggtaagaacactgacattcgccgttaa

SEQ ID NO: 37180 - DNA, 678 bp, Neisseria meningitidis
atgagccgcgtattactcgtagatgacgatgccctgctaaccgaactgctgaccgaatacctgagcgccgaaggtctgaacgtccgcagcgttcccgacggggaagcaggcgtacaggaaatcctgagcgggcagtacgatgtagtcgtattggattccatgatgcccaaaatgaacggcttggatgtcttgaaaaacgtacgcgcccgaagcaccgtccccatcatcatgctgaccgccaaaggcgacgacatcgaccgaatcatcggcttggaaatgggcgcggacgactatgtccccaaaccctgcacaccacgcgaactcttggcacgcatcaatgccatcctgcgccgcgcacaacacagcggcgaacagaacaacgcacccaacagcatctccgtcagcgatgtcgtcctgtaccccgccaaacgccaggcatccgtcaaagacatgccgctcgaactgaccagcaccgaattcaacctgctcgaagtcctgatgcgccatgccggacaggtagtcagcaaagaaaccctgtccgtcgaagcactcgaccgcaagctggcaaaattcgaccgcagtatcgacgtacacatctccagcatccgccacaagttgggcgatgcctctctgattcaaaccgtacgcggcttgggctacctgtttgtcaaaaactga

SEQ ID NO: 37181 - DNA, 216 bp, Neisseria meningitidis
gtggcaggtgcgaccatacggattatcgaccgccaaactgacgaagtgattgccaagaaaaccatctatgtctttgaaaaaggcttggacggcacgggtggggcgagaatgccgtggaagtttgctatcttgtgcaataaagaaagacttacttcttcagagccgttatcggattttgttcttagcgttttaaaaccttatatattgcgtccctaa

SEQ ID NO: 37182 - DNA, 1197 bp, Neisseria meningitidis
atgtcccaaaaattgatcttggttttgaactgcggcagctcgtccctcaaaggcgcggtcctggataacggcagcggcgaagtcctgctcagctgccttgccgaaaaactcaacctgcccgatgcctacatcacattcaaagtaaacggcgaaaaacacaaagtcgatctgtccgcacatcccgaccacaccggcgcggtcgaagccctgatggaagaactcaaagcccacggcctcgacagccgcatcggcgccatcggccaccgcgtcgtcagcggcggcgaactgtacagcgaatccatcctcgttgacgacgaagtcattgccggcatcgaaaaatgcatcccgctcgcccccctgcacaaccccgcccacctcttgggcctgcgtgccgcgcaaagcattttcaaagacctgcccaacgtcgtcgtattcgatacctccttccaccaaaccatgcccgaagtcgcctacaaatacgccgttccgcaggagttgtatgaaaaatacggcctgcgccgttacggcgcgcacggtaccagctaccgcttcgtcgccgacgaaaccgcgcgcttcctcggcaaagacaaaaaagacctgcgtatggtcattgcccacttgggcaacggcgcgtccatcaccgccgtcgccaacggcgaatcgcgcgacaccagtatgggcctgaccccgctggaagggctggtaatgggtacgcgcagcggcgacatcgatccttccgtattcggcttccttgccgaaaacgccaatatgaccatcgcccaaatcactgaaatgctgaacaaaaaatccggtctgctcggcatttccggcctgtccaacgactgccgcaccattgaagaagaagccgccaaggggcataaaggcgcgaaattggccttggatatgtttatctaccgccttgccaaatacatcggcagtatggcggttgccgcaggcggtttggacgcactggtctttaccggcggcatcggcgaaaactccgacatcatccgcgaacgcgtgatcggctacttgggcttcctcggtctgaacatcgaccaagaagccaacctgaaagcccgcttcggcaacgccggcgtgattaccactgccgacagcaaagccgttgccgtggtcattccgaccaacgaagagctgatgattgcccacgacactgcccgtttgagcggtctgtaa

SEQ ID NO: 37183 - DNA, 279 bp, Neisseria meningitidis
atgacagaacatacgcctgaaaaaaagaacgttaaagtggatcaactggttgttcaagataaagaatctgcatctaattccggtaaggaagggttttttgcatatttctcaaattcttggtccgaattcaaaaaggtggtttggcctaagcgtgaagatgctgtcagaatgactgtatttgttatagtgtttgttgctgtgctttctatatttatctatgcggcagatacagcaatttcgtggttattttttgatgtattgctgagaagggaaggttga

SEQ ID NO: 37184 - DNA, 1542 bp, Neisseria meningitidis
atgaaaatcggtatcccacgcgagtcattatccggcgaaacccgcgtcgcctgtacgcccgccaccgtcgccctgctgggcaaactgggctttgaaaccgttgtcgaaagcggtgcaggtttggcggcaagtttggacgatgccgcttaccaaacagcaggcgcaaccgttgccgacaaagcggcggtttgggtctgccctttgatttataaggtcaacgcgccgtccgaacaggaactgccgcttttgaacgaaggtcaaaccatcgtcagcttcctgtggccgcgccaaaacgaggctttggtcgaagccttgcgcgccaagaaagtgaacgcgctggcgatggatatggtgccccgcatttcgcgcgcgcaggctttggacgctttgtcttcgatggcaaacatcagcggctaccgcgccgtaattgaagccgccaacgccttcggccgtttcttcaccggtcaaattactgccgccggcaaagtgccgcctgcgcaggttttggtgattggtgcaggtgtggcaggtttggcggcaatcggtacggcaaattcactaggcgcagtggtgcgcgcgttcgatacccgcttggaagtggcggaacaaatcgaatcgatgggcggcaagttcctgaaactcgacttcccgcaagaatcgggcggcagcggcgacggctacgccaaagtgatgagcgacgaatttatcgccgccgagatgaaactctttgccgagcaggcgaaagaagtggacatcatcatcactaccgccgccattccgggcaaacccgcgcccaagctgattaccaaagaaatggtggaaagcatgaaatccggctccgtcatcgtcgatttggcggcggcgacgggcggcaactgcgaactcacccgcccgggcgaattgtccgtaaccggcaacggcgtgaaaatcatcggctacaccgacatggcaaaccgccttgccggacagtcttcccagctttacgccaccaacttggtgaacctgaccaagctgttaagcccgaacaaagacggcgaaatcacgctggattttgaagacgtgattatccgtaacatgaccgttacccgcgacggcgaaatcaccttcccgcctccgccgattcaagtttccgcccagccgcagcaaacgccgtctgaaaaagccgcgcctgccgccaagcccgagccgaaacccgttcccctgtggaaaaaactcgcgcctgccgtcatcgccgccgtattagtgctgtgggtcggcgcggtcgcacccgcagcattcttgaaccactttatcgtgttcgtcctcgcctgcgtcatcgggtactacgtcgtttggaatgtcagccactcgctgcatacgccgctgatgtccgtgaccaacgccatctccggcatcatcgtcgtcggcgcgctgctgcaaatcggtcagggcaacggctttgtttcgctgctgtcgtttgttgccatcctgattgccggcatcaacatcttcggcggctttgcggttacacggcgtatgctgaatatgtttaagaaagggtaa

SEQ ID NO: 37185 - DNA, 2016 bp, Neisseria meningitidis
atgaaatcctaccccgacccctaccgccattttgaaaacctcgattccgccgaaacgcaaaacttcgctgctgaagcgaatgccgaaacgcgcgcgcgttttttaaacaacgacaaggcgcgcgcgctttcagacggcattttgaatcaaatgcaggacacgcggcagattccgttttgtcaggaacaccgcgcgcggatgtaccatttccatcaggacgcggaatatccgaagggcgtgtaccgcgtgtgtacggcggcgacgtaccgttccggctatcccgagtggaaaatcctgttttcagtggcggatttcgacgagctgctcggcgacgatgtatatctaggcggcgtgtcgcacttggtggaaaagcccaaccgcgcactgttaacactaagcaaatcaggcggcgatacggcgtacacgctggaagtggatttggaagcaggggagttggtcgaaggcggttttcactttccggcaggcaaaaaccatgtgtcgtggcgcgatgaaaacagcgtgtgggtgtgtccggcttgggacgaacgccagttgaccgaatcgggctatccgcgcgaggtgtggctggtggaacgcggcaagagtttcgaggaaagcctgcctgtgtatcaaatcgataaaggtgcaatgatggtgaacgcgtggcgttatctcgatccgcaaggttcgccgattgatttgattgaagcgtcggacggtttttacaccaaaacctatttgcaggtgtcgtcggaaggcgaggcgaaaccgttaaacctgcccaacgattgcgacgtggccggctatctagccggacatcttttgctgacattgcgtaaagactggcaccgcgcgaaccaaagctatccgagcggcgcgctggtagcggtgaaactgaatcgcggcgaaatcggggcggcgcagcttttgtttgcgcccgatgaaacgcaggcattggaaagcgtggaaacgaccaagcgttttgtggtggcgagcctgctggagaacgtacaaggccgtctgaaagcgtggcgttttgccgacggcaaatggcaggaagtcgaactgccgcgcctgccttcgggcgcgttggaaatgaccgaccagccttggggcggcgacgtggtttaccttgccgccggcgatttcaccacaccgctgacgctgtttgcgctggatttgaacgtgatggaactgaccgtcatgcgccgccagccgcagcagttcgattcagacggcatcgaagtgcggcagttttggacgacttctgccgacggcgagcgcattccttatttccacgtcggcaaaaacgccgcgcccgatacgccgactttggtctatgcctacggcggtttcggtattcccgaattgccgcattatctgggcagcatcggcaaatactggctggaagagggcaacgccttcgtgttggcgaacatacgcggcggcggcgagttcggcccgcgctggcatcaggcggcgcagggcatcagcaaacacaaaagcgtcgacgatttgcttgccgttgtgcgcgatttgtccgaacgcggcatgagtttgcccgaacacatcggtttgcagggcggcagcaacggcggcctgattaccgccgccgccttcgtgcgcgaaccgcaaagcatcggcgcgctggtgtgcgaagtaccgctgaccgacatgatccgctatccgctgctctccgccggcgcaagctggacggacgaatacggcaatccgcagaaatacgaagtctgcaaacgccagttgggcgaattgtcgccgtatcacaatctttcagacggcatcgattatccgcccgcactcatcaccaccagcctcagcgacgaccgcgtccatcccgcccacgcgctcaagttttacgccaaactgcgcgaaacctcgccgcaatcttggctctactcgcctgacggcggcggccataccggcaacggcacgcaacgcgaatccgccgacgaactcgcctgcgtgttgctgtttttgaaagagtttttgggctaa

SEQ ID NO: 37186 - DNA, 2691 bp, Neisseria meningitidis
atgtccgacaaccgcctcgacaccgcccgccgccattccctcttcctcgcccgccagctcgacaacggcaaactcaagcccgaaattttcctgcctatgctggacaaggttttgaccgaagcggatttccaagcctttgccgactgggacaaaatccgtgcggaagaaaacgaggaagaattggcgcggcagttgcgcgggttgcgccgttatgtggtgtcgcagattatcgtgcgcgatatcaaccgtatcagcgatttgaacgaagtaacccgcacgattacgctgtttgccgattttgccgtcaataccgcgctggattttgcctacgcctattatcgggacatgtacggcacgccgatcgggcgttataccaaatcgccgcagcatttgagcgtggtggcgatgggcaaggcgggcggctatgagttgaacgtgtcttccgacatcgatttgattttcatctatcccgaatctggcgacaccgacggcaggcgcgaacggggcaatcaggagtttttcaccaaagtcgggcagaaactgattgcgctgctgaacgacatcaccgccgacgggcaggtgttccgcgtcgatatgcggctgcggccggacggtgattcgggcgcgttggtattgagcgaaaccgcgctggagcaatatttgattacacaggggcgagaatgggaacgctacgcgtggtgcaaaggtcgcgtggttacgccgtatccgaacgacatcaaagcactggtgcgcccctttgtgttccgcaaatatctggattacggcgcgtatgaggcgatgcgtaagctgcaccgccaaatccgcagcgaagtcagcaaaaaaggcatggcggacaacatcaaactcggcgcgggcggcatccgcgaagtcgaatttatcgcccagattttccagatgatacgcggcggccaaatgcgtgcgctgcaactgaaaggcacgcaggaaacgctgaagaaacttgccgaaaccgggatcatgccgtctgaaaacgtcgaaactctgcttgccgcctaccgattcctgcgcgatgtcgaacaccgcctgcaatactgggacgatcggcaaacccaaaccctgccgacctcgcccaaacagcggcaactgctcgccgaaagcatgggtttcgacagttattccgctttttcagacggtctcaatgttcatcggaacaaagtcaatcagttgttcaacgaaattttgagcgaacccgaagagcaaacgcaagacaacagcgaatggcaatgggcatggcaggacaaacccgacgaagaagggcggcgatgccgtctgaaggcgcacgggttcgatgccgaaaccgtcgccgcaaggctcgaccaaatccgccacggccataaataccgccatctttccgcacacgcccagccgcgtttcgatgcggttgtgccgctgttcgtacaggcggcggcagcgcaaagcaacccgaccgatacattgatgcggctgttggattttctcgaaaacatcagccgccgatccgcctatctcgccttcctcaacgaacatccgcaaaccttggcgcaactggcgcagattatgggccaaagttcttgggtggcggcgtatctgaacaaatatccgattttgttggacgaactcatcagcgcgcagcttttggataccgcgtttgattggcaggcactcgccgccgccctttcagacgacctcaaagcctgcggcggcgatactgaagcgcaaatggacaccctgcgccgcttccagcacgcccaagtcttccgcctcgccgtccaagacctcgccggactgtggacggtagaatccctctccgaccaactctccgccctcgccgacaccatcctcgccgccgccctgctgtgcgcatgggcggacatgcccaaaaaacaccgcgacaccccgcaattcgccgtcgttggttacggcaaactcggcggcaaagaactcggctacgcctccgacctcgacctcgtctatctctacgacgatccccaccccgacgcaggcgacgtgtacagccgcctcgcccgtcgcctgaccaactggctttccgccgccaccggcgcaggcagcctctacgaaaccgacctgcgcctgcgccctaatggcgacgccggtttcctcgcccacagcatcgccgcctttgaaaaataccagcgcgaaaacgcctggacgtgggaacaccaatcccttacccgcgcccgcttcatctgcggcacgtccgaaattcagacggccttcgaccgcatccgcaccgaaatccttaccgccgaacgcgaccaaaccgccttggcaggcgaaatcatcgaaatgcgcgaaaaaatgttccccacccacccgcctgccgacagcaacgtcaaatacgcgcgcggtggcgtggtcgatgtcgaatttatcgtccaatacctcatccttgcccatgcccgaaaatatccgcaacttctcgacaactacggcaacatcgccctcttgaatatcgccgccgactgcagccttatcgacaaaaacctcgccgaacaaagccgcaccgcctaccgcttctaccgccggcagcagcacaacaccaaactgcgcgacgcggcaaaaaccgaagtaaccggcgaactgttggcacattacggcaatgtcaggaaattgtggcgggacgtgttcggcgaagaagcggcaaccgcctga

SEQ ID NO: 37187 - DNA, 780 bp, Neisseria meningitidis
atggcagcctcgcccgaagcaaaattcactgaagaaaaaattttgtgggtcaaacaccacacgccgaaactcatcactttcgccatcagccgtcccgaatcctaccgttttaaagccggacagttctcccgactcggtttctacgaaggagaaggtttcatttggcgtgcctactccatcgtttccgcagaatatgccgacacgctcgaatattttgccgtactcatccaagacggtcccatgtcggcccgtttcgccaaaatgcaacagggcgacaccatcctgctggataaaaatgccaccggcttcctcctgcccgaacgcttccccgacggcaaggatttggtgatgctctgcaccggctccggcatcgcccccttcctttccattctcgaacaacccgaaatccggcagcgtttcgataccgtcaacctgatacattccgtatcttttcccgaagaattgattttcaacgaccggctcgccgccctttccgaacaccctctggtcggcgaatacggacactcgttccgtttcatccccgtaaccacccgcgccgccaattccgacggattgggcggcaaacgtattcccgaactcttaaaaaacggcagcatcgaacaggcactgcataccaagttcacccccgaatccacacggtttatgatttgcggcaacccggaaatggtcaaagacactttccaaacgctgcttgacatgggttacgccatgcaccgcaaccgcattcccggtcaaatcatgatggaaaacggcttctaa

SEQ ID NO: 37188 - DNA, 474 bp, Neisseria meningitidis
atgttatccacagaatccttaaaacaaatcgacatagagttggcgaaatatcctgccgaccaacgccgatccgccattatgggcgcattgcgtattgcccagaccgaaaaaggctggcttgctcccgagaccatcgcctttgtcgcagactacatcggcatatcgcctgcacaagcctacgaagtcgctaccttctacaatatgtacgatcttgagcctgtcggcaaatacaaactgaccgtttgtaccaacctgccctgcgccctgcgcggtggtatggctaccggcgaatacctcaaacaaagactcggtatcggctacggcgaaatcacgcccgacggcaaatttacccttgtcgaaggcgaatgcatgggcgcgtgcggcgatgcccccgttatgctggtcaacaaccacagcatgtgcagctttatgactgaagaggcgattgagaagaaactggcggagttggagtag

SEQ ID NO: 37189 - DNA, 237 bp, Neisseria meningitidis
atgcgtattttggatatttttaaaaaccccgcgacaggcaatgtgtcgcactcgaaactgtgggcaaacgttgcctgcgcggcggggacgtttaagtttgtgatgctgcccgatccgtcggcggagatttgggcggtgtatttgggcattgtcggcggctatgcggtggcgcgctcgtttgtcagcgtcaaacgtcaggaggtcgagaatgaatctcgtgaaactgctggcgaataa

SEQ ID NO: 37190 - DNA, 276 bp, Neisseria meningitidis
atgaatgagggtgaagttgttttaacaccagaacaaatccaaaccttgcgtggttatgctttccgtggcgatacctatggcggttggcgttatttggctaatttgggtgaccgttatgcggataatgctgccgcaattgtcggtaaggatgcaaacttaaatggtttgaatttatggatgaaaaaaggggtggaaaacctatgggatgatacggtcggtaaaaagatccgtttaatgtgtatttccgttttttggattgtggttttcaatttgtag

SEQ ID NO: 37191 - DNA, 600 bp, Neisseria meningitidis
atggcgttaaaaacatcaaacttggaacacgcaatgctggttcatcccgaagctatgagtgtcggcgcgcttgccgacaaaatccgcaaaatcgaaaactggccgcaaaaaggcatcttattccacgacatcacgcccgtcctgcaaagcgcggaatacttccgccttttggtcgatttattggtttaccgctatatggatcagaaaatcgacatcgttgccggtttggacgcacgcggcttcattatcggcgcggcactcgcctaccagctcaatgtcggtttcgtccccatccgcaaaaaaggcaagctgccttttgaaaccgtatcgcaaagctacgcgctcgaatacggggaagctgcggtggaaatccacaccgatgccgtcaaacccggttcgcgcgtgctgctggtcgatgatttggttgccacgggcggcacgatgcttgccggactggagctgatccgcaaactcggcggggaaattgtcgaagctgccgccattttggaatttaccgaccttcaaggcggcaagaatatccgtgcaagcggcgcgcccttatttaccctgcttcaaaacgaaggctgtatgaagggctga

SEQ ID NO: 37192 - DNA, 996 bp, Neisseria meningitidis
atgaaaacatctatccgatacgcactgcttgccgcagccctgaccgccgcaacccccgcgctggcagacattaccgtgtacaacggccaacacaaagaagcggcacaagccgttgcagatgcctttacccgggctaccggcatcaaagtcaaactcaacagcgccaaaggcgaccagcttgccggtcaaatcaaagaagaaggcagccgaagccccgccgacgtattctattccgaacaaatcccggcactcgccaccctttccgcagccaacctcctagagcccctgcccgcctccaccatcaacgaaacacgcggcaagggcgtgccggttgccgccaaaaaagactgggtggcactgagcggacgttcgcgcgtcgtcgtttacgacacccgcaaactgtctgaaaaagatttggaaaaatccgtcctgaattacgccacgccgaaatggaaaaaccgcatcggttacgcccccacttccggcgcgttcttggaacaggttgtcgccatcgtcaaactgaaaggcgaagcggccgcattgaaatggctcaaaggtctgaaagaatacggcaagccttacgctaaaaactccgtcgcccttcaagcggttgaaaacggcgaaatcgatgccgccctcatcaacaactactactggcacgctttcgcgcgtgaaaaaggcgtacaaaatgtccacacccgcctgaatttcgtccgccacagagatcccggcgcactcgttacctattccggcgcagccgtgttaaaatcctcccaaaacaaggatgaggcgaaaaaattcgtcgccttcctcgccagcaaggaaggacagcgtgccctgaccgccgtccgtgccgaatatcctttgaatccgcacgtggtatccaccttcaatttggaacccatcgccaagttggaagcaccccaagtgtccgccaccactgtttccgaaaaagaacacgccacccggctgcttgagcaagccggtatgaaataa

SEQ ID NO: 37193 - DNA, 741 bp, Neisseria meningitidis
atgttaagcgcgcgttacctccacctgcacgaagccttgggtttgggcccgatgtggttgaagcggggagccgtcgtcctgccgcccgcaacattgccggaaagcccgacacaaatccgcccgcaaaagcaaaccatcctcagcattccgcagcgtccgtccgaacagcataccggtcaggcacggctcaaaaccatgaaagcgttggaaacagccgccgtacctacgcgcaaacccgtgcctgaaaccgaaacgcctctgcccggcgtttcagacggcatcgcccccgttcctgctgcttcgggcattaccagactcgccgtcgtcagcctgtgtccgccaatcgaggatgcggtttacgggcaactgttccacggcaaagcgggcatcctgctcgacaacatcctcaaagccgtaggactggatgccgcttatgtccacaaaacctgttgggtgaaaaccgccgccgtcggcaacccgatgccgtctgaacaggctatcgagaatgcgctgggtcaaatcatcagggaactcgacggctgccgcgcccccgccgtccttttcctcgggcaggcttttgtcaaaccggaacggcaaacgatgattgaaaccttgtgcggctgccgtcccttcttcatcatcgaccatcccgcccggcttttacgccaacccgaactcaaagcccgaaactggcaggtgttgaaacagttgaaacgcgccttgcaggcaggcggcagttga

SEQ ID NO: 37194 - DNA, 777 bp, Neisseria meningitidis
atgcgcgcagtccccccgccccatatctccatcacaggcctaggttacctcggcctgccgctggcacaaaagttttaccaacacggcagccgcgtttccgccgtcaaacgcagcctgacttcggacgacatcaacctgcccatacacctcgacaccatcgacctcggcagcaccgatgcctttcagacggcattgtggcggcaccacgccgacaaacccgtctggttcttcctgctgccgccatcctcactgacccattacgccgacaccgtcaaacaatgggcagaacttgcccggacgtgtaacgtgcaacacctgattttcacaagcagcaccagcgtttacggcgatacagcgcgcgaatgcgacgaaaccgccacacccgatccgcaaaccgagtccgcccgccaaatcctcgccgccgaacaacacctgctcgacagcggcgtgccgaacatcgacatcctgcggctgggcgggctttattgcgccgaacgccatcccgtcggccgccttgttcaaaagcaaaacatcccgggcggcaaccgccccatcaacatcgtccaccgtaatatcgccgtcgaaagcctgtttcagacggcatttaaccccggcggcaggcggctgaaaaacattatcgaaccgcgccacccgacacgacgcgaattctatacggaagaagccgccaaactcggcttgccggctcctgatttcgcacccgacgacagcgtgggcaaaatcatccgtaccgtttgcgataacggcttaagcctgtaa

SEQ ID NO: 37195 - DNA, 840 bp, Neisseria meningitidis
atgctggtcgcttttttaattatgttgcgcgagggtatcgaagccgcgctcatcgtcggcatcgttgccggttttctgaaacagtccggacattccaaactgatgcctaaggtctggttcggggtcgtccttgcttctttgatgtgtttgggcatcggatacggcatccattcggcaacgggcgagattccccagaagcagcaggagttcgtcgtcggcattatcggtttggttgctgtcgcgatgctgacttatatgattttatggatgaaaaaggcggcgcgttcgatgaagcggcagcttcaggattctgtacaggcggctttgaaccgtggcagcggtcaaggatgggccttggtcggtatggcgtttcttgccgtggcgcgcgaaggtttggagagcgtttttttcctgcttgccgtattcaaacagagcccgacgtggcagatgccggccggtgcggtagcgggggttttggctgccgccgtgattggcgcgttgatttatcagggtgggatgcgcctgaatctggctaagtttttccgttggacgggggcgtttttgattgtcgttgccgccggcctgcttgccggctcgctgcgcgcgctgcacgaaccaggtatttggaacgcgcttcaggacattgtgttcgactcatcaaaatatttgcacgaagacagtccgttaggtgtgctgctcggcggatttttcggctataccgaccatccgacgcagggcgaggccttggtttggctgctgtaccttattcccgtcatgacttggtttttgtgcggcagcaggccgtctgaaactttaacccgtaaagaggagctgaaatga

SEQ ID NO: 37196 - DNA, 594 bp, Neisseria meningitidis
atgcgcaaacagaacactttgacgggaatcccgacttctgacggacagagggggtttgcactgtttatcgtgctgatggtgatgatcgtcgtggcttttttggttgtaactgccgcgcagtcttacaataccgagcagcggatcagtgccaacgaatcagacaggaaattggctttgtctttggccgaggcggctttgcgggaaggcgaacttcaggttttggatttggaatatgatacggacagtaaggttacatttagcgaaaactgtggaaaaggtctgtgtgccgcagtgaatgtgcggacaaataatgataatgaagaggcttttgacaatatcgtggtgcaaggcaagcccaccgttgaggcggtgaagcgttcttgcactgcaaattctaccaacctgtgcattgacaataaagggacggaatataagaaaggcacgcaaagcgtcagcaaaatgccacgttatattatcgaatatttgggcgtgaagaacggagaaaatgtttatcgggttactgccaaggcttggggtaagaatgccaataccgtggtcgtccttcaatcttatgtaagcaataatgatgagtaa

SEQ ID NO: 37197 - DNA, 1068 bp, Neisseria meningitidis
atgagaaaaatccttgttaccggcggtgcgggctttatcggctctgccgttgtccgtcatattatccgaaacacccaagattccgtcgtcaacctcgacaaactgacctacgcgggcaatctcgaatcgctgaccgacattgccgataatccccgctatgctttcgagcaagtggacatttgcgaccgcgccgaactcgaccgcgtattcgcacaacaccggcccgatgccgtgatgcacttggcggcggaaagccatgtcgaccgctctatcggttcggcaggcgagtttatccaaaccaatatcgtcggcacattcaatctgcttgaagcagcccgcgcctaccggcaacaaatgccgtctgaacagcacgaagccttccgtttccaccatatttccaccgatgaagtctatggcgatttaggcggcacggacgatttgtttaccgaaaccgcgccctacgcgccgtccagcccctactctgcctctaaagcgtccagcgaccacctcgtccgcgcgtggttgcgtacttacggcttgccgaccattgtaaccaactgctccaacaactacggtccttaccattttccggaaaaactcattcctttgatgattctgaacgcgcttgacggcaaaccgctgcctgtgtacggcgacggtatgcaaatccgcgactggctgtttgtcgaagaccacgcgcgcgcgctgtatcaggttgttaccgaaggtgttgtcggcgaaacctacaatatcggcggccacaatgaaaaagccaatattgaagtcgtcaaaaccatctgcgccctgctggaagaactcgctcccgaaaaaccggccggtgtggcgcgttatgaagatttgattactttcgtacaagaccgccccggccatgacgtgcgctacgccattgatgcagccaaaatcagtagggaactaggctggaaaccgcaggaaaccttcgagtccggcctccgcaaaaccgtgcaatggtatctggacaacaaaacctggtggcaaaatgtattgaacggcagctatcgtttggaacgtttaggtactggaaaatag

SEQ ID NO: 37198 - DNA, 966 bp, Neisseria meningitidis
atgagctacacgcaactgacccaaggcgaacgataccacatccaatacctgtcccgccactgcaccgtcaccgaaatcgccaaacagcttaaccgccacaaaagcaccatcagccgcgaaatcagacggcaccgcacccaagggcagcaatacagcgccgaaaaagcccagcggcaaagccggactatcaaacagcgtaagcgacaaccctataagctcgattcgcagctgattcagcacatcgacacccttatccgccgcaaactcagtcccgaacaagtatgcgcctacctgcgcaaacaccaccggatcacgctccaccacagcaccatttaccgctaccttcgccaagacaaaagcaacggcagcacgttgtggcaacatctcagaatatgcagcaaaccctaccgcaaacgctacggcagcacatggaccagaggcaaagtacccaaccgtgtcagcatagaaaaccgacccgctatcgtcgaccagaaatcccgtatcggcgattgggaagccgacaccattgtcggcaaaggacagaaaagcgcattattgaccttggtcgaacgcgttacccgctacaccatcatctgcaaattggatagcctcaaagccgaagacactgcccgggcagctgttagggcattaaaggcacataaagacagggtgcacaccattaccatggataacggcaaagagttctaccaacacaccaaaataaccaaagcattgaaagcggagacttatttttgtcgcccttaccattcttgggagaaagggctgaatgagaacaccaacggactcatccggcaatacttccccaaacaaaccgatttccgtaacatcagtgatcgggagatacgcagggttcaagatgagttgaaccaccgaccaagaaaaacacttggctacgaaacgccaagtgttttattcttgaatctgttccaaccactaatacactag

SEQ ID NO: 37199 - DNA, 1008 bp, Neisseria meningitidis
atgagcaccttctttcagcaaaccgcacaagccatgattgccaaacacatcgaccgcttcccactattgaagctagatcaagtgattgattggcaaccgatcgaacaatacctgaaccgtcaaagaatccgttacctccgagaccaccgcggccgtcccgcctatccgctgctatccatgttcaaaaccgtcctgctcggacaatggcacagcctctccgatcccgaactcgaacacagcctcatcacccgcatcgatttcaacctgttttgccgttttgacgaactgagcatccccgattacagcaccttatgccgctaccgcaactggctggcgcaagacgataccctgtccgaattgctcaaactgatcaaccgccaactgaccgaaaaaggtttaaaaatagagaaagcatccgccgccgtcgttgacgccaccattattcagaccgccggcagcaaacagcgtcaggccatagaagtcgatgaagaaggacaaatcaacggccaaaccacaccgagtaaagacaaagatgcccgttggatcaagaaaaacggcctctacaaactcggttacaaacaacatacccgtaccgatgcggaaggctatatcgagaaactgcacattactcccgccaatgcccatgagtgcaaacacctgtcgcctttgctggaagggatagccgaaggtacgaccgtctatgccgacaaaggctatgacagtgcggaaaaccggcaacatctggaagaacatcagttgctggacggcattatgcgcaaagcctgccgcaaccgtccgctgtcggaagcgcaaaccaaacgcaaccgatatttgtcgaagccccgttatgtggtcgaacaaagcttcggtacgctgcaccgtaaattccgctacgctcgggcagcctatttcggactgattaaagtgagtgcgcaaagccacctgaaggcgatgtgtttgaacctgttgaaagcggccaacaggctaagtgcgcccgctgccgcctaa

SEQ ID NO: 37200 - DNA, 600 bp, Neisseria meningitidis
atgaacaatttaatcaaaatcaacctcctcccctacagggaagagatgaacaagcgcaaacagcagcagtttaaaacgctgatgtacggtgccgtgctgacgggcgttgccgccgttgcggcaacctacctgtttatcgacaatatgatcaataaccagtcggaaagaaacacgctgctggaaacctccatcgcacacttggataccgagctgtcggaaatacaaaagctcaaacaggaaaaagatgccttcctgattaagaaaaacaaaatcgaggagctccagctcaaacgcctccaagccgcaaaaatcctcgacagcctgaatgaggccgtccccggaagcacctacctgacctcgctggatgccgttaccgccgactcttatcggctcagcggcaggacatccagcgacaaccgcgttgccgccatgatgagggcgatgcccaataccggcatattcaagcaacccgaattgttaagcatcaagaaaaacaattcgcatcaagaatttacccttcaggcaacattacaacccatcgtaaaggcggccgaatccaaagagaatccggcttcgggaaacgcacaggaggcaaactga

SEQ ID NO: 37201 - DNA, 303 bp, Neisseria meningitidis
atgactctcactaaagcagaactggccgatattttggtagacaaagtcagcaacgtcaccaaaaacgatgccaaagaaatcgtcgaactcttttttgaagaaatccgcagcactttggcaagcggcgaagaaatcaaaatttccggtttcggaaatttccagttgcgcgacaagccgcaacgcccgggtcgtaatcctaaaaccggcgaggaagtgccgattaccgcccgccgcgtggtaactttccatgccagccagaaactcaaaagcatggtggaacactactatgacaaacaacgttga

SEQ ID NO: 37202 - DNA, 372 bp, Neisseria meningitidis
atgaaaccatacaaaatctacacccatcccgccctgccgccccaagccgtcaaacaaggctggtcatggccggggctcttgttcggcacgctgtgggcgtgtttcaaaagaatgtggggtttggggctggggctgacgggcgcgatattcgtgctggcggtgtttgcccaactggtttacggcgacacgcccgccacagactcggcgtttaacgtattgggcttggcggtttccgtctggttcggcgcaaagggcaacagcctttatgcacgccaccttttatcgcgcggctataccgaattgcccgaaacagtccaagccgccaacccccaagccgcattggcgcaatatttcgggcgcggggggcgataa

SEQ ID NO: 37203 - DNA, 990 bp, Neisseria meningitidis
atgaaacagcctgtttttgccgttacttccggcgagcctgccggcatcggccccgatatttgtttggacttggcgtttgcacgcctgccctgccgctgcgcggtattgggcgacaaacacctgttgcgcgcgcgcgccgaagccttgggcaaaagcgtcgtcctgcgcgacttcgatccagaatcaggcggcgcggcatacggcgagctggaagtgctgcacatccctgccgccgaagcggttgaggcgggcaaactcaatcccgccaacgccgcctatgtgctgcaacttttggacaccgcgctcgcaggcatttcagacggcattttcgacggcatcgttaccgcgccgctgcacaaaggcatcatcaacgacgcgcgcgcaagcacaggttttttcagcggacacaccgaatatctggcggaaaaaagcggcacggggcaggtcgtgatgatgcttgccggcaaaggcctgcgcgtcgccctcgtaacgacccacctgccgctgaaagacgttgccgccgccatcacgcaaccgctgattgaaagcgtcgcacgcattttgcatcacgacttaaaacacaaattctgcatcaaaaatcccaaaatcctggtcgccggactcaacccccacgccggtgagggcggacacctcggacacgaagaaaccgacaccattatccccgcgctcgaaaacctgcgccgcgaaaggataaacctcgccggcccgtatccggcggacacattgttccaaccgtttatgctcgaaggtgcggatgccgtattggcgatgtaccacgaccaagggctgcccgtgttgaaataccacagtttcgggcagggcgtgaacatcacactggggctgccctttatccgcacctccgtcgatcacggcaccgcgctcgatttggcggcaaccggcagggcggattccggcagcctgataactgccgtggagaccgccgtcgagatggcgcgcggcagcctttaa

SEQ ID NO: 37204 - DNA, 1338 bp, Neisseria meningitidis
atgactttccaaaacaaaaaaatcctcgtcgccggacttggcggcacgggtatttccatgattgcctacctgcgcaaaaacggcgtggaggttgccgcttatgatgcggagttgaagcccgagcgcgtggcgcaaatcggtaagatgtttgacgggctggtgttttacacaggccgtctgaaagatgcgctggacaacggttttgatattctggcgctcagccccggcatcagcgagcggcagccggatatcgaggcgttcaagcaaaacggcgggcgcgtgttgggtgatatcgaattgctggcggatattgtgaaccgccgaggcgacaaggtgattgcgattaccggcagcaacggcaaaaccacggtaacgagcctggtcggctatctctgcatcaagtgcgggctggataccgttatcgcgggcaatatcggcacgccggttttggaggcggaatggcagcgcgaaggcaaaaaggcggacgtgtgggtgttggagctttccagcttccaactggaaaacaccgaaagcctgcgcccgactgcggcgacggtgctgaacatttccgaagaccatctcgaccgctacgacgacttgctcgactatgcgcataccaaggataagattttccgtggcgatggcgtgcaggttttgaatgcggacgatgcgttctgtcgtgcgatgaagcgcgccgggcgcgaggtgaaatggttttcgttggaatacgaagccgatttttggttggaacgtgagacaggtcgcctgaaacaaggcaatgaagatttgattgccacgcaagatattccgctgcaaggcttgcacaacgccactaacgtgatggctgccgttgccttgtgcgaagccgtcggtttgccgcgcgaagcattgctcgaacacgtcaaaacctttcaaggcctgccgcaccgcgtggaaaaaatcggcgagaaaaatggcgtggtgttcatcgacgacagcaaaggcacgaacgtcggcgcgacagccgccgcgattgccggtttgcaaaatccgctattcgtcattttgggcggcatgggcaaagggcaggacttcacgcccctgcgcgacgcgcttgccggcaaggcaaaaggcgtgttcctgattggtgtcgatgcgctgcaaatccgccgcgatttggacggctgcgatctgaatatgaccgactgcgccactttggaagaagcggttcagaaggcatatgcccaagccgaagcgggcgatatcgtgctgctcagccccgcctgcgcgagcttcgatatgtttaaaggctatgcgcaccgttcggaagtgtttatcggggcgtttaaggctttgtga

SEQ ID NO: 37205 - DNA, 432 bp, Neisseria meningitidis
atgagcagcaacgcatggctgttttgggcattggcatcggcaggcttcgcctcattgaccgccatcttcgccaaaatgggtttacagggtatagattcagatttcgctaccttcatccgcaccttggtcatcctcgccgctttgttattgtttttaacctacaccggcaaatggcagggcgtgaacggctttacggggcacaactggacattccttatcctatccggccttgctaccggcgcatcttggcttgcctacttcaaagccctgcaactgggtaacgcctcgcaagtcgcccccgtcgacaaattcagcctggtcttggtcgcgctgatggcggtggttttcttggacgaacgcccgaacacgcaggaatggataggcttggggctggtaacggcgggcgtgttggtgctggcgttgaaacgttaa

SEQ ID NO: 37206 - DNA, 696 bp, Neisseria meningitidis
atgaaagcgatgatactggcggcaggacgcggcgagcgtatgcgccctttgaccgataccactccgaagccgctgctcgatgtggcgggtaagcctctaatcggttggcacctatgccgtctgaagcaggcggggtttaccgaaatcgtcatcaaccacgcttggctgggccggcagatagaagatgctttgggcgacggctcggcttatggcgtgaacatcgcctattcgcccgaacccgcaggcggtttggaaacggcaggcggcatcgcgcaggcattgccgctgttgggtgggcagccgtttttggtggtcaacggcgacgtgctgaccgacatcgattttaccgccgcgtttcaggcggcatcgtccctgccggaacatatttccgcccatctgtggctggtggaaaatccgccgcacaaccccgacggcgatttttccctgctgcccgacggcagcgtgcggccggaagtaaatggcggcaacggattgacattcagcggcgtgggtatttaccgtcctgaaatgtttgacggaatcgaagcgggcagtgtggcgaaactcgcgcccgtattgcgtggcgaaatgcggcaaaaccgcgtgagcggtcagaagcatacgggcttgtggctggatgtcggcacggtatgccgtctgaaagaggctcaagcccttgcaggggcttggaagtaa

SEQ ID NO: 37207 - DNA, 2745 bp, Neisseria meningitidis
atgcaacagcaacatttgttccgattaaatattttatgcctgtcgctgatgactgcgctgcctgcttatgcagaaaatgtgcaagccggacaagcacaggaaaaacagttggataccatacaggtaaaagccaaaaaacagaaaacccgccgcgataacgaagtaaccgggctgggcaagttggtcaagtcttccgatacgctaagtaaagaacaggttttgaatatccgagacctgacccgttatgatccgggtattgccgtggtcgaacagggtcggggcgcaagttccggctattcaatacgcggcatggataaaaaccgcgtttccttaacggtggacggcgtttcgcaaatacagtcctacaccgcgcaggcggcattgggcgggacgaggacggcgggcagcagcggcgcaatcaatgaaatcgagtatgaaaacgtcaaagctgtcgaaatcagcaaaggctcaaactcggtcgaacaaggcagcggcgcattggcgggctcggtcgcatttcaaaccaaaaccgccgacgatgttatcggggaaggcaggcagtggggcattcagagtaaaaccgcctattccggcaaaaaccgggggcttacccaatccatcgcgctggcggggcgcatcggcggtgcggaggctttgctgatccacaccgggcggcgcgcgggggaaatccgcgcccacgaagatgcaggacgcggcgttcagagctttaacaggctggtgccggttgaggataccaatcagtacgctcatttcgtggtcgaagaagaatgccctaatggatatgcggcttgtaaagacaaaccgaaaaaagatgttgtcggcaaagacgaacgtcaaacggtttctacccgagactacacgggtcccaaccgcttcctcgccgatccgctttcatacgaaagccggtcgtggttgttccgcccgggttttcgttttgaaaacaaacggcactacatcggcggcatactcgaacacacgcaacaaactttcgacacgcgcgatatgacggttccggcattcctgaccaaggcggtttttgatgcaaattcaaaacaggcgggttctttgcccggtaacggcaaatacgtgggcaaccacaaatacggcggtctgtttaccaacggtgaaaacggtgcgctggtgggcgcggaatacggtacgggcgtgttttacgacgagacgcacaccaaaagccgctacggtttggaatatgtctataccaatgccgataaagacacttgggcggattatgcccgcctctcttacgaccgtcagggcatcggtttggacaatcattttcagcagacgcactgttctgccgacggttcggacaaatattgccgtccgagtgccgacaagccgttttcctactacaaatccgaccgcgtgatttacggggaaagccacaggctcttgcaggcggcattcaaaaaatccttcgataccgccaaaatccgccacaacctgagcgtgaatctcgggtttgaccgctttggctctaatctgagccatcaggattattattatcaaaatgccaaccgcgcctattcgtcgaaaacgccccctaaaaacggcaataaaaacatcagccccaacggcagcaaggaaaaaccctattgggtcagcataggcgggggaaatgtggttacggagcaaatctgccgcttgggcaacaatacttatacggactgcacgccgcgcagcatcaacggcaaaagctattacgcggcagttcgggacaatgtccgtttgggcaggtgggcggatgtcggcgcggggttgcgctacgactaccgcagtacgcattcggacgacggcagcgtttccaccggcacgcaccgtaccctgtcctggaacgccggcatcgtcctcaaacctgccgactggctggatttgacttaccgcacttcaaccggcttccgcctgccctcgtttgcggaaatgtacggctggcgggcgggtgttcaaagcaaggcggtcaaaatcgatccggaaaaatcgttcaacaaagaagccggcatcgtgtttaaaggcgatttcggcaacttggaggcaagttggttcaataatgcctaccgcgatttgattgtccggggttatgaagcgcaaattaaaaacggcaaagaagaagccaaaggcgacccggcttacctcaatgcccaaagcgcgcggattaccggcatcaatattttgggcaaaatcgattggaacggcgtatgggataaattgcccgaaggttggtattctacatttgcctataatcgtgtccatgtccgcgacatcaaaaaacgcgcagaccgcaccgatattcaatcacacctgtttgatgccatccaaccctcgcgctatgtcgtcggcttgggctatgaccaaccggaaggcaaatggggtgtgaacggtatgctgacttattccaaagccaaggaaatcacagagttgttgggcagccgggctttgctcaacggcaacagccgcaatacaaaagccaccgcgcgccgtacccgcccttggtatattgtggatgtgtccggttattacacgattaaaaaacacttcaccctccgtgcgggcgtgtacaaccttctcaactaccgctatgttacttgggaaaatgtgcggcaaactgccggcggcgcagtcaaccaacacaaaaatgtcggcgtttacaaccgatatgccgcccccggccgaaactacacatttagcttggaaatgaagttttaa

SEQ ID NO: 37208 - DNA, 855 bp, Neisseria meningitidis
atgccgcccatccctgccccatctgcaccatccgagcacaccgtcgcatgggtattcggtcaacccgttaccgatttgccgcaggatttgtttatcccgcccgacgcgctgaaagtcgtattgggcagttttcaaggccctttggatctactgctgtatctgatccgcaagcagaacatcgatgttctcgatattccgatggtgaagattaccgagcagtatctgcactacatcgcccaaatagaagcctatcagtttgatttggcggcggaatatcttttgatggcagcaatgctgattgaaatcaaatcgcgcctgctgctgccgcgtaccgaagccgtcgaagacgaagaagccgacccgcgtgccgagttggtgcgccgcctgttggcttatgaacagatgaagctggcggcacaagggttggatgcgcttcctcgtgcgggccgggatttcgcatgggcgtacctacctctggaaattgccgtcgaagccaagctgcccgaagtctatattaccgacttgacgcaagcgtggctgggtattttgtctcgggcaaaacatacgcgcagccacgaagttatcaaagaaaccatctccgtgcgcgcgcaaatgacggcaatcctgcgccgtttgaacggacacgggatatgcaggtttcacgacctgttcaatcccgaacagggcgcggcttacgtggtcgtcaacttcatctcactgttggagcttgccaaagaaggattggtcagaatcgtgcaggaagtcggtttcggagaaatccgaatcagcctcaatcatgagggggcgcattcagacggcatttccggcacacggggcgggcgcgatgtgttctaa

SEQ ID NO: 37209 - DNA, 390 bp, Neisseria meningitidis
atgttatataaatgtaaaatcaaaaagttagataacaccattgaagaggcagtattgattgaaataaatggttatgaactacattgttttatatcgtactgcccattcaaaatatttgaaaatcaattttatgaagtggaattatcctatgaaatctttaatgattacatactggataaatcaacttcaaatattggatttagaaaaatagatgatagtttcaagtatgaaataacggcagaattaaaaaataatcatctaaccctacaaaatatacaatttgaagaagatgagtatttaataaactactcttatcttgataattgtttggttacattaacggttgatagaataagtgtttcatttattagagaaattcaggcagcctga

SEQ ID NO: 37210 - DNA, 390 bp, Neisseria meningitidis
atgagcacgcacgagaaacttttaaccgccgacaaccccatcttgcgccaacgcgccaaagccatgcgccaagaaatgagcggggcggaagcaaaattgtggcagcacctgcgggcaggtcgtctgaacggctataaattccgccgccagcagccgatgggaaactatattgttgattttatgtgcgtaacgcccaagttgattgtcgaagcagacggagggcagcacacagaacaagccgcatacgaccacgcgcggacggcatatctcaacagcttgggctttaccgtactgcggttttggaatcacgagattttacagcagacaaacgatgtgctgacagaaatcctgctcgtgttgcaagaattggaaaagcaagctgcacgatag

SEQ ID NO: 37211 - DNA, 1170 bp, Neisseria meningitidis
atgaatttgttccccggcggcttcaataatctgaatcccaactttatcccgctggcggcggttgccgcgcaagatgcggtgcaacgcgcctgtgaaacggcgaaatccgtattgattattcccgaaaaccacacgcgcaatatgttttacctgcaaaacgtttacgccctcggcgagattttgtgttcggcagggtatgaagtgcgcttgggcagcctgaatccggaagtaaccgaaccgaccgaatttgaaaccgcattgggcgacaaaatcctgttggaacctttattgcgtacccgcgaccgcgtccatcttgcagacggcttttcgccttgcgtggttttgttgaacaacgatttgtccgccggtattcccgacatcctcaaaggcatcagccaaaccgttttgccgccgttgcacggcggttggacgacgcgccgcaaaacaaatcatttcggcgcgtacaaccaagttgccgccgaatttgccaagttaatcggcatcgacgaatggcaaattaacccttattttgaaaaaatcggcggtttggacttccaagggcgtgaaggcgaagacgcgttggcggaggcggtagaacgtgtgctggcgaaaattcaagccaaatacgacgaatcgggcattaccgacaaacctttcgtcatcgtcaaagccgatgccggcacttacggcatgggcgtgatgagcgtcaaatccgccgacgaagtgcgcggattgaaccgtaaaaaccgcaataaaatggcgaaagtcaaagaaggtttggaagtcagcgaagtgattgtccaagaagggatttatacttatgaaaccttaaacggcgcggtgtgcgaacccgtcgtgtatatgatggaccgcttcgtcatcggcggctttttccgcgtacacgaagggcgcggtgcggacgaaaacctcaacgccggcggtatggtgtttgttccgctgtccaacagcatccccaccggcaacggcgacaactcccaagaagctcccgaagcctgcaagcgcgtattcgaacaatgggactcgctgggtatgccgcgctctgaaaaagactgcgacgtggacaacgaacacaaccgcctctacgtttacggcgtaatggcacgcctgtcgcttctggcggcgtccatcgagttggaagaaacggcgtaa

SEQ ID NO: 37212 - DNA, 1815 bp, Neisseria meningitidis
atgcccgctgaaacgaccgtatccggtgcgcgccccgccgccaaactgccgatttacatcctgccctgcttcctttggataggcatcgtcccctttaccttcgcgctcaggcagcaaccgtcgcccgacttttaccacgatgctgcagccgcagccggcctgattgtcctgttgttcctcacggcaggaaaaaagctgtttgatgtcaaaatcccacccatcagcttccttctgtttgcaatggcggcgttttggtatcttcaggcacgcctgatgaacctgatttaccccggtatgaacgacatcgtctcttggattttcatcttgctcgccgtcagcgcgtgggcctgcaagagtttggtcgcacacttcggacaagaacgcatcgtgaccctgtttgcctggtcgctgcttatcggctccctgcttcaatcctgcatcgtcgtcatccagtttgccggctgggaagacacccccatgcttcaaaacattattgtttacagcgggcaaggcgtaatcggacacatcgggcagcgcaacaacctcggacactacctgatgtggggcatactcgccgccgcctacctcaacggacaacgaaaaatccccgccgccctcggcgcaatctgcctgattatgcagaccgccgttttaggtttggtcaattcgcgcaccatcttgacctacatagccgccatcgccctcatccttcccttctggtatttccgttcggacaaatccaacaggcggacgatgctcggcatagccgcagccgtattccttaccgcgctgttccaattttccatgaacaccattctggaaccctttaccggcatccgctacgaaactgccgtcgaacgcgttgccaacggcggtttcacagacttgccgcgccaaatcgaatggaataaagcccttgccgccttccagtccgccccgatattcgggcacggctggaacagttttgcccaacaaaccttcctcatcaatgccgaacagcacaacatatacgacaacctcctcagcaacttgttcacccattcccacaacatcgtcctccaactccttgcagagatgggaatcagcggcacgcttctggttgccgcaaccctgctgacgggcattgccgggctgcttaaacgccccctgacccccgcatcgcttttcctaatctgcacgcttgccgtcagtatgtgccacagtatgctcgaatatcctttgtggtatgtctatttcctcatccctttcggactgatgctcttcctgtcccccgcagaggcttcagacggcatcgccttcaaaaaagccgccaatctcggcatactgaccgcctccgccgccatattcgcaggattgctgcacttggactggacatacacccggctggttaacgccttttcccccgccactgacgacagtgccaaaaccctcaaccggaaaatcaacgagttgcgctatatttccgcaaacagtccgatgctgtccttttatgccgacttctccctcgtaaacttcgccctgccggaataccccgaaacccagacttgggcggaagaagcaaccctcaaatcactaaaataccgcccccactccgccacctaccgcatcgccctctacctgatgcggcaaggcaaagttgcagaagcaaaacaatggatgcgggcgacacagtcctattacccctacctgatgccccgatacgccgacgaaatccgcaaactgcccgtatgggcaccgctgctacccgaactgctcaaagactgcaaagccttcgccgccgcgcccggtcatccggaagcaaaaccctgcaaatga

SEQ ID NO: 37213 - DNA, 759 bp, Neisseria meningitidis
atgccttgcctggccgtggttttggtcggaggcgaccctgccagcgcggtttatgtccgcaacaagaaaactgcctgccaaaaatgcggcatcaaatcactgtcttacgagctgcccgaatcaacatcgcaggaagaactgctggcactggtcgaccgcctgaatgccgattccgaagtggacggtattctggttcagctaccgctgccgaagcacctcgacagccaggcggttttggaacgtatttcgccggataaggacgtggacggcttccatccttacaatgtcggcaggctggcggtcaaaatgccgctgatgcgcccgtgtacgcccaagggcgtgatgacgcttttggaagcttacggcattgatccgaaggggaaaaaagcggtcgtggtcggcgcgtcgaatatcgtcggccgcccgcaggctttggaactgctgctggcgcgcgcaacggtaacggtctgccacagcgcaaccgaaaatctggcagacgaggttgccggagccgatattttggtggtcggcgtgggcattccgaactttgtcaaaggcgaatggatcaaacccggcgcggtcgttatcgatgtgggcatcaaccgtttggacgacggcagcctgtgcggcgacgtggaatttgaaacggcaaaagaacgggcggcgatgattacgcccgttcccggcggcgtgggtccgatgacgattgccacattgatggaaaacaccctgcacgcggcttcactgcacgatgcttga

SEQ ID NO: 37214 - DNA, 2529 bp, Neisseria meningitidis
ttgtgccaccgcaccaaacacagacgaaaccgaaatgccatgaaaaaaacctgtttccactgcgggctggacgttcccgaaaacctgcatctgaccgtccgttacgaaaatgaagaccgcgaaacctgctgcgccggttgtcaggcggtcgcacaaagcattattgacgcgggcttgggcagttattacaaacaacgcaccgccgacgcgcaaaaaaccgagctgccgccccaagaaatcctcgaccaaatccgcctgtacgacctgcccgaagtccagtccgactttgtggaaacccacggcggcacgcgcgaggcggttttaatgctcggcggcatcacctgcgccgcctgcgtctggctgatcgaacagcagcttttgcgtacagacggcatcgtccgcatcgacctcaattacagcacgcaccgctgccgcgtcgtctgggacgacggcaaaatccgcctttccgacattctgttgaaaatcaggcagataggctacaccgccgcaccctatgacgcgcaaaaaatcgaagccgccaaccaaaaagaacgcaaacaatacatcgtccgcctcgccgttgccgggctggggatgatgcagacgatgatgttcgcgctgccgacctacctttacggcggcgacatcgaacccgatttcctgcaaatcctccattggggcggctttttaatggtgctgcccgtcgtattctattgcgccgtcccgttttatcaaggcgcgttgcgcgacctgaaaaaccgccgcgccggcatggatacgccgattgccgtcgccatcatcatgacctttatcgccggcgtttacagccttgcgaccaatgcggggcaggggatgtatttcgaatccatagccatgctgctgtttttcctgctgggcggacgctttatggaacacattgcccgccgtaaggcaggcgatgccgccgagaggctggtgaagctgattcctgcgttttgccatcatatgcccgattaccccgatacgcaggaaacctgcgaggcagctgtcgtcaagttgaaggcgggcgatatcgtgctggtcaaaccgggcgaaaccatccccattgacggcacggtgctggaaggcgcaagcacggttgacgaatctatgctgaccggcgagagcctgcccgtcgccaaaatgccgtctgaaaaagtaaccgcaggtacactcaacacgcaaaaccctctgattatacgcaccgaccgcaccggcggcggcacgcgactgtcgcacatcgtccgcctgctcgaccgcgccttagcgcaaaaaccgcgcactgccgagttggcggaacaatacgcctcgtctttcatattcggcgaactcctgcttgccgtccccgtcttcatcggctggacgctgtacgccgacgcgcacaccgcattgtggattaccgtcgccctgctggtcattacctgcccctgcgccttatcgcttgccacgccgaccgcgctggcagcttctaccggtacgctggcgcgcgaaggtattttaatcggcggaaagcaggcaatcgaaaccctcgcccaaaccaccgacatcatcttcgacaaaaccggcacgctgacccaaggcaaacccgccgtccgccgtatctcattgttgagaggcacagacgaagcctttgttctcgcggtggcgcaggctttagaacaacagtccgaacatccccttgcccgcgccatcctcaactgccgcatttcagacggcagcgtccccgacatcgctattaaacaacgcctcaaccgcatcggcgaaggcgtgggcgcgcaactgaccgtcaacggcgaaacacaggtttgggcattgggcagggcatcctatgtcgccgaaatttcaggtaaagaaccgcaaacagaaggcggcggcagcgcggtttacctcggcagtcaaagcggtttccaagccgtgttctacctgaccgaccccttgaaagacagcgcggcggaggcggtgcggcagttggcaggcaaaaacctgaccctgcacatcctcagcggcgaccgcgaaaccgccgttgccgaaaccgcacgcgccctgggtgtcgcgcactaccgcgcccaagccatgcccgaggacaaactggaatacgtcaaagccttgcaaaaagaagggaaaaaagtgctgatgataggcgacggcatcaacgacgcgcccgttttggctcaggcagacgtatccgccgccgcagccggcggaacggacattgcccgggacggtgcggacatcgttctgctcaacgaggatttgaacatcgtgccgcatatgtttgcccaagcccgccgcacgcagcagattatccgccaaaacctgatatgggcgggcgcgtacaatatcattgccgtaccgcttgccgttttgggctatgtccaaccgtggatagccgcactgggtatgagtttcagttcgctggcggttttgggcaacgctttgcgccttcacaaacgggggaaaatgccgtctgaaaaaatgccgtccgaacaatgccggacggcgttgctttag

SEQ ID NO: 37215 - DNA, 2043 bp, Neisseria meningitidis
atgatgtcgcccgaaacccgaaaacagctcaaaatcaccgatgtttccgccaagaagctcgacaaactcaacctccataccgcgtgggatttggtgttgcacctgccgctgcgttacgaggacgagacgcacattatgccgattaaggacgcgccgattggcgtgccgtgtcaggtcgagggggaggttatccatcaggaagtaacgttcaaaccgcgcaagcagctgattgtccaaatcgccgacggctccggcagcgtcctttttctgcgcttcatccacttttacgccagccatcagaaacagacggcggtcggcaaacgcatccgcgccgtgggcgaaatcaaacacggcttttacggcgacgagatgattcatcccaaaatccgcgatgccgagggcggcggtttggcggaaagcctcacgccggtttacccgaccgtaaacggtttgaaccagcccactttgcgccgtattattcagacggcgttggacgttacgccgctgcacgacacgctgcccgatgccctgctgtgccgtctgaagctgccacacctcgccgaaagcctgcgtcttttgcattcgccgccgccgagtttcacgattcatcagctttcagacggcacgctgcctgcatggcaacggctcaaattcgacgaacttttggcgcaacagctttcgatgcgcttggcgcgacagaagcgtatcggcggcacggcggcggcattgggcggcgacggcacattgacccaagccctgcgccaagccctgccgtttgccctgaccgatgcgcaagaaaaagttgtttccgaaatctgccgcgatatggcgcaaacctacccgatgcaccgcctgctgcagggcgatgtcggcagcggcaaaaccattgtggctgctttgtctgctttgacggctatcgaatccggtgcgcaggtggctgtaatggcgcccactgaaatccttgccgaacagcattttattaaatttaaacaatggctcgaacctttgggcattgaagttgtccgcctttttggcagtttgcgtaaaaaagccaaagacgaagccaaagccaaactggctgacggcagcgtcaaaatcgccgtcggcacgcacgccctgttttcagacggcgtggcgtttcacaatttgggcttgaccattgtggacgaacagcaccgtttcggcgttgcccaacgcctcgccctcaaaaacaaagggcgcgaagtccatcagctgatgatgtccgccacgcccatcccgcgcacgcttgcgatgagttttttcgccgatttggacgtgtccgtcatcgacgaattgccgcccgggcgcacaccgattaaaacgcgcctcgtcaacaacgtccgccgtgccgaagtcgaaggcttcgtcctcggcacttgccgaaaagggcggcaggcgtattgggtctgcccattgattgaagaaagcgaaaccctgcaactgcaaaccgccgccgaaaccctcgcccggcttcagacggcattgcccgaactcaatatcggactggtacacgggcgcatgaaggccgccgaaaaggccgaagtgatggcgcggttttcttcgggggggctgaacgtcttggtcgccaccaccgtcatcgaagtcggcgtagatgtgcccaatgccgccctgatggtcatcgaacacgccgagcgcatgggcttggcgcagctgcaccaattacgcggtcgggtcgggcgcggcgcggcagaaagcgtgtgcgtcctcctgtttgccgaacccttgggcgaactcgccaaagcgcggttgaaagtgatttacgaacacaccgacggctttgaaatcgcccgccaagacctcaatatccgcggccccggcgaatttctcggcgcgcgccaaagcggcgtgcctatgctgcgcttcgccaagcttgaagaagacttacaccttttggaacaagtgcgcgaaatcgccccgatgctgattgagcaaaaccccgaaatcgtcgaagcgcatttggcaaggtggctttccggcagggaagggtatttgggcgtgtga

SEQ ID NO: 37216 - DNA, 849 bp, Neisseria meningitidis
atgcttcagacggcattgcgttttccctatgttttcaaagcccgtgcggaagattcgcacaaagggactttcggcacgctcgccgtagtcggcggatcggcagggatgagcggtgcgcccgtattggcggcatcggcggcgatgtatctcggctgcggcaaggtgtgggcgggtttcaatcaggatgcgctaccttttgccgttattgccggttttcccgagattatgctggatacggcagacggtttgagcaagcgtcaagatataaacgcctgggttgtcggttgtggattgggtacaggtagggcggcggtcggaacgcttgccggaattttgacggaacacacggacaagcccgtccttttggatgcggacgcgctgaacatattatcaaccgatgccgaaacccgaaatctggcacgcgggtgtaaaaacctgattttaacgccacaccccgccgaagccgcgcgcctgcttggaacgacggttgcacaggttcaggcggatcggacggcggcagtgaggaagataggggcaattttcggcgcaaccgtggttttaaaggggcacaaaacattggttgccgcgtccgatacggaaatctatgtcaacgaaagtggcaacgcgggattggcaacggcgggcagtggcgacgtattgggcggcatcatcggcagtctgctcgcacagggcgtgccggtttttgaagccgcctgcgcgggcgcgtggctgcacggcgcggcggcggatgtcataaaagaatcggcaggcattgcggcagggctgttggctggcgaaatcgccccggcggcaaggtggctgcgtaaccggataactgaaagtatgtaa

SEQ ID NO: 37217 - DNA, 1065 bp, Neisseria meningitidis
atggaaaaagaattcaggatattaaatatcgtatcggccaagatttggggtgggggcgaacaatatgtctatgatgtttcaaaagcattggggcttcggggctgcacaatgtttaccgccgtcaataaaaataatgagttgatgcacagacgcttttccgaagtttcttccgttttcacgacacgccttcacacgctcaacgggctgttttcgctctgcgcgcttacccgctttatccggaaaaaccgcatttcccacctgatgatacacaccggcaaaattgccgccttatccatacttttgaaaaaactgaccggggtgcgcctgatatttgtcaaacataatgtcgtcgccaacaaaaccgatttttaccaccgcctgatacagaaaaacacagaccgctttatttgcgtttcccgtctggtttacgatgtgcaaaccgccgacaatccctttaaagcaaaataccggattgttcataacggtatcgataccggccgtttccctccctctcaagaaaaacccgacagccgtttttttaccgtcgcctacgccggcaggatcagtccagaaaaaggattggaaaacctgattgaagcctgtgtgatactgcatcggaaatatcctcaaatcaggctcaaattggcaggggacggacatccggattatatgtgccgcctgaagcgggacgtatctgcttcaggagcagaaccatttgtttcttttgaagggtttaccgaaaaacttgcttcgttttaccgccaaagcgatgtcgtggttttgcccagcctcgtcccggaggcattcggtttgtcattatgcgaggcgatgtactgccgaacggcggtgatttccaatactttgggcgcgcaaaaggaaattatcgaacatcatcaatcggggattctactggacaggcttacgcctgaatctttggcggacgaaatcgaacgcctcgtcttaaaccccgaagcaaaaaacgcactggcaacggcaggacatcaatgcgtcgccaaccgttttaccatcaaccataccgccgacaaattattggatgcaatataa

SEQ ID NO: 37218 - DNA, 1497 bp, Neisseria meningitidis
gtgcatcttgcacaaactgaaagaccgagcattatgcgtatcgtagaaaaagcctatactttcgacgatgttttgttggttcccgcacattcgactgtgctgccgcgagacgttaaacttcaaaccaagctcacccgcgaaatcacactcaacctccccctgctttccgccgcgatggacactgttaccgaggcgcgcctcgccatttcgatggcacaggaaggcggcatcggcatcatccataaaaatatgccgcccgaaatgcaggcgcgcgccgtttccaaagtgaaacgccacgaaagcggcgtggtcaaagaccccgtaaccgttgcgccgacaacgctcatccgcgaagtcttggaaatgcgtgcgcagcgcaaacgcaaaatgtccggcctgcccgtcgttgaaaacggcaaagtcgtcggcatcgtaaccaaccgcgacctgcgttttgaaaaccgcgtcgatttgcccgtttccgccattatgaccccgcgcgaacgtctggttaccgtccccgaaggcacaagcatagacgaagcgcgcgaactgatgcacacgcacaaagtcgagcgcgttttggttctgaacgaaaaagacgagcttaagggcttgattaccgtcaaagatattttaaaaaccaccgagtttcccaatgccaacaaagactccgaaggccgtctgcgcgtcggtgcggcagtcggcaccggcggcgataccgaagaacgcgtcaaagccttggtagaagcaggagtcgatgtcatcgtcgtcgataccgcacacgggcatagccaaggcgtaatcgatcgcgttcgctgggtcaaagaaacttatccgcacatccaagtcatcggcggcaacatcgccaccgccaaagccgcattggatttggtcgccgccggcgcggatgccgtcaaagtcggtatcggtccgggatcgatttgcaccacccgtatcgtggcaggcgtgggcgtgccgcaactgaccgccattcacaacgttgccgaagccctcaaaggcacgggcgttccgctgattgccgacggcggcatccgcttctccggcgacatcgccaaagccctcgccgcaggcgcgtacagcgtcatgctcggcggtatgtttgccggcacggaagaagcaccgggcgaaatcgaactctaccaaggccgctcgtacaaatcctatcgcggtatgggttccttgggcgcgatgagccaaggttctgccgaccgctacttccaagacaaaaccgacagcaccgacaaatacgtccccgaaggcatcgaaggccgcgttccctacaaaggcccgattgtgaacatcatccaccaactgaccggcggactgcgctccagcatggggtatttgggttgcgccaatattgccgaaatgcacgaaaaagcagaatttgtggaaatcacttccgcaggtatgagcgaatcgcacgttcacgacgttcaaattaccaaagaagcaccgaactaccatcgctga

SEQ ID NO: 37219 - DNA, 1134 bp, Neisseria meningitidis
atgtttaaaaaattcaaaccggtactgttgtcattttttgcacttgtatttgccttttggctgggaacgggtattgcctatgagattaatccgcgttggtttttgagcgatacggcaactgaaatacctgaaaatccgaatgcttttgtggcgaaacttgcccgcctgttccgaaatgccgacagggcggttgtcatcgtgaaggaatcgatgaggacggaggaaagtcttgccggagctgtggatgacggtccgttgcagtcggagaaggattatctcgcgctcgctatccggctcagtcgtttgaaagaaaaggcgaaatggtttcacgtaacggagcaggaacatgggaaagaggtttggctggattaccatatcggcgagggcggtttggttgcggtttcgctttcgcaacgctcgccggaagcgtttgttaatgccgaatatctgtatcggaacgatcgtccgttttctgtaaatgtgtacggcggaacggctcacggagaaaattatgaaacgacaggagaatatcgggttgtttggcaaccggacggttcggtatttgatgcgtcggggcgcggaaaaatcggggaagatgtttatgagcattgcctcgggtgttatcagatggcccaggtatatttggcgaaataccgggatgtcgcgaatgacgagcagaaggtttgggacttccgcgaagagagcaaccggattgcatcggactcgcgcgattctgtgttttatcagaatatgcgggaattgatgccccgggggatgaaggcgaacagtcttgtggtcggctatgatgcggacggtctgccgcaaaaagtctattggagtttcgacaatggaaaaaaacgccagagtttcgaatattatttgaaaaacggaaatctttttattgcacaatcttcgacggtagcattgaaagcggatggcgtaacggcggatatgcagacctatcatgcgcaacagacgtggtatttggatggcgggcggattgtccgcgaagagaaacagggggacagactgcctgattttcctttgaacttggaagatttggaaaaagaggtgagccgttatgcagaggctgcagcgagacgttcgggcggcaggcgcgacctttctcactga

SEQ ID NO: 37220 - DNA, 1272 bp, Neisseria meningitidis
atgcaacagattaaatttattgacttattttccgggatgagcggtatcaggaaaggatttgaacaagcctgtcggaaacagtcggttgcttgcgaatgtgtttttacctcagaaatcaaaccggcagctttggaagtattgaagcaaaactatcctgatgaagtgccgtatggagatataacgaaaattgaaacgggagatattcccgattttgacatcctgttggcaggcttcccttgccaggctttttctttcgccggaaaaagattgggctttgaagatacgcggggaacgcttttctttgatgtagcaaggattttaaaggcaaaaaaaccaaaaggttttattttggaaaatgtggaaggattggtaacgcacgatagaaaagatccgacacaaaaaatagggcgcaccctgaccgttattttggaaaccttggaagcattgggttactatgtttcttggaaagttttaaatgcaaaagatttcggcattccccaaaacaggaagcgcatttatctgacaggcagtttgaaatccaaacccgacttatcttttgaaacaactctaagtccgaaattaaaaaatattttggaatcgggactgcctaccgaaagcagtcctttcatcaaaaaattgctaaaaaaatttcccccgtccgaactgtacggaaaatcagtaaaggacaaacggggagggaaaaacaatatccacagttgggatattgaattaaaaggcacagtaaccgaagaagagaagcaattattaaatatgcttctaaaagaacggaggaagaaaaaatgggcttcagaaatcggcatcgattggatggatgggatgcctttgacaaaagcgcaaatttcaactttctataaacaccccaatcttcaaaatattttggacagcctgacagataaaggctatttggttttggagcatccgaaacaaaaaattggcgggcgaagaatcaaagatgaatccctgcctaagggctacaatatcgtttcaggtaaaaaatcatttgaaatcaataaaatattagacccaaatgatgtcgcgccaaccttagttgcaatggatatggagcaccttttcgtcgttgacaacggcggtttgcgtacacttaccggaaaagaaggtttacgcttattcggctatccggacgattattcgtttgatattcctaaaaaagacaaatacgatttattgggcaataccgttgccgttcctgtgattaaggcggtatctgaaaggcttctgcatactttataa

SEQ ID NO: 37221 - DNA, 1368 bp, Neisseria meningitidis
atgagcaaaaaccaacccgcacaaccgaccaggcgcactctttttaaaaccgcgatcgcagccggagcagtcggcgcaatcggaggttatctcggcggcaaaaaacagggcgaaaccgccgaacgcaccgccgaaagccaacactcgccccaagcctatccctgctacggcgaacatcaggcaggcatcgttacgccgcagcaggcgttttcgattatgtgcgccttcgacgtaaccgcgcaaagtgccaagcagctggaaaacctgttccgcacgctgaccgcccgcatcgagtttctcacccaaggcggcgaataccaagacggcgacgacaaacttccgccagccggcagcggcattttgggcaaagccttcaaccccgacgggttgaccgttaccgtgggggtgggcagcagcctgtttgacggccggttcggactcaaagacaaaaaaccgattcatttgcaggaaatgcgcgacttctccaacgataagctgcaaaaaagctggtgcgacggcgatttgagcctgcaaatctgtgccttcacccccgaaacctgccaagccgccctgcgcgacatcatcaaacacaccgtccaaaccgccgttatccgctggagtatcgacgggtggcagcctaaatccgaacccggcgcgatggcggcgcgcaacctgttgggcttcagggacggcacgggcaaccccaaagtttccgaccccaaaaccgccgacgaggttttgtggacgggtgtggccgccaacagcctcgacgaaccggagtgggcgaaaaacggcagctatcaggcagtccgccttatccgccactttgtcgagttttgggacaggacgccgcttcaagagcaaaccgacattttcgggcggcgcaaatacaacggcgcgccgatggacggcaaaaaagaagccgaccagccggattttgccaaagaccccgagggcaatatcacgcccaaagacagccatatacgcctggcaaacccgcgcgatcccgaattcctcaaaaaacaccgcctcttccgccgcgcctacagctattcgcgcggactcgcctcaagcggacagcttgatgtcgggctggtgttcgtctgctatcaggcaaaccttgccgacggattcatcttcgtgcaaaacctcctcaacggcgaaccgctggaagaatacatcagcccccttcggcggcggctatttcttcgtcttgcccggcgtggaaaaaggcggcttcttgggacaagggctgctgggcgtataaatccgccatataaaaaacgccgtccgaaccttgccaaacgggttcggacggcgtttcttgtttttgggcggtcaggcttttttgacgaattcggattttaa

SEQ ID NO: 37222 - DNA, 822 bp, Neisseria meningitidis
atgtctttgcaaaacattatcgaaaccgcctttgaaaaccgcgcggacattaccccgaccaccgttactcccgaagtcaaagaagccgtgttggaaaccatccgccaactcgattcaggcaaactgcgcgttgccgaacgcttgggcgtgggtgagtggaaagtcaacgaatgggcgaaaaaagccgtgttgctgtccttccgcatccaagacaacgaagtcctcaacgacggcgtgaacaaatacttcgacaaagtgccgaccaagtttgccgactggtctgaagacgagttcaaaaacgcaggcttccgcgccgttccgggtgcggttgcccgacgcggcagctttgtggcgaaaaatgtcgtgctgatgccgtcttacgtcaacatcggcgcatacgtcgacgaaggcgcgatggttgatacttgggcgactgtcggctcttgcgcgcaaatcggtaaaaacgtgcacttgagtggcggcgtcggtatcggcggcgtactcgaacccctgcaggccgcccccaccatcattgaagacaactgcttcatcggtgcgcgttctgaaatcgttgagggcgtgattgtcgaagaaggcagcgtgatttcgatgggcgtgttcatcggtcaatccaccaaaatcttcgaccgcaccaccggcgaaatctaccaaggccgcgtaccgacaggttcggtcgtcgtgtccggcagtatgccttccaaagacggcagccacagcctttactgcgccgtcatcgtcaaacgcgtggacgcgcaaacccgtgcgaaaaccagcgtgaacgaattgttgcgcggcatctga

SEQ ID NO: 37223 - DNA, 1002 bp, Neisseria meningitidis
ttgataatttgggaagcgcatccgccgtccgtcttgttttcgcgccgaccgcaaccatatagccgccatccgaacaatcagtcagagaaaatcatgaatcaaaccgccatcaaccgcgccgatgtgcgtacccgctttatcttcgacgatatgcccgtgcgcgggctgcacgtccgtctggaaaacgtgtggcagcacattgtaaaacagaaaaactatcccgccgccatccgccgcgctttgggtgagttgttggcggcgggtgtgttgctgtcgggcaacctcaaaaacgaaggcacgctgattgtgcaggttcaggggcgggggcggctgaaaatgctggttgcggaagcggcttccgaccgtaccgtccgtgcaaccgcgcgttgggacgaaaccgcagaaatagccgatgacgaaagcctcggcgaccttttgggcgagggcggcgtattcgtgctgacgctgcagcccaaagacggcgaaccctggcagggcgtagtgcctttggaaggcggcggtatcgcgcaaatgttggcgaactatatgaagcgttccgaacaaatcgatacgcacatcgtcctgtctgcaagcgacgaagcggcgggcggtctgctggtgcagcgtctgcctgaagcggtgttggatgaagaggcatgggaacacgtcagtacgctggcgcgtacactgacggcggacgagctggcagaattggatgcgcaacatgttttgtaccgcctgttccacgaaacgccgccgcgcgtgttcgagccggaaacgtttgaattttcatgcacctgttcgcgcggcaaagtcagcgatatgctgttgatgctgggcggggaagaagtcggcggcgtggtggtggaacaaggcagcatcgaagtcgattgcgatttctgccacagcaaatatgtgtttgacgaaaccgatgtcaacgcgctgttcggggaggatgtggtcggcgttgccaaagggctgccccggcataccgtccaataa

SEQ ID NO: 37224 - DNA, 495 bp, Neisseria meningitidis
ttggacaattccgcccactataaaaagccgacacgggcaaccaccaccatgagactgaccaccaaagggcgtttcgccgttaccgctatgctggatttggcgatgaacgcgcaaaccggcgccgtcaaactcagtgccatcagcgaacgccaaaacatatccctctcctatctcgagcaattgttcggcaaactccgccgcgccggactggttgaaagtctgcgcggacccggcggcggctacatcctcgccgcaccggcggcacgcatcaacatcgcccaaatcatcgccgccgccgaagaccggctggacgcgacccaatgcggcagcaaagccaactgccaccacggcgcgccctgcctgacgcacgacctttgggagaatttaaacaaaaccatcaacgactacctcggcagcgttaccctgcaaagcatcatcgaacagaaaaacaacggcgacggcagccgcgtcgtccaatttacacacatccattaa

SEQ ID NO: 37225 - DNA, 1323 bp, Neisseria meningitidis
ttggcaggttcggcactcgtcgccctgaccgcgctgttttttgcccatcttgccgattttgcgctggaactgaacgccaaactggttcaacaatacccgtggttcgcgtgggtcgcgcttcctttgggtttaccgcttattgcgtggctcacacgcaaattcgcccccttcaccgccggcagcggcatcccgcaggtcatcgcctcactgtcgctgccctacggcgcacagaaaacgcggctgatccgcctcgggcagacgctgctgaagattccgctgacctttttgggtatgctgttcggcgcgtccatcggacgcgaaggtccgtccgtgcaggtcggcgcggcagtgatgggcgcgtggggcgcgtggtgcaagaaacacggcttggcattcaaagggatgcaggaaaacgatttgatggcggcgggcgcggcgggcggtttggcagccgcgttcaacgcgccgctggcgggcgtgattttcgccattgaggaactcgggcgcggcatcatgttgcgctgggaacggcagattctgctcggcgtactcgccgccggtttcatacaggtcgccattcagggcaacaacccgtatttttccggcttcaacggcggcgtattggaacatatctttctgtgggtcgcactgtccggcctggtttgcggcgcggcgggcggcctgttcggacgtttgctctatcgcggtgcggcggcgtttgcaccgcgcaagatacgcggcttcatccgcaaccgtccgctgctgctggcggcactgatggggctgctgctcgccctgctcggcacgttctaccaaggcaaaacctacggcaccggctaccacgaagccgcccaagccctgcacggcatctacgaagcccccttcggactcgccgccgccaaatggctcgccaccgtattcagctattgggcaggcgttccgggcggcattttcactccctcgctgaccataggcgcggttttgggcgagcatatcgccgccatcgccgacatatcgcagggtgcaaacatcatcgtcctcatctgcatggcggcatttctggcgggcgcgacacaatccccgattacttccgccgtcgtcgtcatggaaatgacgggcggacaaagcctgctgttttggatgctaattgcctgcattttcgcctcgcaggtttcgcgccagttttcgccgcgtccgttctaccacgcatcgggaatgcgcttccgccagcgcgtgcttcaagaaaccgccgcccaaaccggcaatgcgcccgcaagaccgcaaacagcaaacagcaaaacgggaatgccgtctgaaaattaa

SEQ ID NO: 37226 - DNA, 1023 bp, Neisseria meningitidis
ttgttttgcctgtttcctgccgcctccgttttttgccggattttccttcctgccgcaatatcggaacggcagcccgccgtctgtttgcggttgcaaattcaggcagtttggctacaatcttccgcattgtcttcaagaaagccgactatgccgaccgtccgttttaccgaatccgtcagcaaacacgaccttgatgccctgttcgagtgggcaaaagcaagttacggtgcagaaagttgctggaaaacgctgtatctgaaccgtctgcctttgggcaatctgtcgccggaatgggcggagcgcgtcaaaaaagactgggaggcaggctgctcggagtcttcagacggcattttcctgaatgcggacggctggtcagatatgggcggccgcttgcagcacctcgcccgcacatggaacaaggcggggctgcttcacggatggcgcaacgagtgtttcgacctgaccgacggcggcggcaaccccttgttcacgctcgaacgcgccgctttccgtccgttcggactgctcagccgcgccgtccatctcaacggactgaccgaatcggacggccgatggcatttctggataggcaagcgcagtccgcacaaagcagtcgatcccgacaaactcgacaatattgccgccggcggtgtttccggcggcgaaatgccgtctgaagccgtgtgccgcgaaagcagcgaagaagccggtttggataaaacgctgtttccgtttatccgtccggtatcccggctgcacagcctgcgccccgtcagccggggtgtgcacaatgaaatcctgtatgtattcgatgccgtcctacccgaaaccttcctgcctgaaaatcaggacggcgaggttgcgtgttttgaaaaaatggacatcggcagcttggttgccaccatgttgtcgggaaacatgatgcacgacgcgcaactggttacgctggacgcgttttgccgttacggtctgattgatgccgcccatccgctgtccgagtggctggacggcatacgtttatag

SEQ ID NO: 37227 - DNA, 2829 bp, Neisseria meningitidis
atgatggacgaaaaactcaatttctcttacctgttcggttcgaacgcaccctacattgaggaattgtacgaggcttttttggaaaaccccgatacggttgatgaaaaatggaagcagtatttcaccgatttgagcaaacagccggggacggttgctgtcgatgtcgcacacacaccgattcgcgaatcatttgttactttggcgaaaaagaaaattgcatctgccgttgcgggcggtgcggatgaggcaatgctgaaaaagcaagtcagcgttttacggctgatttctgcctatcgtatccaaggcgtgggtgcagcccaacttgatccgctcaaacgtatccccccgcgcgatattgaagccctcgatccgaaattccacggtctgtctgatgccgatatggcgcttcaattcaatatgggcgagggcgattttgccaatcgcggcaaactgcctttgtcccaaatcatcagcaacctcaaacaaacctactgcggccacatcgcattggaatatatctatattcccaataccgaagagcgccgctgggtacgcaattattttgaaagcgtattgtccacaccgcattacaatgccgatcaaaaacgccgtatcttgaaagagatgactgctgccgagactttggaacgttatctgcataccaaatatgtcggtcagaaacgtttcggtgtcgaaggcggcgaaagcgcgattgccggtttgaactacctgattcaaaacgccggtaaagacggcgtggaagaagtcatcatcggtatggcgcaccgtggccgtctgaatgttttggtgaacattttgggcaaaaaacccggcgatttgtttgccgaatttgaaggtcgtgccgaaatcaaactgcccagcggcgacgtgaaataccatatgggcttcagctccgatattgctaccccgcacggcccgatgcatgtttctttggcgttcaacccgtcccacttggaaatcgttaaccctgttgttgaaggttctgcgcgtgccaaacaaaaacgtttgggcgaaaacggccgcgacaaagtcttgccggtattgattcacggcgattccgcatttatcggtctgggtgtcaaccaagcaacattcaacctgtctaaaacacgcggttataccaccggcggtacggttcatatcgtcatcaacaaccaaatcggctttaccacttccgatatccgcgatacccgttcaaccgtacactgtaccgatatcgcaaaaatggtttccgccccggttatccatgtgaacggcgatgatcctgagcgtgtttgctttgctatccaagccgctttggattaccgcaaaaaattccataaagacatcgtgattgacgttgtctgctaccgtaaatggggtcacaacgagggcgatgatccgaccttgacccaaccgatgatgtacaaaaaagtatcgcaacaccccggtgcgcgtgctttgtacaccgagcaactgattgccgaaggcgtggtaacccaagccgaggcagacggttacatccaagcctaccgtgatgctttggacaaaggcgagcacgtcgagcaaacaacgttgagcaacttccaacgcacgcaaatcgactggagcaaataccaaggcaaagattggcgcgaacacatcgaaaccggtttgcctgccgcagatattgaacgtctcactgagaagtttaccgccgtaccggaaggctttgccctgcatccgactgcaaaacgtgtgattgaagcgcgtaaagccatggcatccggcaaacaggccatagattggggtatggccgaaaccttggcatacgccagcctcgtaaccaaaggtcacggcgtgcgtatttccggtgaggactcgggacgcggtacgttctcgcaccgccacgccgtattgcacgatcaaaaacgcgaaaaatgggacgacggtacttatgttcccctgcgccatatgggcgaaggaatgggcgagttcctggttatcgattccatcttgaacgaagaggccgtgatggcgttcgagtacggctttgcctgctccgctcctgacaagctcaccatttgggaagctcaattcggtgacttcgccaacggcgcgcaagtgacgattgaccaattcctgtcttcaggcgaaaccaaatggggtcgcttgtgcggtctgaccaccatcctgccgcacggttacgacggtcaaggccctgagcactcttctgcacgcgtagaacgttggttgcaactgtgttctgagaacaatatgcaagtcatcatgccgtctgaagcgtcgcaaatgttccacctcttgcaacgtcaagtcttaggttcataccgcaaaccgctagtgattttcatgtccaaacgcctgttgcgattcaaaggggcaatgagcccgctggaaaacttcaccgaaggttcgactttccgtccggttatcggcgataccgccgaacgcgcaagcaacgacagcgtgaaacgcgtggtattgtgtgccggtcaggtttactatgacttggaagccggtcgagccgaacgtaaactggaagatgatgtcgctattgtccgcgttgagcagctgtatccgttcccatacgacgaggttaaagccgaactggcgaaatatccgaacgcaaaatctgtggtttgggcacaagaagagccgaaaaaccaaggcgcgttctaccaaatccgccaccgcatcgaagacgttatcagcgaagagcaaaaactgtcttatgccggtcgtccaagcagcgcatcgcctgcagtgggctactcaagcaaacacattgctcaattgaaacaattggttgaagacgctttggcattgtaa

SEQ ID NO: 37228 - DNA, 378 bp, Neisseria meningitidis
atgtctgccaaaccgcgtcctgtttatctggatttgccgaacatccgtctgccgatacccgggatagtttccatccttcaccgcatcagcggggtcgggctgtttattatgctgcctttcctgctgtatttcctgtccggtaccctgagtcaagagtctgcatttgaaacttaccgtgccattgtttcccatcctttggtcaagctggttttaatcggtgtattgtgggcttatctgcaccattctctcgccggtatccgctttttatttttggatgcgcacaaaggccttgagctgaatactgcgcgcaataccgctaaagccgtatttgcttctgcattggttttgactgtcgttttgggagcgttgttatggtag

SEQ ID NO: 37229 - DNA, 1428 bp, Neisseria meningitidis
atgtttttctccgccctgaaatcctttctttcccgctacattaccgtatggcgcaatgtttgggcggtgcgcgaccagttggaaccgcccaaacgcacggcggaagaacaggcgtttttgcccgcgcatttggaactgaccgatacgccggtctctgccgctccgaaatgggcggcgcgttttattatggcgtttgcgcttttggctttgttgtggtcctggttcggcaaaatcgatattgtggcggcggcttcgggcaaaacggtgtcgggcgggcgcagcaaaaccatccagccgctggaaacggtggtggttaaggcggtacatgtgcgcgacgggcagcatgtgaaacagggagaaacgctggcggaactggaggctgtgggaacagacagcgatgtggtgcagtcggagcaggctttgcaggctgcccaattgtccaaactgcgttatgaagcggtattggcggcattggaaagccgtaccgtgccgcatatcgatatggcgcaagcacggtctttaggtctctccgatgccgatgtgcaatcggcgcaggtgttggcgcagcaccagtatcaggcatgggcggcgcaggatgcgcaattgcagtcggctttgcgcggccatcaggcggaattgcagtcggccaaggcgcaggagcagaagctggtttcggtgggggcgatcgagcagcagaaaacagcagactaccgccgtttgcgggccgacaattttatttcggaacatgcgtttttggagcagcagagcaaatcggtcagcaattggaacgatttggaaagtacgcgcggtcagatgaggcagattcaggcggccattgcacaggcggagcagaatcgggtgctgaatacgcagaacctgaaacgcgatacgctggatgcgctgcgccaggcaaacgaacagattgaccaataccgcggccaaatggataaggcaaagcagcggcagcagctgatgacaatacagtcgcctgcggacggcacggtgcaggaattggccacctatacggtgggcggtgtggtgcaggctgcccaaaaaatgatggtggttgcgcccgatgacgacaaaatggacgtggaagttttggtattgaacaaagacatcggttttgtggaacagggacaggatgcggtggtgaagattgagagttttccctatacgcgctacggttatctgacgggcaaggtgaaaagtgtcagccatgatgcggtaagccacgaacagttgggcttggtttatacggcggtggtgtcgctggacaaacataccttgaatattgacggcaaagcagtgaatctgacggcgggcatgaatgtcacggcggagattaaaacgggtaaacggcgggtgctggattatctgttaagcccgctgcaaaccaaattggacgaaagctttagggagcgatag

SEQ ID NO: 37230 - DNA, 432 bp, Neisseria meningitidis
ttggccttggctgccgatgaggtttttgaggatcctgtcgagccggacgaaagcgatttcggcggacggcgtaaaggcagacgtggtcgcggtgcggcaggaaaagtggttgtcttcggcattctgaaacgcaacggacgggtctataccgttgtggtggataatgccaagtctgaaacgttactccctgtcatcaagaagaaaatcatgccggacagcattgtttataccgatagtctgagcagctgcgacaagttggacgtgagcggttttatccattaccgcatcaaccattccaaggaatttgcagaccgtcagaaccacattaacggcattgagaatttttggaatcaggcaaaacgcgtcttgcgaaaatatagtggattaacaaaaatcaggacaaggcgacgaagccgcagacagtacaaatag

SEQ ID NO: 37231 - DNA, 1374 bp, Neisseria meningitidis
atgagtaatccattttcctctttaggtttgggtacggaactcgtttccgcactgaccgcgcaaggttacgaaaacccgacgcccatccaagccgccgccattcccaaagcactcgccggtcatgatttactagccgccgcgcaaaccggcacgggcaaaaccgccgcctttatgctgccctcgctcgaacgcctcaaacgttacgccaccgccagcacctcgcccgcgatgcaccccgtgcgtatgctcgtgttgacccccacgcgcgaactcgccgaccaaatcgaccaaaacgtgcagtcctacatcaaaaacctgccgctgcgccacaccgtcttgttcggcggtatgaatatggacaaacagaccgccgatttgcgtgccggctgcgaaatcgtcgtcgccacagtcggacggctgctcgaccacgtgaaacagaaaaacatccatttgaacaaagtcgaaatcgtcgttttggacgaagccgaccgtatgctggatatgggttttatcgacgacatccgcaaaatcatgcagatgctgccccgccaacgccaaaccctgctcttttccgccaccttctccgccccgatacgcaaactggcgcaagacttcatgaacgcgcccgaaaccgtcgaagtcgccgcgcaaaacaccaccaacgccaacgtcgagcagcacatcatcgccgtcgataccattcagaagcgcaacctgctcgaacggctgattgtcgatttgcatatgaaccaggtcatcgtgttctgcaaaaccaaacaaagcgtcgaccgcgtaacgcgcgaactggtgcgccgcaacctgtccgcacaggcgatacacggcgaccgttcccaacaaagccggctcgaaacactcaacgccttcaaagacggcaacctgcgcgtcctcgtcgccaccgatatcgccgcgcgggggctggatattgccgaactgcccttcgtcatcaattacgaaatgcccgcccagcccgaagactacgtccaccgcatcgggcgcacggggcgcgcgggcgcggacggcgtggcgatttccctgatggacgaatccgaacagaaaatgtttgaatccattaaagagctgaccggcaacaagctgctcatcgagcgcatcgagggcttcgagccgcaatggtgggaacagggcggcgcaaaaccggaaaaacccgaaatgcgcgaaccgagacaacgcaaccgctacgaatccgccaaagcgcaacgcgaaaaaaacacccggccggaaaatgcggcaaacgatgcgggcgcggcttgcggaaaaattgccggacgcagccgccgaagccgccgggaacaccggacgtgcgccctgctccaaccgcgttacggcgtaaaatag

SEQ ID NO: 37232 - DNA, 2229 bp, Neisseria meningitidis
atgcgttctgctgttttatttatatatttctttctacttaatatattccttttccagccagccgttatccacatccaatctaactatattttatttatgtctatcgtatccgcaccgctccccgccctttccgccctcatcatcctcgcccattaccacggcattgccgccaatcctgccgatatacagcatgaattttgtacttccgcacagagcgatttaaatgaaacgcaatggctgttagccgccaaatctttgggattgaaggcaaaggtagtccgccagcctattaaacgtttggctatggcgactttacccgcattggtatggtgtgatgacggcaaccatttcattttggccaaaacagacggtgagggtgagcatgcccaatttttgatacaggatttggttacgaataagtctgcggtattgtcttttgccgaattttctaacagatattcgggcaaactgatattggttgcttcccgcgcttcggtattgggcagtttggcaaagtttgactttacctggtttattccggcggtaatcaaataccgccggttgttttttgaagtattggtggtgtcggtggtgttgcagctgtttgcgctgattacgcctctgtttttccaagtggtgatggacaaggtgctggtacatcggggattctctactttggatgtggtgtcggtggctttgttggtggtgtcgctgtttgagattgtgttgggcggtttgcggacgtatctgtttgcacatacgacttcacgtattgatgtggaattgggcgcgcgtttgttccggcatctgctttccctgcctttatcctatttcgagcacagacgagtgggtgatacggtggctcgggtgcgggaattggagcagattcgcaatttcttgaccggtcaggcgctgacttcggtgttggatttggcgttttcgtttatctttctggcggtgatgtggtattacagctccactctgacttgggtggtattggcttcgttgcctgcctatgcgttttggtcggcatttatcagtccgatactgcggacgcgtctgaacgataagttcgcgcgcaatgcagacaaccagtcgtttttagtagaaagcatcactgcggtgggtacggtaaaggcgatggcggtggagccgcagatgacgcagcgttgggacaatcagttggcggcttatgtggcttcgggatttcgggtaacgaagttggcggtggtcggccagcagggggtgcagctgattcagaagctggtgacggtggcgacgttgtggattggcgcacggctggtaattgagggcaagctgacggtggggcagctgattgcgtttaatatgctctcgggacaggtggcggcgcctgttatccgtttggcgcagttgtggcaggatttccagcaggtggggatttcggtggcgcgtttgggggatattctgaatgcgccgaccgagaatgcgtcttcgcatttggctttgcccgatatccggggggagattacgttcgaacatgtcgatttccgctataaggcggacggcaggctgattttgcaggatttgaacctgcggattcgggcgggggaagtgctggggattgtgggacgttcggggtcgggcaaatccacactcaccaaattggtgcagcgtctgtatgtaccggagcagggacgggtgttggtggacggcaacgatttggctttggccgctcctgcctggctgcggcggcaggtcggcgtggtcttgcaggagaatgtgctgctcaaccgcagcatacgcgacaatatcgcgctgacggatacgggtatgccgctggaacgcattatcgaagcagccaaactggcgggcgcacacgagtttattatggagctgccggaaggctacggcaccgtggtgggcgaacaaggggccggcttgtcgggcggacagcggcagcgtattgcgattgcccgcgcgttaatcaccaatccgcgcattctgatttttgacgaagccaccagcgcgctggattatgaaagtgaacgagcgattatgcagaacatgcaggccatttgcgccaaccggacggtgctgattatcgcccaccgtctgtccaccgttaaaacggcacaccggatcattgccatggataaaggcaggattgtggaagcgggaacacagcaggaattgctggcgaagccgaacggatattaccgctatctgtatgatttacagaacgggtag

SEQ ID NO: 37233 - DNA, 828 bp, Neisseria meningitidis
atgccggaattgccggaagtggaaacgacgttgcgcggcatcgcgccgcatattgaagggaaaacggtggaagccgtggtattgcgccaattgaagctgcgctggcagatcaatcccgatttgggggagattttgtccggtcggcaggttttgtcctgcggcaggcgtgccaaatatctgattgtccgtttccaaacggggattttgctgattcacttggggatgtcgggcagcttgcggatttttacgccgtcggacggacgtatcggcaggccggacagacacgatcacgtcgatattgtgttttcagacggcacggtcatgcgttaccgcgatccgagaaagttcggcgcgatactttggtatgagggaatcgaagaacatcatccgctgttggaaaaactggggccggagcctttgtcggaggcattttgcacggattatctgtatgtgaggctgaaggcgcagaagcgcgcggtcaaacttgccctgatggacaatgcggtcgtggtcggtgtgggcaatatttatgccaatgagagcctgttcagagcgggcatttcgccccaccgtcctgccaaccgtctgaaaaagaaagagtgtgcgcttttggttgaaaccgtcaaagcggtgttgcggcgcgccattgaaacgggcggcagtaccttgagggattttgtggacagcgacggcaaaagcggctacttccaacaggaatatacggtgtacgggcggcacaatcagccgtgcccccagtgcggcggtttggttgtgaaagaaactttggggcagcgcggcacgttttactgcccgaattgtcagaaatag

SEQ ID NO: 37234 - DNA, 1422 bp, Neisseria meningitidis
atgcgccacctacccctgttttcactcatacttttcccggcatcggtttacgccgcagatttggacggcgcaaacctaaacctgctgtggggcttgccctttgccctgattttgctgtctatcgcattgggtcccttgtttttttcgcatacctggcatcaccattacggcaaaatcaccgccttttggacattgctcttcctcatcccgttcagtttggtttttggctcgtccgccggtatccataccgtcgcacacgcactcgttgaagaatacatccccttcatcctgctgctgcttgccctgtacaccatttcaggcggcattttggtttggggcgacttgaacggcacacccaagctcaacaccgccctgcttgccgtcggtacggcacttgcctctatcatgggaacgaccggcgcagcaatgctgatgattcgtccgctgctgaaagccaaccaaaaccgtacccgccgcgtgcacatcgtcatcttcttcattttcctggttgcaaacatcggcggcggtctgacccctttgggcgaccccccactcttcctcggcttcctcaaaggtgtagatttcatgtggacggtcaaacatatgttcgcccccgtcctgatcagcaccgctgtcctgttgaccgccttctatttcatcgacaaccgtttcttcaaacaggaaagcattgcacaagatacgccggcacaacaggaaaaacccgaaaaaatcgccatcttcggcaaatggaacttcctcctgctttcgggcgtggtcggcgcggttctaatgtccggcctttggaaacccgaacacccgggatttgaaatcctcggcagccgttacgccctgcaaaacctcgtccgcgatgtcatcctgattgcattgaccgccgtatctatggcaatcacgcccaaacaagtccgcgcaggcaacgaattcaactttgaacccatcgccgaagtgggcaaactcttcctcggcatcttcatcaccatctttcccgtcctgagcattctgaaagcaggcgaggcaggcgcgctgggcggggtggtatcgctggttcacgatacggcaggtcatccgattaatgtgatgtatttttggatgagcggcatattgtcggcattcttggataacgcgcccacttatctcgtttttttcaatatggcgggcggcgatgcccaagccttgatgacgggtaccctgtttcattcgctgctggcggtttctatgggttcggtattcatgggcgcactgacctacatcggcaacgcaccgaacttcatggtcaaggccattgccgaacagcgcggcgtaccgatgccgactttcttcggctatatgatgtggtcggtcgccttcctgacacccgtcttcatcgtacatacccttatctttttcgttttcaaactgctgtaa

SEQ ID NO: 37235 - DNA, 252 bp, Neisseria meningitidis
atgtcgctttttattaccgacgagtgcatcaactgcgacgtatgcgaacccgaatgccccaatgatgccatttcccaaggcgaggaaatttacgaaatcaaccccaacctctgcacgcagtgcgtcggacactacgatgagccgcagtgccagcaggtttgcccggtggactgcatcctgattgaccaagaacatcccgaaacccatgacgagttgatggcgaaatacgaaaagattatccagtttaaataa

SEQ ID NO: 37236 - DNA, 693 bp, Neisseria meningitidis
atgaaacgcttcacctatactctttccgacggtttgtgcatcgaaatcgaactcaaacgcagtgccaagaaaaatctgattctgcgccccgtcaatatgcagacggtcagcatcaacgtcccacccttttttcaagaccacgcgttagcaaactggctggcggcaaacgaaacgattttgcggaacacgcttgccaaaacgcccgtgcatcctgtttcccacccaaacttacccgagtggatttggtatcggggaataaagaccaagctggatacccacagccaaagccatatccgtatcacgtcgtctgaaatcctgcttccccgaaaagaaaccgccgcacaaatcgaccacctgcgccgcctgttgaacgaacgcgcccgcgaatacctgctgccccgccttgaaaaacacgcagccgaaacaggactgacgcccaccgccacagacctgagcaacgccaaaaccttttggggcgtatgccgcccgcacaccggcatccgcctcaactggcggctgatcggcacgcccgaatacgtcgccgactatgtctgcatccacgaactctgccacctccgccaccccgaccacagtccgcgcttttggcatttggtgaacacgctgacgccgcataccgacaatgctaaaagttggctgaaggcgcacgggcgggaattgtttgtgctggggtga

SEQ ID NO: 37237 - DNA, 690 bp, Neisseria meningitidis
gtgcaggcggatttagcttatgccgccgaacgcattacccacgattatccgaaaccaaccggtacagacaaagacaaaataagcacggtaagcgattatttcagaaacatccgtgcgcattccatccaccctcgtgtgtcggtcggctacgatttcggcggctggaggatagcggcagattatgccagttacagaaaatggaacaacaataaatattccgtcaacacaaaaaatgtgcaaaaaaacgacaatggcaacaggcaagacctgaagacggaaaatcaggaaaacggtacattccacgccgtttcttctctcggcttatccgccatttacgatttcaaactcaacgataaattcgataaattcaaaccctatatcggtgtgcgcgtcgcctacggacacgtcagacacagcatcgattcgaccaaaaaaacaacaaatgttgttaccgtcgccggtgctgctaacacagcacctacgatttattatgcaccagagacgcaaaacgcctatcacgaaagccacagcatccgccgcttgggtcttggtgtcatcgccggtgtcggtttcgacatcacgcccaagctgaccctggacaccggataccgttaccacaactggggacgcttggaaaacacccgcttcaaaacccacgaagtctcattgggcgtgcgctaccgcttctga

SEQ ID NO: 37238 - DNA, 750 bp, Neisseria meningitidis
atgattaccatccgcaacgtcagctaccgcatcggcacacgccccatcctcgacaacgtcagcctcgacatccccgaaggcggcattaccgcactgatcggccccaacggcgcaggcaagtccaccctcctctcctttatggcgcggcttcagcctctggcacacggcaacatcagctacgcaggcaaagacacccccaccgccgaactcgcctgcacgctctccatcctcacccaagaaaacagcatcatgagccgcatcaccgtgcgcgacctgctcatgttcggccgctatccctaccatcaaggcagaccgactgccgaatgccgccgtatcgttaacggtgcaatcgaagaattccacctgcaagacttcgccgaccgctacctgaccgagctttccggcggacaacgccaacgcgccatgattgccatggtgttctgccagcgcaccgactacgttttgctggacgaaccgctgaacaacctcgacatgtatcatgcccgctccctcatgcaaatcctgcgccggctgaccgacgaacacaagcgcaccaccgtcgtcgtattacacgacatcaaccaggccgccgcctacgccgaccacgtcgtcgccatgaaaaacggccaagtcgccatgcagggcaagcccgacgacattttcaccgccgcaaacatcaaaaccctgttcgatatggatgtgtccgtcctcgaccaccaaagcaaaaaactcatcgtccaccatatctga

SEQ ID NO: 37239 - DNA, 621 bp, Neisseria meningitidis; identical to SEQ ID NO: 36752

SEQ ID NO: 37240 - DNA, 453 bp, Neisseria meningitidis
ttgaaaatttctatattttggttgtgtaatccatttgcacataacctatggagacaaattatgggtaagcgaatgactttcgataccgccaaatcacgctttcaagagaaatttccacatttagaattgttggagttcagtggcatttataaaccttccagtgttagatgtcctacgcacggggttgtccaacttttgtattacgacacagctataaagtcaaagtatgggtgtccggagtgcgggaaacttaaaatgaaggaaaatacgcctccccaaaaccaaaaacctgtctccatcctcgacaccgccacaggcgaaacactcacgttccccagcgtacaagctgccgccaaagccctaaacaccccctacggctctatacgaaccaagctcgacggacgttcaaatcccgacaaccttgtctgtaacaggtataaggttctgctataa

SEQ ID NO: 37241 - DNA, 594 bp, Neisseria meningitidis
atgcggatgtcccgattgatgttattgctgtcggcatttgtgcttgctgcgtgtaatgcccaaaaccggcaatcctgtgtacggcatcaggatttcgcacgtgtagccgtcgatttgtttcggagtgcctgcgtcctgactcaaggcagtttcgaaccagtttccaagtttgccgctgtcggacattttgtccctgtcggaaaggaagacctgtcccgtctgccgcccgctgttgcagaacccgatgtacaggcgttgtggacgcttgaacgcgatggcggcatttattatttgagcctgccgcgcgactgttgcagtgtgaaagccgagcgggcagacagtgccgtgcttttggaacattttgacggacttgtccgacagccgccgaaaaataccaatatagaattgagggctgaacagtcggtgcaggcactgtttgaaaccaggcaaatcagctatgcctggcgggaatcgggcagccccgaagaaaccgtattgaccgcacaaaccgccgattccccggatttgcccgtacaggcagttttgaacctgacgcaccgttcccacaacgggaaacccctaattctcccctaa

SEQ ID NO: 37242 - DNA, 336 bp, Neisseria meningitidis
atgttcggaaaagccggattaggcggcctgatgaaacaggcgcagcaaatgcaggaaaatatgaaaaaagcgcaagccaaacttgccgaaaccgaaatcgaaggcgaagcaggcaacggcttggtcaaaatcacaatgacctgcgcgcacgaagtacgcaaaatcgacatcagccccgatttgattcaagaagccgccgacgacaaagaaatgctcgaagacctcatcctcgccgccctcaaatccgcccgtgacaaagccgaagaaaccgcaaacaaaacaatgggcgcattcgcccaaggactcccccccggagtgggcgacttcttccgctga

SEQ ID NO: 37243 - DNA, 1635 bp, Neisseria meningitidis
atgtccttttgcgcgaccgctttgcctgcgaacccgaccgttttgagcgtatgcatgagcgtttggacgggatgttgttcgattacagcaaaaaccgtttgggcgaagatacgctgcaactgctctgccgtcttgcggagacggcggatttggaagggaaaatgcgtgcttttctgccgtcttgcggagacggcggatttggaagggaaaatgcgtgctttgcggacgggtgcgaaagtcaacggcagcgaggggcgtgccgcgctgcatacggctttgcgcctacccgacggtgcggatgccgtttatgcggacggcagggacgtgttgcccgaaatccgccgcgagttaaatcgtgcgttggagtttgcacacagtttggacgacggttcgtatcaggggataactgggaaacggattacggattttgtccacatcggcataggcggatccgacctcgggccggcaatgtgcgtgcaggcactcgagccgttcagacggcatatcgccgtccattttgccgccaacgccgatcctgcctgcctggatgcggttttatgccgtctgaaccccgaaacgacagtgttttgcgttgccagcaagtccttcaaaacaccagaaaccctgctcaatgcacaggcggtcaaggcgtggtatcgcggtgcggggttctcggaatccgaaacggcgcgccatttttgcgcggtgtctgccgatacggaagcggcgcaaagtttcggcattgcggcggaacgcgtgtttgcgatgtacgactgggtgggcggacgctattccgtctggtcgcccgtcggtttgcccgtgatggttgcggtcggcggggcgcgtttccgcgagttgttggcgggggcgcacgcgatggacagccatttttttcacacgccgctgcgccgcaacattcccgtgctgatggcactgattgccgtgtggtataacaatttccagcacgcggatgggcagactgccgttccgtacagccacaacctgcgcctgctgccggcgtggctgaaccagctcgatatggagagtttgggcaaaagccgcgcttcagacggcagtcccgccgtgtgcaaaacgggcggcatcgtgttcggcggtgaaggggtcaactgccagcacgcctatttccaactgcttcatcaaggcacgcgcctgattccctgcgactttatcgtcccgatgacggcgcagggcgtggaggacggacgcagccgttttaccgttgccaacgcctttgcccaagcggaagccctgatgaagggcaaaaccttggacgaagcacgcgccgaactggcagatttgcccgaagcggaacgcgaacgcctcgcgccgcacaaagaattccccggcaaccgccccagcaacagcatcctgctcgaccgcctcacgccctacaatctgggtatgctgatggcggcttacgaacacaaaaccttcgtccaaggcgcgatatggaacgtcaaccccttcgatcagtggggggttgagtacggcaaacagttggcgaaaaccatcatcggcgaactggaaggcggcacgtccgtacacgatgcctcgaccgaagggctgatggcgttttaccgcgaatgccgtctgaaaggcggcggcgcggcataa

SEQ ID NO: 37244 - DNA, 630 bp, Neisseria meningitidis
ttgtactgtctgcggcttcgtcgccttgtcctgatttttgttaatccactatatttttgggaatctgtttcaccccaatatataaagcaccatattaaggcggagtttcttccccactttgacccgaacccggaaaagacaccgcccaagccaatcctgatgctgccccgacagccaacccttaaggaaaccctaatgaactttgctttatccgtcatcacatttaccctcgcctctttcctgcccgtcccgcctgccggagccgccgtctttacttggaaggacggcggcggcaacagctattcggatgtaccgaaacagcttcatcccgaccaaagccaaatcttaaacctgcggacgcgccaaaccaaaccggcggtcaaacccgcccaagccgacgcagggaagcgcacagacggcgcggcacaggaaaacaatcccgacactgccgagaaaaaccggcagcttgaggaagaaaagaaaagaattgccgaaaccgaacggcagaacaaagaagaaaactgccggatttcaaaaatgaacctgaaagcggtgggaaattcaaatgcaaaaaacaaggatgatttgattcggaaatacaataacgccgtaaacaaatactgccgttaa

SEQ ID NO: 37245 - DNA, 822 bp, Neisseria meningitidis
atggattttctgattgtcctgaaagccctgatgatgggcttggtagaaggttttaccgaatttttaccgatttccagcaccgggcatttgattgtgttcggcaatctgattggttttcacagcaatcacaaggtttttgaaattgccatccagctcggtgcagttttggcggtagtgtttgaataccggcagcgtttcagcaatgtgttgcatggcgtgggaaaagaccggaaagccaaccgcttcgtcctcaatcttgccattgcttttatacctgccgccgtgatggggctgttgttcggcaaacagattaaagaacatctgttcaatcctttgagtgtggcggtcatgctggttttgggcggtttgtttattttgtgggtggagaaacgccaaagctgggcagagcctaaaattgccgatgttgatgcattgcgtccgattgatgccttgatgatcggcgttgcccaagtgtttgcactgattccgggtacgtcccgttcgggcagtacgattatgggcgggatgctttggggaatcgaacggaaaactgcgacagaattctcgtttttcttggctgtgccgatgatggttgccgcaacggcttatgatgtcctgaagcattaccggtttttcaccctgcatgatgtcggtttgattttgattggctttgttgctgcctttgtttcaggcttggtggcggtcaaagcgttgctgaggtttgtttccaagaaaaattatattccttttgcctattaccgcattgtttttggtattgccatcattatattgtggctgtcaggctggataagttgggaatga

SEQ ID NO: 37246 - DNA, 1380 bp, Neisseria meningitidis
atgctgctcgacctcaaccgcttttccttttccgtcttcctgaaagaagtccgcctgctgaccgctcttgccctgcccatgctgttggcgcaggtcgcgcaggtgggcatcggttttgtcgataccgtgatggcgggcggtgcgggcaaggaagacttggcggcggtggctttgggcagcagcgcgtttgccacggtttatattacctttatgggcattatggcggcgctgaacccgatgattgcccagctttacggcgcgggtaaaaccgacgaagtgggcgaaacgggacggcaggggatttggttcgggctgtttttgggcgtgttcggcatggtcttgatgtgggcggcgattacgccgttccgcaactggctgaccttgagcgattatgtggaaggcacaatggcgcagtatatgctgttcaccagcttggcgatgccggcggcaatggtacaccgcgcactgcacgcctacgcctccagcctgaaccgcccgcgcctgattatgttggtcagctttgcggcgtttgtgttgaacgtgccgctgaactatattttcgtttacggcaaattcggtatgcccgctttgggcggcgcaggctgcggactggcgacgatggcggtgttttggttcagcgcgctggcattgtggatttatatcgccaaggaaaatttcttccgcccattcggactgacggcgaaattcggcaaaccggattgggcggtgttcaaacagatttggaaaatcggcgcacccatcgggctgtcttattttttggaagccagcgcgttttcgtttatcgtgtttttgattgcgcctttcggcgaggattatgtggcggcgcagcaggtcggcatcagtttgtcggggattctctatatgattccgcaaagcgtcggctcggcggggacggtgcgcatcggcttttcgcttgggcggcgcgaattttcgcgggcgcgttatatttcgggcgtgtcactggtgttaggatggatgctcgccgtgattaccgtgctttccttggtattattccgttcgccgctggtaagtatgtacaacaatgatccggcggttttaagcatcgccgccaccgtcttactgttcgccggcttgttccaaccggcagacttcacccaatgtatcgcctcctacgccttgcgcggctacaaagttacaaaggtgccgatgttcatccacgccgccgccttttggggctgcggtctgctgccgggctacctgctcgcctaccgtttcgatatgggcatttacggcttctggacggcattgattgcctcgctcaccatcgccgccatcgccttggtgtggtgcttggaattgtgcagtagggagatggtcagatcgcataaggccgtctga

SEQ ID NO: 37247 - DNA, 441 bp, Neisseria meningitidis
atggcaggtgggaataagccaccaaaaccaagtacgcagcaacaccctacacactctgataacaatatcggcttacctgcctcatatgttaaacctgatacatctatttctccgacaggaacaattcaagaccgcatcagatggacaaagtccaagtttcctactgagaaatctttaaatggacatttcaaagctcatggaaaagaatttggcgatataaccattgaagactaccaaaaaatggcgtctgatttgttatcaaaacagacatcggacaagatattaggttatcagacggaacatagacgagtgcgctatgatatcaataacaatatctatgttttggccaatccaaaaacattcaaaatcaaaacaatgtttaaaccaaacttaggaaagaagtattatgatggagaattcaaaaaagacatgggaaattga

SEQ ID NO: 37248 - DNA, 366 bp, Neisseria meningitidis
atggaaaaaccgcttctaactcctcctttttttctatttgaagatgtgtctttggatatatttcaaggattgtcggaattggaaaagaaaatagagccgcaggatttgatggatgatgtttaccgtgcttttgattcggttggaaatattctgaatttccgtatagtagaaaaagagcaaaaagggttttgggtaagtaccaaaatcaaaacagttgtatttgattcggcagatatgtcttctgatgatctttttctgaaatgcttacagtcttcatataaggcttattttgaaactgaacctgccggtttagataaacggcagctgatgaaaacgttaattcaaaaatgcggattcagttgttga

SEQ ID NO: 37249 - DNA, 873 bp, Neisseria meningitidis
atgaattatcctcacctttctcccaaagcaaaagaacaactaaagtatagcgatattgagcgcatcgaatacatacgttcccctcgttggataggttatccgcaggctcaacaggttttggtaaaactggaagatttgctaagtttcccgaaacaaaaccgtatgcctaatatgttgttggttggtgatactaataacggtaaaaccatgttgattaaacattttttgcggcaacatccagcccatgataatccacatggaaatggtattatcgcaccagtagtgattattcaagcaccgcctatacctgatgaaagccgtttttacaatgctattttagatttactgtttgccccctataaaactcatgacaggacagataaaaaacttgcccaagtgcttcatttgctcaaatacgttaatactaaaatgttgattattgatgaaatccaccatatcctttccgggagtttgaataagcagaaaacgtttttaaatgtaattaaatacttaggaaatgaattacaaattccgaatcctgatgaattgtttacatcatggttggttcgcttagcacatgcaaacgggttgaaagtacaaaccttctgtcatttgctatttcctaattatgagatatggaatagggatatagatcgccatactcctgactggttggtcaatacattggctgaaaaaacaggctgttcaaccattcgaatcaaaacaaccacattagatagcctacaaggtcgattatttgataaaaacaatttttcaggacaattgacgtggataaacagccttaaagccaatcaccgtaaacgcgataataatgctattgtttattgcccgctatgtctagctactgattaa

SEQ ID NO: 37250 - DNA, 885 bp, Neisseria meningitidis
atgggcggtttttccagcgaacgagaaatctcgctggacagcggcaccgccattttgaatgctttaaaaagcaaaggtatagacgcatacgccttcgatcccaaggaaaccccattgtctgaattgaaggcacaaggttttcagacggcattcaacatccttcacggtacttacggcgaagacggggcggttcaaggcgcgttggaactgttgggcattccctataccggcagcggtgtcgccgcctccgccatcggcatggacaaataccgctgcaaactgatttggcaggcattggggctgcccgttcccgagttcgccgtcctgcacgacgacactgatttcgatgccgtcgaagaaaaattgggcctgccgatgtttgtgaaaccggcggccgaaggcagcagcgtaggcgtggtaaaagtcaaaggaaaaggccgtctgaaaagcgtttacgaagaattgaaacaccttcagggcgaaatcattgccgaacggtttatcggcggcggcgaatattcctgccccgtcctgaacggcaaagggctgcccggcatacacatcattcccgcaaccgagttttacgactacgaagccaagtacaaccgcgacgacaccatttatcaatgtccttcggaagatttgaccgaagccgaagaaagcctgatgcgcgaactggcggttcgcggggcgcaggcaatcggtgcggaaagctgcgtgcgcgtcgatttcctcaaagataccgacggcaaactctatctgttggaaatcaacaccctgcccggtatgacgagccatagtttagtaccgaaatccgctgccgttacgggcgtgggttttgccgatttatgtattgaaattttgaagaccgcacatgtgggataa

SEQ ID NO: 37251 - DNA, 1470 bp, Neisseria meningitidis
atggaaaaacataatgggacttatcgggatttgcaccgtccagcttcggaatttgcgacgcgggacgaatatttggaacatgaattgcagattatgcaaccaaaacgctggcggcccaacctgccctttcgcgattaccgcttcgagtgggaggatttgattcctgcgatggcgggaacgattggaaaagtggtgatggtgggggcggtggcggcggcgtttgccgcacctttggggctgcctgacagctttgtactggaaaatgtgcgctatgagcttttaatcgccgccgcgtttatcttattggtatcgggcttttttctgcccggcgccaacctgcccggtacgcacgggccgctgattccgatgattcccatcgttgtgtcggcaggcgggcatcctttggcgttcggcatttcgattgcggttttaggtctgctgatggctttatttcgcggcggcagtattatggcgaagctgacaagcaacggcgtatgcggcggattattactctatttgggctttatcggcacgacggggcaggtaaaaaaattgttttcgtgggcaggcggttttaatatgccctacatcgcttttaccgtcattattgtaacgattgtgatgtacgctttgttggagcattggaaaaaacgctggttagccgtgcctttgggatgcttgattgccggtgtggtggcatttgcattgggtgcgccgtttgagtttcacaccgcccccggcctgcctccaatgagtcctgcttattggtggggtgaaaacagcggctggcatctggggttgccgacggcagaaagttttttggttgtctttccatttgcggtattggctgttgcaatgtggtcgcccgattttttaggacatcaagtgttccaaaaaatcagctatccggaaaaaaccgataaggtattgatgaatatagacgacaccatgacaagttgttctgtccgtcaagcagtgggttctattttagggggtgcaaattttacctcttcttggggaacttatatcgtaccggcatcgattgccaaacgccccattccgggcggtgcggttttaacggcggttttatgtattatcgccgggttgtggggctatccgatggacttggcgatttggcagccggtattgagcgtagccttggtcgtaggcgtatacttaccgcttttggaagcgggcatggaaatgacgcgcaaaggcaaaaccacccaatccgccgccatcgtggtgttctcttccgccttggtcaatccggttttcggctgggcgttgacgatgctgttggataatttgggcttaatcggctgcaaagagcgcagcgcgcaattaggtttcgccggacgcgtattgatacccgcagtaggtttcttgatcttgtgtgtggcgatgggtgcggtcgggatgctgcccggtatcccgccgtttttggaacacttcaaatctttgggctag

SEQ ID NO: 37252 - DNA, 387 bp, Neisseria meningitidis
atggcatacagcgataaagtaatcgaccactacgaaaatccccgcaacgtcggtactttcgacaaaaacgacgaatctgtcggcaccggcatggtcggcgcaccggcctgcggcgacgtgatgcgcctgcaaatcaaagtgaacgatgaaggcatcatcgaagatgcgaaattcaaaacttacggctgcggttccgccatcgcttcgtccagcctgattaccgagtgggttaaaggcaaaagcctggatgacgcgctggcaatcaaaaacagcgaaatcgccgaggagttggaattgccgccggtaaaaatccactgctccatcttggctgaagatgcggtaaaagcggccgttgccgactaccgcaaacgtcaggaaaacagataa

SEQ ID NO: 37253 - DNA, 1359 bp, Neisseria meningitidis
atgttggtcggcgttatcgtcgccgcccagctttttgctcctgccctcgacttgtctaatatcggaccttggttccacttcggccgcctgcgtccgctgcacaccaatgcggttattttcgcatttggcggttgcggcctgatcggcacatcatactacgttgtccaacgtacttgtaatacccgtcttttcggcggttggctgccggcatttaccttttggggctggcaggcggtaatcgttgccgccgtcgtcagcttccctatgggttggacccaaggtaaggaatatgccgaactggaatggccgatcgatattctgattactttggtttgggtggcttacgccatcgtattcttcggtacgattgccaaacgtaagattaaacatatttacgttgccaactggttctacggcggctttattttggcggtcgcacttttacacatcgtcaacaatatcagcatcccggccggtttgatgaagtcataccccgtctattccggtgcgattgatgctatggttcaatggtggtacgggcataatgccgtgggcttcttcctgactgccggcttcttgggtatgatgtactatttcgtacccaaacaagcagcccgccccgtttactcctaccgcctgtccgtcgttcacttctgggcgttgattttcacctatatgtgggcgggtccgcaccatcttcactacactgcgctgcctgactggacgcaatctttgggtatggttctgtctttgattctgttcgcaccctcttggggcggtatgattaacggcatcatgaccttgtccggcgcgtgggacaaactgcgtacagacccgattcttaaattcctgattgtatccttgtccttctacggtatgtctacctttgaaggcccgatgatgtcgattaaaacggtcaatgcattgagccactatacggactggaccgtcgcgcacgttcatgcgggtgcgttgggctgggtaggctttgtaaccatcggttccgtctattacatgattccccgtctgttcggcaaagaacagatgcacagcaccaagctggtagaagcacatttttggattgcgaccatcggcgtggttctgtatatcgctgccatgtggattgccggtgtgatgcagggtttgatgtggagttctttgaacgatgacggtacgctgacctactcgtttgtcgaatccgtaaaacgcaccatgccttactacgtgatccgttttgcaggtggtttattgtatctgagtggtatgtgcattatggcgtacaacgtgtaccgcacagccatcggtggtaaagcagtcgatgccgaaatccctgcggtttcccaaacacagcaccactaa

SEQ ID NO: 37254 - DNA, 354 bp, Neisseria meningitidis
atgaaaaattgcgaatttttttatgacccgacaagggcaatctatgatagcggtgcagattatttaaccagagaaaaacatagattagtcgtaattgcaaatagtgcttgggggctattgcttaatttatcttgttattatgacgaggttttggaaaagcggaaaataccgttcggcaaacaggaaattgatgacgatatggacaaagtgtccgcccataagcggaagtttaaagatatttctgaaatcaaagtaggggatggttgggaatacccgttcaattatgagcagggaatgaaagaattagatgaagtgctattgaaatacattcccttttttgaagaagaacgataa

SEQ ID NO: 37255 - DNA, 1068 bp, Neisseria meningitidis; identical to SEQ ID NO: 37197

SEQ ID NO: 37256 - DNA, 999 bp, Neisseria meningitidis
atgaaaaaatccctgattgccctgactttggcagcccttcctattgcagcaatggctgacgttaccctgtacggcaccatcaaaaccggcgtagaaacttcccgctctgtatattacgaagacggcaaagctgctgaagttacaaccggtaccggcatcgttgatttgggttcgaaaatcggcttcaaaggccaagaagacctcggtaacggtctgaaagccatttggcaggttgagcaaaaggcatctatcgccggtactgactccggttggggcaaccgccaatccttcatcggtttgaaaggcggcttcggtaaattgcgcgtcggccgtttgaacagcgtcctgaaagataccggcgacatcaatccttgggatagcaaaagcgactatttgggtgtaaacaaaattgccgaacccgaggcacgcctcatttccgtacgctacgattctcccgaatttgccggcctcagcggcagcgtacaatacgcgcttaacgacaatgcaggcagacataacagcgaatcttaccacgccggcttcaactacaaaaacggcggcttcttcgtgcaatatggcggtgcctataaaagacatgagcgggtggataagaacgtgaatattgagaaataccagattcaccgtttggtcagcggttacgacaatgatgccctgtacgcttccgtagccgtacaacaacaagatgcgaaattggctttgccaaacgacaattcgcacaactctcaaaccgaagttgccgctaccgtggcataccgcttcggcaacgtaacgccccgcgtttcttacgcccacggcttcaaaggctcggttgatgatgcaaaacgcgacaatacttacgaccaagtggttgtcggtgcggaatacgacttctccaaacgcacttctgccttggtttctgccggttggttgcaagaaggcaaaggcgaaaacaaattcgtagcgactgccggcggtgtcggtctgcgccacaaattctaa

SEQ ID NO: 37257 - DNA, 966 bp, Neisseria meningitidis
atgagctacacgcaactgacccaaggcgaacgataccacatccaatacctgtcccgccactgcaccgtcaccgaaatcgccaaacagcttaaccgccacaaaagcaccatcagccgcgaaatcagacggcaccgcacccaagggcagcaatacagcgccgaaaaagcccagcggcaaagccggactatcaaacagcgtaagcgacaaccctataagctcgattcgcagctgattcagcacatcgacccccttatccgccgcaaactcagtcccgaacaagtatgcgcctacctgcgcaaacaccaccggatcacgctccaccacagcaccatttaccgctaccttcgccaagacaaaagcaacggcagcacgttgtggcaacatctcagaatatgcagcaaaccctaccgcaaacgctacggcagcacatggaccagaggcaaagtccccaaccgtgtcggcatagaaaaccgacccgctatcgtcgaccagaaatcccatatcggcgattgggaagccgacaccattgtcggcaaaggacagaaaagcgcattattgaccttggtcgaacgcgttacccgctacaccatcatctgcaaattggatagcctcaaagccgaagacactgcccgggcagctgttagggcattaaaggcacataaagacagggtgcacaccatcaccatggataacggcaaagagttctaccaacacaccaaaataaccaaagcattgaaagcggagacttatttttgtcgcccttaccattcttgggagaaagggctgaatgagaacaccaacggactcatccggcaatacttccccaaacaaaccgatttccgtaacatcagtgatcgggagatacgcagggttcaagatgagttgaaccaccgaccaagaaaaacacttggctacgaaacgccaagtgttttattcttgaatctgttccaaccactaatacactag

SEQ ID NO: 37258 - DNA, 384 bp, Neisseria meningitidis
atgaagctgaccgtccgcaactaccatctcgacggctacggccatgtcaacaatgcgcgctacctcgaatttttcgaagaagcgcgctgggcgttttttgaagaacgcggactgctgcacgagttggcaggcctcatactgattgtcgcccgcatcgacatccgatacagccgccccgccgtcgaaggcgacgtattgcagttttcatgccgcctgaaaacccccggcacgcgccgtattgtgctgacccagacgattacactgccaaacggcaaaaccgccgcagaagccgacattaccctgatgcccgtccacgccgccacacaacgcaccgtcagcctgcccgccacccttgcccgcgcattggaagccttgtccgaatga

SEQ ID NO: 37259 - DNA, 297 bp, Neisseria meningitidis
ttggaatcagggattcccgtcagcttcggcggcgggggcgtaccgattgcaaacggcaggaatctggttacacggcaagcagcaaacggcgttggcaaatccgactccgaggcctgcgaacacgccctaatcaatgccgcccgcaaattccagcagaccgcaggcaaactcggcgggcgcagtgttaccggcttccacagctacttcgacaagcagccgctgcaaggcgggcaatacgactgtcagacaggttcgttccacgtccgcgtggtcatgcgcgccaatgtcgtccgttaa

SEQ ID NO: 37260 - DNA, 585 bp, Neisseria meningitidis
gtgcggacggcggttgccgtactcgacgtactcggcgcggcaggggacgcgggtttcgacgcgcccgcccgccgccgagcatcggcgaaatccggccaccgctacacaggcacggtgtccaaagtctatgacggcgacacccttcacgttatcgacggcgacggcgcgaaacacaaaatccggatggcgtatatcgacgcgccggagatgaaacaggcttacggcacgcgttcgcgcgacaacctgcgcgcggcggcggaaggcaggaaagtcagcgtccgcgtgttcgacaccgaccgctaccagcgcgaagtggcgcaggtttctgtcggcaaaaccgatttgaacctgatgcaggtgcaggacggggcggcgtggcattataaaagttatgctaaagaacagcaggataaggcggattttgccgattatgccgacgctcaaattcaggcggaaagggaacgcaaaggattgtggaaagctaaaaatccgcaagcgccgtgggcgtaccgccgggcaggcaggagcggcgggggcaataaggattggatggatgccgtgggcgaatggttgggcatttggtaa

SEQ ID NO: 37261 - DNA, 240 bp, Neisseria meningitidis
atgccccatacccttcccgatatttcccaatgtatcagacaaaatttggaacaatatttcaaagacctgaacggtaccgaaccttgcggcgtgtacgatatggtattgcatcaggtggaaaaaccgctgctggtgtgcgtgatggaacaatgcggcggcaaccagtccaaagcctccgtcatgttgggactgaaccgcaataccttgcgtaaaaaactgattcaacacggtttattgtga

SEQ ID NO: 37262 - DNA, 1902 bp, Neisseria meningitidis
ttgccccgaattgccatgccttatttcgccctgtttgacgatgccgtaagcggccgcgcaaaacgctatcaaaatcatgtagaaagccgttttttccgtcccgaagaactcgatgctttggacggcgcgctgcaatcgggctggcaaaaagggctgcattcggtgttgtttgcagactacggattcggtctgccgctgacgggggttgagtccgaacgcggcggcaatcttgccctgcactggtttgccgactgcgccgacaccgatgccgaaagctggcttgcccgacattcagacggcatccccgccggcatttccacgccgcaatcctccgtatccgaaaccgattacctcgaccacatccgccaaatccacgaagccatccggcgcggcgacacctatcaaatcaactacaccacccgcctgcacctgcaagcctacggcaatcccgtcagcctctaccgccgcctgcgccagcccgtcccctatgccgtcttgtcccacctgcccgatgtggaggggcaatccgcgtggacgctgtgtttctcgcccgaactcttcctcaaaatcggttcggacggcaccatcagcaccgaaccgatgaaaggcactgcgccgattttgggcgacggacaagacgaacgccgcgccgccgagttgcaaaccgacccgaaaaaccgcgccgaaaacgtgatgattgtcgatttgctgcgcaacgacctcggcaaaatcgcccaaaccggcaaagtatgcgtgcccgagccgtttaaagtatcgcgtttcggcagcgtctggcagatgaccagcaccatccaagcccaagccctgccaaacacctcgttcgccgacatcctccgcgccgccttcccctgcggcagcatcaccggtgcgcccaaaaaaatgagtatgcagattatcgaatcgctcgaaaccgaagcgcgcggcctgtacaccggcagcatcggctacctgaatccatgtaaaagtgggctggggtttgaaggcatattcaacgtcgttatccgcaccttgttgctcaaacccgtttctaactcagtttcagacgacctagatagtcgattaaatttgaatcaggacaaggcgacgaaaccgcagacacggcaagacgaggcaacgccgtaccggtttaaagttaatccactctatcaaggggtgtacggtgtcggttccggcatcgtcatcgacagcgaccccgccgccgaatatcgcgaatgcggctggaaagcccgtttcctcaacgaattgcgccccgatttcggcatttttgaaaccctgcgcgtcgaaaacggacgctgcaccctgctcgaccgccacctatgccgtctgaaaacctccgcgcaagccctcaacctgcccctgcccgacggttgcgaaaatcaaatcaaacaatacattgccgacttgcccgacggcgcgttccgcatcaaagccctgctcgcttcagacggcatcagcctgtcccgcgccgttttaaaccgtctgaccgacaaacaacgcgtcatcatttcgccgaccatcctgcccgcacaaaactacctgcgccgcttcaaaaccacctgccgcaccgtcttcgaccaagcgtggcaaaccgccgaaacacaaggcgcgttcgacagcctgtttttcaattcagacggcatcctgctcgaaggcggcagaagcaacgtgttcgtcaaacatcgcggacaatggcttacgccctctttagatttggacattttaaacggcataatgcgccaagccgtattggacgaaccgcaaaaatatttgcaaacaaatcaagtaatcgaaacacacatcacacaaaaaacactgcaagaagccgaagaaatccgcctctccaacgccctgcgcggcgtatttgccgccgcccttgcctga

SEQ ID NO: 37263 - DNA, 1986 bp, Neisseria meningitidis
atggctaaaaacaaccaatacagcgaatccagcatcaccgtcctcaaaggtttggaaccggtcaaagaacgtcccggtatgtacacccgcaccgacagcccgacccatatctgtcaggaagtgattgataacgcggcggacgaggcgttgggcggtttcgctacggcaatcgacgtgcaaattcatgaagacggttcgctttccgtacgcgacaacggccgcggtattcccgtcggtctgcaccctgaagaaggcgtacccgtagtcgaactcgtgttcacccgtctgcacgcaggcggcaagttcaacaaaaaagacggcggcagcgcgtatgccttttcaggcggcctgcacggcgtgggcgtatccgtgaccaacgccctttccacccgccttgaggtaacggtcaaacgcgaaggcaaaatccaccgtatcgtgtttgccggcggcgacgtggtcgaaccgttggcacaagtgggcaaatgcgccgtcaaagacagcggcaccgaagtgcgcgtgtggccggacggcaaatattttgaaagcccgaattacagcattcccgaactcgaacgcctgctgcgcgccaaagccgtgctgctgccgggcgtgcgcgtttccctgacccgtccggtcaaaggcgaagacgaagcgcacacccaaacctggcattaccccgacggtctgaaaagctatctgaccgacctgattgccgacgcgcaggaagccgtgcctatcttctcttgcgaaaactacatttcagacggccacaacggcgatttcagcatcggcgaaggcgccgcgtttgccctgacctggctggaagaaggctcgtgcgccaacgaaagctacgtcaacctcatccccaccccgctgggcggcacgcacgaagcgggcttgaaacaagccgtgttcaacgccgtcagcaacttcatcaatctgcacaaccttttaccacgcggcgtgaaagtgcaaagcgacgacgtgttcggcaaaaccgcctttgtcctctctgcccgtgtcctcgacccgcagttccaaggtcagaccaaagacaaactgaccaaccgcgacgcgctgaaactcgttgctaccgtatcgggcgaccctttggaattgtggctgaaccaaaacgtggacttcggcaaaaaaatcgccgaactcgccatccgtcaggcacaggcgcggatgcgttcggttaaaaagattgaaaagaaaaaaggcagcggcgtcgccgtcctgcccggtaagctgaccgactgcgaaagcgaagacatccgcgaaaacgaactcttcctcgtcgaaggcgattccgccggcggctccgccaaactcgcccgcgacaaagccacccaagccatcctgcccctgcgcggcaaagtgctcaacagctttgaagtccaccccgaccagctcttcggcaacgccgaaatccacgacatttcagttgccatcggcgtcgatccgcacggcatcaacgaccatcccgatttaagcggcctgcgttacggcaaaatcgccatcctgtccgatgccgacgtggacggctcgcatattcaagttttgctgctgaccctgttctaccgccacttcccgaaactggtcgctgacggacacatctacgtcgcccagccgccgctgttccgcgtagatgtcaacgcacaaggtaaaagcaaacccgcccgcaaattctacgccctcgaccaaaacgaacttgacggcattttagagcggctgcaaaaagaaggcgttaaagaaactgcttattccatcagccgtttcaaaggtttgggtgagatgaacccagaccagctcaaagatactaccatgcaccccgacacccgccgcctgttgcaggtacaaatccccgaaggcgcggatgacgagacgcgcgacatcttcgtcaaactgatgggcaaaggcgaagccgccgcccgccgtgcctggatggagcgcgaaggcgatacggcggaactcgatatttga

SEQ ID NO: 37264 - DNA, 720 bp, Neisseria meningitidis
atgacacagcaaatcaaatacaaacgcgtattactgaaactctccggcgaatccctgatgggttccgatccgttcggcatcaatcacgacaccatcgtccaaaccgtcggcgaaattgccgaagtcgttaaaatgggcgtacaggtcggcatcgtcgtgggcggcggcaatattttccggggcgtatccgcccaagcaggcagcatggaccgcgccactgccgattacatgggtatgatggcgaccgtgatgaacgccttggcactcaaagacgcatttgaaactttaggcatcaaagcgcgcgtacaatccgcactgtctatgcagcaaatcgctgaaacttacgcccgtcctaaagccatccaatatttggaagaaggcaaagtcgtgatttttgccgccggtaccggtaacccgttcttcacgaccgacactgccgccgcattgcgcggtgcggaaatgaactgcgacgtgatgcttaaagccaccaacgtcgacggcgtgtacaccgcagaccccaaaaaagactcatccgccacgcgctacgaaaccattacttttgacgaagccttgttgaaaaacctcaaagtgatggatgccaccgctttcgccctctgccgcgaacgcaagctcaatattgtagtattcggcattgctaaagaaggctcgctcaaacgtgtagtaaccggtgaaaacgaaggtacgctggttcactgctga

SEQ ID NO: 37265 - DNA, 1389 bp, Neisseria meningitidis
atgtctattaaatttgccgatttgaaccttgataaaaacattttgtccgccgtcagcagcgagggttacgaaagcccgacgccgattcaggcgcaggcgattccgtttgctttggaaggccgcgacattatggcttcggcgcaaaccggctccggcaaaaccgccgcctttctgttaccgactttgcaaaaactgaccaaacgcagcgaaaaaccgggcaaaggcccgcgtgctttggtgttgaccccgacccgcgaactggcggctcaagtcgagaaaaacgcgctggcgtatgccaaaaatatgcgttggttccgcaccgtcagcatcgtcggcggcgcgtctttcggctaccaaacccgtgccctgagcaaaccggtcgatctgattgtcgccacgccgggccgtctgatggacctgatgcaaagcggcaaagttgattttgaacgtttggaagtgctgattttggacgaagccgaccgtatgttggatatgggctttatcgacgacatcgaaaccatcgtggaagcaacgccgagcgaccgtcagactttgttgttctccgccacttgggacggcgcggtcggcaaactggcgcgcaaactgaccaaagaccctgaagtcatcgaagtcgaacgcgtggacgaccaaggcaaaatcgaagagcagctgctgtactgcgacgatatgcgccacaaaaaccgcctgctcgaccacatcctgcgcgacgccaacatcgatcaatgcgtgattttcacgtccaccaaagccatgaccgaagtcatcgcggatgaattgtacgaaaaaggtttcgccgcaaactgcctgcacggcgatatgccgcagggctggcgcaaccgcacgctgatggacttgcgcaaaggccgctgcaaaattttggttgccaccgacgttgccgcacgcggtatcgacgtaccgaccattacccacgttatcaactacgacctgccgaaacaggcggaagactacgtccaccgcatcgggcgcaccggccgcgcaggccgcacgggtattgcgattacgtttgccgaagtgaacgaatacgtcaaagtccacaaaatcgaaaaatacattaaccgcaaactgcccgaactgaccatcgaaggcatggaaccgacccgcaaacgcaaatccgcaggcggtaagccaaaaggcaaaggcggctggggcgataggaaatccggcggccggcgcggcgatcataaaccgggcaaagaaggcttcggcggcaaaacgcgcggcgaaggtttcaagaaagaaggctttaagaaagacggtttcaaaaaaaccggcgaaggcttcaaaggcaaacgcaaagccggcgattcttttgcaggcagaggcgaacgccgttacaaagaccgctaa

SEQ ID NO: 37266 - DNA, 1536 bp, Neisseria meningitidis
ttgccgataaaaaacactatgtctcctaaaaaaatacccatttggcttaccggcctcatcctactgattgccctaccgcttaccctgccttttttatatgtcgctatgcgttcgtggcaggtcggcatcaaccgcgccgtcgaactgttgttccgcccgcgtatgtgggatttgctctccaacaccttgacgatgatggcgggcgttaccctgatttccattgttttgggcattgcctgcgcccttttgttccaacgttaccgcttcttcggcaaaaccttttttcagacggcaatcaccctgcctttgtgcatccccgcatttgtcagctgtttcacctggatcagcctgaccttccgtgtcgaaggcttttgggggacagtgatgattatgagcctgtcctcgttcccgctcgcctacctgcccgtcgaggcggcactcaaacgcatcagcctgtcttacgaagaagtcagcctgtccttgggcaaaagccgcctgcaaacctttttttccgccatcctcccccagctcaaacccgccatcggcagcagcgtgttactgattgccctgcatatgctggtcgaatttggcgcggtatccattttgaactaccccacttttaccaccgccattttccaagaatacgaaatgtcctacaacaacaataccgccgccctgctttccgctgttttaatggcggtgtgcggcatcgtcgtatttggagaaagcatatttcgcggcaaagccaagatttaccacagcggcaaaggcgttgcccgtccttatcccgtcaaaaccctcaaactgcccggtcagatcggcgcgattgtttttttaagcagcttgttgactttgggcattattatcccctttggcgtattgatacattggatgatggtcggcacttccggcacattcgcgctcgtatccgtatttgatgcctttatccgttccttaagcgtatcggctttaggtgcgattttgactatattatgtgccttgccccttgtttgggcatcggttcgctatcgcaattttttaaccgtttggatagacaggctgccgtttttactgcacgccgtccccggtttggttatcgccctatccttggtttatttcagcatcaactacacccctgccgtttaccaaacctttatcgtcgtcatccttgcctatttcatgctttacctgccgatggcgcaaaccaccctgaggacttccttggaacaactcccaaaagggatggaacaggtcggcgcaacattggggcgcggacacttctttattttcaggacgttggtactgccgtccatcctgcccggcattaccgccgcattcgcactcgtcttcctcaaactgatgaaagagctgaccgccaccctgctgctgaccaccgacgatgtccacacactctccaccgccgtttgggaatacacatcagacgcacaatacgccgccgccaccccttacgcgctgatgctggtattattttccggcatccccgtattcctgctgaagaaatacgccttcaaataa

SEQ ID NO: 37267 - DNA, 723 bp, Neisseria meningitidis
atgcccgaaacaggttttcgggcatttttacggcaaatgccgtctgaaaccaccaaacagcggttcagatggcatccctttcaaaagcgcaccattatgaaaaacatcgtcatcctgatttccggacgcggcagcaatatgcaggcaatcgtcaatgccgccattcccaacgtccgtattgccgccgtgttgagcaacagcgaaacggctgccggtttgcaatgggcggccggtcagggtattccgaccgacagcctgaatcataaaaactttgaatcacgacttgccttcgataccgccatgatggaaaaaatcgacgcatatcaacccgacttggtggttttggcaggttttatgcggattctgacccccgagttttgcgcccattacgaaggcaggctgatgaacatccatccgtccatcctgccttcatttactgggcttcatacgcacgaacgctctttggaagcgggttgccgcgttgcaggctgtacgattcactttgttacggccgagctggattgcggcccgattgtatcgcaagggattgtgccgatacttgatggcgatacggcagacgatattgccgcccgggttttggctgtcgaacacaaactctatccgaaagccgttgccgattttgccgccggccgcctgattatcgagggaaaccgcgtcagaaattcggaaaacgccgatgccgcccgtttcctgacggcgtaa
